United States Patent Application Publication US 2020/0377945 A1 - sequence listing, part 12

SEQ ID NO: 2173 - DNA, 28610 bp, Unknown
  gut microbiota DNA sequence
tactagtgtagtatttatttactgactaataattattttgaaggagaaaaaagttggataatcagcaaaacgttttactagacgtcgaaaagcttcataccggctaccgcctgcagggcgagttctatgacgcggctgatggcatcggttttactctcaagcgcaacgaagttttggctattgtcggcgaaagcggctgcggcaagagtacgattgcctccagcatcgttggcctgtatgaccggaaaaacacccgggtcgaaggagaaattaggtacaagaacctgaacttggtcaatttgagtgaggatttgtttaaccaagttcgcggcaacaatattggcatgatttttcaagacccgatggccagtttgaaccctttgatgaaggttggggaccaggtagcggaagccttgctttaccatacggatatgaacaagcagcagcgccgcgaccgggtgattgaactcttcaatcaagtagggatgcctaagccggaagccatgtatgacatgtacccgcatgaactttccggtggtttgcggcaaagagtcgtcatcgcgatggcggtggcctgcaagccggaaattatcattgctgacgaaccaacgactgctttggacgtgaccattcaagcccagatcctggacctgctcaagaagatccagaaagaatcggactctggcatcattttgatcacccacgacttgggcgttgtagcggaaacggctgatgaagttgctgtgatgtatgcggggcaaattgtagagaaagctgatgtgaaaactttgtttactcatcctttgcacccgtatacccggtcactgttaaattccattccacagtcagatgatgacaaggatgacctgcatgtaatccagggaactgttccttcactgaaaaacatgccgcggaccggcgaccgcttcgcggctagaattccttggattccagctgaagcgcatgaagcagacccgcagctgcacgaagttgagccaaatcactttgtccgctgcacctgctggaagactttccactttcaagatgaaggataggtagcaagtatggcagaagaaattatccaagttaaagatctgagagtccactacccaatccggtcgggcttttggaacagaattactgattatgtccgggcagttgacggggtttctttttcaatcaaggaaggggaaacttatggcttgatcggtgaatcaggctccggcaagtccacgactggcaaggcaatcgtcggcgtagagaaggtgaccagcgggcagattctctacaagggtgaagacataaccaaggaatccgtccgccggaagatgaactacaacaaggacgtgcagatgatcttccaggactccatgtccagtcttaacccccgcaagcggattgaagacattatcgcagaaccgatccgcaactttgaaaacttgaccactgaccaggaacgtgaccgggttcaggaactgctgggcatcgtcgggatgccaagtgacgcgatttacaagtttccccatgaattttccggtggtcagcggcagagaattgggattgcccgggcagttgccactaatccgaaattaatcgtggccgatgagccaacgagtgctttggacttgtcagttcaagcccaggttttgaacttcatgaagcacatccaacagcagtacaacattgccttcttgttcatttcccatgacctgggtgtggtcaagcacatgtcagaaaacctggcaatcatgcaccggggccggttggtggaagtgggcagccaggaagaaatttacaagaatccggcgcacatttataccaagcgcctcttgtccgcgattccgaaggttgatgttgaacaccgggcggaacacgcggccagacggcgggaaatcgaacgggaatttttgcaggaccaggcaaactggtatgatgcagatggccgggtctacccattgaccgaggttggccccaaccaccaggtagccctgcctaaagagcagatcaggggaggagaatagcaaatgtggaaaacagtcttaagacgggttttgatcatgatcccgcaattgatcctgcttagcattattgtcttcatgctggccaaaatgatgccaggggatccctttaccggtttgatcaaccctaactcaagtcctaaggaaattgcccgcttaaagcaggcatatggtttgaatgacccggtaccggtgcaatacgtacgctggattaagaacctcttgcatggtgatttggggcaaagctacatccagcacgtcccagtagcatctttgattgccgaccgggcccagaacactttctggctttcgcttttgtcaaccatcattctttacggcattgctatcccgatggggatcagcgccggcaagcatgaaggtgaatggcaggaccgggcaatctcaatttttaactacgtgacatatgctatcccaggctttgtcttctacctgctgggcctttggcttttcggctttactctgggctggtttccgatcagcgggacggttgccgccaatgccagtggcttctggggagttttctttagccgcctgcagcacatgattttgccggcaattctctatgcgatcatcgccacgactgggacagtgcaatacctgcgaaccgggatcattgacaacaaggtggaagactatgttaagactgcccgtagcaagggcgtgccggaaaaagtcgtcttcaacaagcacatcttgcggaattctttcctcccgatcgctgcctttatggggaacaccatcaccggtctgcttggcgggtcactgatcattgaaacggtcttctccttcccggggatggggaagcttttccttgactcaatcagccagcgtgactataccactttgacggctttgattatgatttacgggaccttgaccctgctgggcaacctgctgtctgacattatcatgagtctggttgacccgagaattcgcgtgaagtagaggtgaaatgatggctttatttactgttggtaaaaagaagcaggatgaccgggcccaaattccaccatccgctttaaagattacttttagagaaatttttaaaagcaaggctgcgactatagccttttgcaccattgtcgttattttgctacttacctttggcggttctttattccttgacagcagcaaggttactgaaatgcacattttggaatcctacgccggctggggacaaaacggccacttgctgggaactgatgacggtggccgggatattttgaatctgttgatcatgggcgggcgcaactcgattatgattggtctcttggtcactcttttctgtgaactggttggcttaatagtcggccttgtagccggctactatggcggcactattgactccatcatcatgagaatcgtcgacttcgtgcagattttgccgcaaatgccaattttgatcgttttggtaacggttctgccaaactataatgccatgactttggttctgctgatttcgatgttcggctggacaggtgaagccagatactaccggtcattcattctgtcacaaagggaaagagactatgttctggcgtctaagacttcaggctcttcaaataccaagatcatgttccgggaaattctgccaaatattgcatcaatgatcatcatcgatgtcgttttgagcgtttccggcaacatcgggattgaaactggcctgtctttcatcggctatggtttgccaaccaatattccatctttggggaccttgatcggttttgccagtgacccggttaacatcattgaccggccgtggctctggctgccggcaactgtcttgcttttgattatctgcttgagcatcaactatgtcggccaggccctgcaaaaggctggcgacgcccggcaaagagaaaactaaagacaattagcattaaattaaaattatcattgacttttaaaattaaactgctaaaataaaaagcatgaaagataaattttgtgaattgctatcacgataactattcatatgctatgtgctttatcttttgaatatattgtgtggaggtaaattaaattatgaagagaagaatgctcggaacatttggagtacttctggccggggcagctttgctggccggttgcggcaagagtagctccagctccagcaacagcggggctaaggatgccaagaaattcccggaagctacggcaactgcaactgccaagaagggcggcagcatcactatcgcagaagaatctgacacgcctgtcaagggtgttttcttgaacgaaatttctgacacccaatacgaccaagactttatggcttttgggaatgaaggtctgtttgcaaccgatgatcaatacaagatcaataacaagggtgccgctaccttcaagatggaccggaaggccaagacggtcactatcgaagttaagaagggggtcaagtggtctgacggcaagcaggtaactgccaaggacgttgaatactcttacgaaatcatcgccaacaaggccagccagtcatcccgctacaccagctcacttgccgacatcgtcggcttggcagaataccacgatggcaagtccaagaagatctctgggatcgaaatgcctgatggtgaaaacgggcgcaaggtggttctgcactttaaggaaatgaaacctggcatgacccagtctggtaacggcttcttctgggaatttgccgcaccttaccactacttgaaggatgtaccgttcagcaagttgcaatccagtgacaaggttcggaagaatccactcttctttggtccttacaagctctccaagctggtccggggccaatcagctacttgggtaagaaacccttactactaccgtggcaaggccaagctggacaagatcaccatctctgtgatctcaccaaattcagcttcccagtcaatcaagtccaagaagtttgacatgatcaacgttattaactcccaatggaaggaagttaaggggactaagggctataacttcgttgcctcaattccattggcatactcatacatgggcttcaaggtcggcaagtgggacaagaagaccggctcagtcaagatgaacaagaactctaagatgagcaaccgctatctccgtcaagccatgggttatgccatgaacgttgatgaagtaacccagcactacacccaaggcttgtctttcagagttaagactctagtgccagaagccttcggtgacttttatgacaagagcgtgaagggcttcccactgaacatcaagaaggccaacgctttgttggacaaggccggctacaagaagaagaagggtgaaacctaccgccgggatccaaatggcaagaagttgaccatccacctggcagccacgagtgggtccccaaaccaggaagcaatcgtgcaaaactacctccagcaatggaagaagatcggcctgcacgtaactttgaccactggccgtttgatcgaattcaactccttcgttgacaaggtagaaaacgatgacccatcagtagacgtcttcatgtccgcatggtccctgtccagtgaacctacccaagatgacctctacggtcctaaggctccttacaactttgaacgttttgcaactagtgaaaacactaagctgctgaaggaaatgaacagtgacaaggcctttaaccacagctaccgggtacaaaagttccacgaatggcaacaatacatgcaaaaggaagcctttgtaattcctttgagtaactcatactcgatcactgcggttaacagcaagctggtcaactactcaactaagccatcaaagacagctaccttgtggtacgaaactggctttaagaagtaaaagataataaataatttctcaaaagaggaggttttgcctcctctttttctgttctcccggcttagggcccggtcttgccgcttttgttatggtaaactatattatgtagcaatttagcaaaaggactcttgattgatgaaaagactaacgaaaataacgctttgcctgctagtggccctaagtctggcggcctgcgggcaaaagacggagaaaagcaagcaaaatggcaacagcggggcagaagatgccatgcagttcccagtggctaccagctttgccaagacgaaaaagggcggcagcatcaaggtagccttagaaactgatactcctttcacggggattttttctgatgaactggctgattcaacaactgatgccactttggcccagtttggctctgaatctttatttgacacggacaacagctacaatatcacagacagcggggcggcaagcttcagcctggaccggcaggccaagcagatcaccattaatattaaaaaaggggtcaagtggtctgacggcaagcaggtcgtggctaaagacgtggaatatgcctatgaagtaattgccaacaaggctacaaaaagttctcactatacttcttccctacaggatgtggcgggcttgaaggaataccatgacgggaaagacaagacgatcagcgggatcgaaatgccggatggggaaaatggccgcaaggtcgtgattcactttaaagaaatgcacccggggatgctgaagtccggtaacggctacttctgggaatctgccctgccatatcactaccttaagaatgtgcctttcagtaagctgagaacctgcatcgaaatccgcaaaaagcctgtttactttggaccttacaaggtccagagcattgaagcgggccagaaggtggtttggacccgcaatgaatactactggcgggggacgccgagcttgagcaagatcaccatctccattatttcgccaaagtcggtctccacggccattaaagaaagaacttacgacatcatcgaagttgttaactcccagtggcagcagatcaggactaccaaaaactacaggttcgtggccacgattcctttgagctacaactatctgggcttcaagctggggaagtgggacgagaagaccaactcagtcaagatgaataagaattccaagatggccaataagtctctgagacaggctattggctacgcgatgaacgtcacccagatccagcgcaagtatacgtctggcttgaccttccgcatcaagagcttgatcccgtcgcaatttggcgactactacgatgacaagagcaagggttatccttataacccagctaaggcgaaaaagcttttggacaaggcaggctacaagctccggtcgggggaaaaataccggcgtgacccgcaggggcataagctggtgatccacctggctgccatgaccggtgacgccagccaaagcaagatcatcaacaactacattaagaagtggaaagaaattggcttaaacgtcaaactgaccactggccacctgctggaattcaatactttttacaacctgctcttccaagatgacagccaggtcgacatgttcatcgccggctggactttaaacaatgagccttcccaaaatggcatctacggggcggggacccagtacaacctggagcgttttgctaccaagaccaatacccagcttttggaagcgatggactcagatgccgcctttaacatcaactaccggatcaaggtcttcaaaaagtggcaaaggtacatgcaagagcaagcctttgtaattcctttgaccagttcctacaagattacagccatcaacaagcagctggtcaacctctcttatgaaccggcagaaatgaacaacagccatccattatggtataaaatcggctataaaaaataatctgcgactctgttttgtccatttgccggacaaggcagagttttttcttggatttaggtaaaaaagccgcccttatggcgggcttttgatataattcttagtgttatgaaaggatgtatagttcatggtctcaactaaatttattaaaatgctggatgaaaaatacgggatccgcttcaaggatgtccgcttgctggaggaagcctttacccattcctcctatgtcaatgaaaatcccggcaaaactttggggaattatgaaaagttggaatttctaggagacgcggtattggaattcacagtctctgactacctttaccgccacttccagcacttaaatgaaggggaactgaccagattgagatcaaatatcgtccgcactgaaggcttctcaaaagtggccctggactgcggctttaaagaagaaatcaaactgggcgttggcgaggaaaaagctggcggccgcaagcgcaaggcccttttggaagacgtcttcgaagccttcaacggtgccttgttcttagaccagggaattgaagctgtcgaaaagttctctagccagaccgtttatcctttaatcgcggctggctactttaccccgtcccgggactttaagacggacctgcaggaacttttgcagcaaaacggcagcgtgaccatcgaataccgggtgttgaatgagagccagcagccgccccactttgaagttgaagtcctggtcgacggaaagaagctagccagcggggaaggacgcaacaagaagaaggctgagcaggacgcggccagccacgccttggagcacttgaatggaggaaaatagtgcctttaactagtttgattttggaaggcttcaagtcttttgcagacaagacggtgattgactttactaaagggattaccggcattgtcggccctaacgggtcaggcaagagcaacattactgaagccattcgctgggtcatgggggaaggcagtgctaaatccctgcgtggccgcaacatgaaagacgtgatttttgccgggagccagttccgcaagcccttaaaccgggcagaagtgaccatggttttcgacaaccgacaccgggaactggatttttcagctgaccaagtctcaattaccaggcggatcttaaagtccggcgacaatgaatacttgatcaaccagcagccggtccgtctgcgggatgtccgggcgctctttctggattccggcatttcccaaaacagcctggctattatttcccaggggcgggtggaccagatcctcaattcccaggcccgggaaagacgaggaattttcgaagaagcagccggggtgctccactttaagcagcaaaagcagcaggctcaagggcagctggagacgaccaatgacaacctgatccggatcaacgacctggtcaacgagctggagaagcggctggagcccttgcatgaacagagctccttggcccaggaataccaattccaaaaagccgcccttgatgaggacttaaagaccctgctggcctttgaaatcgccgacttggcccaggaagaaagggaagtttcccagaaattggccaagagccaggaacttctaagccggctggacgcggaagtcaagcagtcccaggccaagctggcagccaagcggcaggaattccagctggaaagccaaaagcgggaccaggtgcaagcggaagtccttaaattgaccaaccggctctcagaaatcaacacttccttgcaggtttcccagcagtcccggcagtttgaccaggcaaccaggctggaataccaaagacagctggctgatttaaaggaaaatctggcggctacggatgcggaaatcagcaaattggctgaccaggaagctgaatatgtcgggcaattggatcagctgaaaggcaaaagacaaaagctggtcgaccagctgaaagaagacccggccagcctcaagttgaaagtagaagacctgcgctcgcaatacattcagaccttgcaggaccaaaccagtgccaacaaccagctggtttacctggaaggggaaatcaagcgggccaaagagagcaagggccagcgctatgaagatgcctccagccaattggccaagagccaggaagaactggaaggcttgcggttgaaagggcaaaagctgcgggcagaaattgaccagctgcaggcggaattaaaggaagccagcgaccaattagggaaattagctgccgaacagcaggttgcccaaaagcagctgcaggcagatttgaccaacctccagcggctgactgcccgccgggatgccctggtcaatatccagaagcggcatgatggctactatgcaggggtcaaacaggttttaaaccagctagaccgcttcccgggcattatcggggcagttggggagcttttaaccttcccggctgacctggaagcagccatgacgactgcccttggcggcagcgttcaaagcctggtagctaaagaccggatggcggctaaagatgccatccagcagttgaaggtcagaagactgggccgggcaacttttttgcccctggatgcattaagatatcgggcaattcccgcttcaacccggcaggctctggaacgctttgccggcttccaaggcctggccagcgaattggttgaggctaagggcgatactgacatttcagaagctatccagtacctgctgggcagcatcattatcgttgacaatatggacacggccctggctgtctctaggcagatcggccactaccgggtcgttaccctggacggggatgtcatcagtcccggcggggccatgactggcggggcccgcaaccagcggaataattcccctttgcagacaacggctgaaatcaacaaggcgacggccatgctggaggaattagaaggacagttccatatcaaagaaaaaaagctggcagccttagacaagcaagttaaagataagcaggagacccgggagcaaatcagtcgggacctgcagagcctgcagcaggacttgagcgcggcagtcttgaccttccaaagccaggaaaaagaagtcaagcgcctggaaagcgccgttcagctctaccaggcccagcaggctgaacaagctgcctacctggcagatttgactgacaaagaaaaggcccaaaagactaagaaggaagagctagccgctttggccgaccagcaaaaacgcgacctggccagcctgcaagagaccattcagaactacactgatttaaaccagggcgtgcaagaaaaattggctgagcttgacccgcaattggcggttttagccaacaagcaggaaaacctgcaagccagaaaggctgagctcggccggcaaaaggcggctagccagaagcagatcgggcagctggaagaaaaactggctgctttggacaattccagtcaattgtcagccagcaagaaagaggagctgggcctggagaaagaccggctcctggctgagcaaaaagccaagcaggctgacctggatgcagctagccagcttttgggccagctaaacgggcaaatcaaccagctggaagccgtggcgaccagaaactatgacttgcgaaaagacgcggctagtgagcaagaagagttctcagttaggctggccacggttaaaggccagctcaagcagcacctggacagtttaagggaagactactctttgacttatgaagccgcgctttcccaggccaagctggaaaatacggaagaaaaccagcagaacctgcgccgcagcgtcaagctgcaccggatgtctttggaagacatcggcccggtcaacttgggcgcgattgacgaatataaggaagtcaaggaccgctatgacttcttgaacgggcagcagaacgacctgctggaagcaagaagcaacctgcagcagtcgatggatgaattggaccaggaagtcaagggtcgcttcggtcagaccttccagcagatttcggcctctttcagccgccttttcccggtggtctttggcgggggcaatgcccgcttgaccttgacggatccggacgatttgctggagagcggggtggaaatcatcgcccagccgcctggcaagaaactgcagcgcttgagccttctgtccggcggagagcggtcgctgacggcgatcaccttgctttttgccatgctggaagtcaacccagtgccattctgcgtgctggatgaagtggaagcggctctggacgatgccaatgtcgtccgctttgcccgtttcctgcgccaatatgacagccagacccagtttatcgtgattacgcaccggcgggggaccatggaacaagccgaccagctctacggggtggtcatgcaggaatccggggtatcccagattttgtcggtctccctgaaagatttaaaagatgaggtataatcgtgggattatttgatcgaatcaaaaagagcctgttcggccaaaaagacgaagaaaagccagaagaagtcaaggctgaccaggaagaagccgcagaagaaaatgctgaaacagaaaatgaggcagttgcagagactactgaaacttctgaagaagcggtagcagaaaaggctgaagagcaagaagaaaccgctgaagaagaatctgctgaagttacagaagaaacagaagaatctactgaagctacagaagatgtagaagaagaaacagaaactactgaaactgcagaagaaaagactgaagctgaagaagagaccactgaaccagcagaagaaagtacagaagaaaagacaaccgagctctatgaaaaggggctggagaagtccaacaagggttttggtgcccgcctcaatgcctttttggccaaattcagaacggttgacgaagacttctttgacgacttggaagaattgctgattgaatctgacgttggctatgagaccagtgaagaactgactgaccagctcagagaagaagccaagctgcaaaaggccaagagccgggatgacttaaagcgggttattgttcaaaagctggtggaagtctatgacgaaaatgccaacagcgaaaacgaaaagctggcctacgatccaaacgccaagccaaatgtctacctcttcgtcggcgtcaacggggccggcaagaccactacggtcggcaaattggccaagcgtttccacgaccagggcaagaaggtcctgttagtcgctgccgacactttcagagccggcgcggttgagcagctggttgaatggggcaagcggaccggtgttccagtcgtaactggcccagacaaggctgacccggctgccgtggtctacgacggcttagagcgggcgatcgcggaagaagcagactatctcttggttgacacggccggccgtttgcaaaacaaggtcaatttgatgaacgagttggaaaaaatccagcggaccatcaagaagcgcctgccagagcagccggctgaaaccctcctggttctggacgggtcaactggccaaaacgcccttctgcaggccaaggactttgacaagacgaccaagctgtctggtttagtcttaaccaagctggacgggtcctccaagggtggggtggttctgtccatccgccacgaaatgaagctgccagtcaaattggttggcctgggcgaaaaggcagaagacctggccgactttgacgcggccaactatgccgtcggcctcttccacgacctgctgtagttttaaaaaagaagagcaaagttagattagaaggttaaaaagaaaaatgaaagatgatgcatgtacttcgattttagtcggcaaaaaagcggccatggacggcaataacctgattgcccgcaatgacgacaccttttctcccttaaaccagcaaaagtttgtcgttaacctggcagttcacggggaaaaggggcgcaagatcaagtcctggctgaacaagttcgaaatggacttgccggaagacgcctaccgctacccggctgtgcctaatgtcgactacaagaagtacggctactatgaagaaagcggcattaacgaaaagaacgtggccatgtcggctactgagtcaacttacggcaatgaacgcactctggcctttgaccccttagtggttgacggtttagacgaggattgcatggtcaatgtcgtcttgccttatattgactctgccagaggcggggttaagcgcctgggcgccttgatcgccaagtacgggtcagctgccgggaactcagtccttttttctgacaaggatgaaatctggtacatggaaatcgtgaccggccaccactgggtcgctcaaagaatccccgacgatgcttatgccatcgccgccaaccgggtctccatccaggaagttgactttactagtgatgacttcatgtggagtgcagggatccaggactttgttgccaaaaacaagctcaaccctgacctggaaggctggaacttccgccatatcttcggcaccttcactgaacaggaccgccactacaacacttcccgtgtctggtatgggcaaaagatcttgaacccaagcatcgaccaggacccggaagaccctgacctgccattcatccgccgggcagaaaagaagatcagcaaggaagacatcgaatacattctgggttctcactaccaggccacggtctacgatccatttgccgtcaagggcagcgatgaagaacaccaccgctaccggccaatcggccttaaccggacgcaaaacgcccatattctggaagtcagaaatgaccaagcagctggcgttgccgggatcatgtggctctgcatcgggggaccgactttcactccgttcgtgcctttctttaccaatatgaacgacactgaaccttcttataacgatacttccctggaataccggcagtctgacgcttggtggttctacaagtctttagcggctctggtggaaagccactactcccacttcgtccaaatggacgcgacctatttgactgagctgaaccgctacttccgcgcccgggtggccgaagtaaccgaccaggcccaaggcctcactggcgaagaactgaccacctttttgaccaaggctaaccaggaaacggtggcccactgccgccaggaaagcgaaaagctttggggccagctctttaaggaagccatcaagctgtccaatctgacttttaatatggataaaaatctctaaaaagtactgcacttgcagtgctttttgctatactggtaaccaggtgaaaaagatggatgaattgagcaaaaacgaagctttgggtgacctgtacgccatgtacagcgccttgctcacccagggccagcaggattattttgaagattattactacaacgacctgtctttaggcgaaattgccgagaaccggcatgtttcaagacaagcggtctatgacaatttgcggcgcagcgccaagtctttggaaaaatacgaagacaagctgcagctgctggccagttacggccaattggaagaaggcatcagccaggccttagccagcctggccgccggtgaccaggaaacggccaaattgcagctggaagacttgctgcagataattagaggagaataagatggcatttgaaaatttaagcgaacgcttgcagaaggccctacgcaacttgaccgggaaggggaagatctctgaagaagacatcaacactgcctcccgggaaatccgcctggccctgcttgaagccgacgtcaacttcaaggtggtcaaggactttatcaagaccatcaaaaagcgggccctgggccaggaagtgcaggaatcactgactccaggccagcaggtcatcaagatcgtcaatgaagaactgaccaagatgatgggggaagaagcggtcggcttaaccaagtccccgcatatcccaactgttatcatgatggtcggtctgcaaggtactggtaagaccaccacggtcggcaaattagcctaccgcttgatgaaggaagaaaaagcccggccgtttttgattgccggcgacatctaccggccagcggccattgaccagctcaaacaaatcggggcggacttaaaggtcccggtttacagcgacccggaagaaaagagcgtggccaagattgtagaagacggtctggcagaagccgccgtccacagaaacgactacgtgatcatcgacacggccggccggctggaaattgacgaacctttgatgaaggaactggaagaagtcaaggaggtcagccagccggacaacatcctcttggtagttgacgccatgactgggcaagccgctgctgacgtggccaagaccttcaatgaacgcctggacgtgactggggtcatcttgaccaagctagacggtgacactcggggcggggccgccttgtctatcagagacatcaccggcaagccaatcctcttcactgggcaaggggaaaagctgaccgacctggaagtcttccacccggaccggatggcttccagaatcctgggcatgggggacatgctgaccttgatcgaaaaggcccagcaggactacgatgccaagcaggcggaaaaagttgcccagaagatgcgggaaaacacttttgacttcaacgactttatcgaccagctggaacaggtgcaaaagatggggccgctggatgaaatcatgaagatgattcccggtatggccaataacccgcaattgaagaacttctcaatcgatgagaagcagatcgcccacaccaaggccatcgtctactccatgacgccagccgaaagagaagacgaaagcctgcttaacccgagccggcgccggcggatcgcggccgggtcaggcgtgccgattgtggaagtcaaccggatgatcaaggagttcaagacggccaaggacatgatgtccaaggtgaccaaggggaacttcaaggacttggagaaattgcctggcatgaatagcccgatggccaagatggccatgcggcggatggggaagagcttcaagaagaagaaggccaagaaaataaagaaggtcaagcgcttccactcataattttaaaaaaagggcaggctgttaagcaaaaatactttacaggctgctttttgggtgttatagtataactattaaaatttaggaggactaattaatgtcagttaagattcgtatgcgccgtatgggcgccaagagaaagccattttaccggattgttgtagcagattcacgtgcacctcgtgacggccgcttcatcgaagaagttggttactacaacccagtttcacaaccaaaggaattgaagcttgatgaagacaagatctttgaatggttgaagaagggtgcacaaccttcagacactgttcgttcacttctttcaggcgctggcttgatggctaagttgcacgacgaaaagtacaacaaataattggaaaaggtttggggcactagcttcaaactttttttgttgaaaaggaaaaatatacaccatgaattactacaatgttggcaaaatcattgcgacccatggcttaaagggtgaagtcaaggttgctttgaccaccgactttccagaagaccgcttcagaactggttcccgcctttacctgggcgacgatagtcgggaagtgacggtagctgctggccggccctttaagcagttctggctggtaacttttgcggaaatcactgatattgaccaggcggaaaagctgaaagggacggaaatcttgatcagcgaagaagaccagggagaactgcctgacggggtctactactacagagacctcttgggctgcaaggtcctggacgatgaaagtggggaagaaatcggcgaattgactgatatcgaagcgccaggcgccaatgacatctgggaagtaactgacgaaaacggcaagagcttctggctcccatacatcccgcaggtcgttaagagcgtggatattgataaaaaagaagtccgggttgaattaatggagggcttgagatagtgaacatcaacgtattgaccctgtttcctgaaatgtttacccccttgcaggtttccctgctgggccggggccaggaagatggcaagtggaagctgaacctggtcaacttccgcgatttttctgaccggccgcacaagtcagtcgacgatactccttatggcggaggcgccgggatggttctccaggtcaagccgatcaaggatgcccttgattcactggaaaacaagggcaaggtcatcattacggctccccaggggaagaccttcaatgaacagatggcccaggaatggtccaaggaagaaaacctgaccttcatttgcggccactttgaaggctttgaccagcgggtttacgacctggctgacgaaatggtctcaatcggtgactacgttttgactggtggggaactgccgaccatgagcatgatcgatgccactgtccgccttctgccagggattctgggcaatgccctgtctacagttgaagaatccttctcagacggccttttggaatatccgcaatacacccggcctgctgattttgaggggcaaaaggtgccggaagtcctcctttcaggcaaccatggcaagatcgatgaatggcggcactaccaggctttaaaggccaccaagctgcaccggccggacctgctggagaaacgggacttgaccccggaagaggtcagaatgctgcggcagatcagagaagacgagcaggctgaagaagacaagctatagaaaaggggaattagatgaccctgcaatggagaaagcttttttccaaccggatcctggaccggggaagggactactggaaaaaggactgggtctacgcgcccagctacagtgaattgccggccggcatccactgccgggttggcaagcccgggcaaagctatgacgtaacgattgacttctctgatgactggagcgagatcaagtggatggactgtgactgcccttacgcggctgaaggctacaactgcaagcacgaggcagcctgcttgtacgccacggagctttttattgaagggatgcaggccattcaagaacccttgatcagcgaattgcctgcaagcgaccgcaaaaagcggcaggaagagatcattgaaaaggtctacggccttggcagaaaatacgtcaactatatttttgatcctggcaagattcttgcatcggttgactttgacccggtcctttgggagcggatctgggataatccggccctggcccatttggtagccgttaacctggatgacagccaggctaatgataagcagcccctgttaacggctaccggcttcagccatttcgccaaccgcgggaacgggaacaaggtcaacgttaaagttggccttaagcaagtaagccagctgaagtgcaatattgcggaatgcaagcaagacgaaattaccggcccttgccggcatgaaattgccctcctgcagaagctggtcttgatgatcatgcgggaaaacccgggtgaagtaactgactaccaggcagaccgtgccttggccagggcaaagatgctggaagaattcgaccaggatgccttagaggacgtgaagcttttggcccagctggagaaagagccgggcggttcttttttagtcaagtttaaagtcggccaaaagcgcctttacgtggtgaaaaacatccagaattttgtcgacgatgtcttaagctggcggccaatatccctgggcaaggaagaagtcttggtatcaccagattcttttgacccggccagccagcgcctgttcagcttcttggctacgatcgcggcagatggggcagacatttacggagagtcaaaaagaaacattgagattgcttccggccggattgacggctttttcgcggcggttgaaggcagcgaagtcgaaaacttggacaataagcaggtcgtccctgctaagcggggcgaactggaaaaagctgagcttgagatcgatgtatacgggggccgggggatcagcattaccgggatttgcccgccggttctccgggggatccgggccagctaccagctgacagatgaagcatttgttgctggcaagctcggcaatatgctgtacgccctttttggcaacaaagaaaacattgacgtgtcctttgacataaaccagctgagccaattcaaggctactgtcttgcctcttttgaaaaaatacagcaacttgaccattagcccggctgcccagcagcttttagaagaagcaggaggcttggaaaagagccagctacgcctggatgttgagggcgatgaagtagttggccaggcccgggtcttttatcagggcaaggcggtccgcttgagcgcaagcggggagcgggcaattaagcgggactggtacaaggaagagaagctggctgacctgctggagaaattttttgacctggaagacggcgactgccgcttggataaaggggatgacgaagcggtataccagcttttggaagggatgccgaaattgctcgccgcctttgatgaagttgaagttactccagcctttaaaaagctcaagcttaaagacaggctgaatctggcttttggcctttccttaagtgacgggcttttgcgcctggatctgaaaagcgagcttacgccagaagaattagcggaggtcttcagccagtacaaggaccggaagaagtatatccgcttgaagaacggcagcttccttaatccagccagccaggacttggaaaatctggcccttttagctaaaaacttagatttaaccgctaaggattttggcaaagaacagctggaaatgccggcctaccgggccctttacgtcgaccagctcttaaaagagcaggagatgggcgaaattgaaagagacgaccacttccagcaattgcttgctgactttgaccaaaaagaagcgccgctaaaactgccaaccggcctggagaagatcctccggccttatcaaaagaccgggactgcctggatgaaccggctggcccagcatggctttggcgggattctggcggatgaaatgggtctgggcaagaccttgcaggtgatcagcctcctggccagtcaaaaggaccagccgagcttgatcgtggctccggcctctctcgttcttaactgggaagctgagtttaaaaagtttgccccggaaatgaagacgctggttttgtctggctctaagaaagaacgaagcgggcaattggcagacttgactgatattgacgttgtaatcacgtcttatgacctgcttaagcgcgatattgccaactatgagccgcatacttttgcctatgaagtaatcgatgaggcgcagatgatcaaaaatccacggacagccgcggctaaggcggtttccgtggttaaagccaaacaccgctttgccttgaccgggacgccgattgaaaaccgcttaagtgagctctggagtatttttaacttcgtcatgccgggctttttaaagagttaccgggaatttaagaaggattttgaaagtccgatcgttaaggaagacgaccaggactgcttgaaccggctcagtcagatggtcggtccttttatcctccgccgcttgaaaaaagacgtcctcaaggacctgccggacaagctggaggaagtccgctatgtcggcatgggcaaggagcagaaaaagctctatgacgctgaaattgcccgcttgagaaataaggttatggctgaggacgatgaaggtatcaagcgcgagcagatagagattctggcggcattgacccggatcagggaaatctgctgcgacccaggcctgctttatgaagactacaagggcgaatctgaaaagcgcctggcctgcgtggatttgatcaagagcgcgattgacgggggccacaaggtcctgcttttctcccagtttaccagcatgctggacctgctggaagaaagcctgaaggcagaggaaatcgtctttttacggatcgatggccagactcctaaagccagacggatgactttagtcaacgtcttcaaccataaagacagtccggctaaggtcttcttgatttcccttaaggccggagggacgggccttaacttgaccggggcggataccgtcattcactatgacccatggtggaacgtggcggcccagaaccaggcaactgaccgggcccaccggatcggccaggaaaagaaggtaacggtctacaagctgattgccaaggatacggttgaggaagctattttggacttgcaggaagccaagagccagctggcgcaaggcatcttgacggcagagtctgtttccagcgccagcctgcaaagggaagacttgctcaagattttggactaaagaagcttgctttgcctggctaaagatggtattctattagacgtggtattttgccaataaagattaggggtgttccgctggcccagagaggttgatgaatgccgtagaaggagagacaataatggatccattaattcaagaattgactaaagaacaacttcgtgacgacatgcctgaattccgtgccggggacactgttcgtgttcacgtacgtgttgttgaaggtactcacgaacgtatccagatcttcgaaggtgtcgtaatcaagaagaagggcactggcatcggtgctacttacactgttcgtaagatcgcttccggcgttggcgttgaacggactttcccagttaacactccacgtgttgccaaggttgaagttacccgtcacggccgcgtacgtcgtgctaagctttactacctgcggactcgtagcggtaaggctgctcgtatcgcagaacgtcgtcgttaattctgacaacgaatctgaaactgctttgcattttgcaaggcagttttatttttacgcgttttggaactaatgttcgaaaaatcgtgctataattatgataaaaacagcaaggaggggcaggcatgcatttggcggaagtagccgactacattcaaagcaaatatggtattgaggccagctatgtcgacctggccgggcaaaccctggccgccgtcacggtcccgggagcaaatgaaagtttcgccttgctccttaaaaaggacggccgcgaaacgtttgaactgaaagccgggtccttggctaagtttttagctgcccagccggcttttggaccagccgtcttcatgcaggacccggcctggatcagggttgatttagataatcctgccttaaacgaccgctttttttataagaccctggattctgcctatcagagctcccggccgctggaagcagcgaaaaatacggcagaagataggcaagagcatgaaatctacctgctgaatgatgagggagaagacttccaagaagaagtaattcctaagcggccagcctttttcaaagacagcgactttgaccgcctgctggatgaaaaaggccagcccgtgatcccggaagggattaggcagatgcaggagagttacgactatttggccgtaccccggcgggagagcaatttttaccggcaggggatgctgatggctaattatgaagatgactttgcccaaatggtcccaattaacaagcagcgaccagtctaccatgatctgaccgtcgaccagttgcggtcctatttttcctggcggaccaagttccggcagggcaagtacaagccagctccggctgcctatgtctatttgctggccagtgaattagtctgccagatcggggttaaggataaagccgatggcctccgtcagctccgccttctttttgccaagtgcgtggagcaaaaggatatttccactagctggcaggaaaagcacatcctgcagaactacctggtttattacggttttgctcttgaggaaatccggccggattttgcagatgagctgatgcggggggaagtttatcataatcttctgtctggtgaagcgagcggacaggaactctaccaggccatctgctgcttgtcttcttatttgcccaagaacaatcccttgctgaaaaaggagccggagaagttttatgagcttctggcccaggtctggcaggaagtccgcctgaatccttaccagctgcttaagcttttggtcggagaaaaaacgaccttgccggtagaaatgtttgccgatacggttttcttcagccttgatccggccaaagacgctgagctcattttagggccaggccttgtctaccgctgccagggcgggcagtggagtaatgaagtctactggccttccggccggcagagacagcttttggccaatttcatgcatgaatttgaccgcttgagccggcaggcctttaagcaggggcgggccttaaaagagaaagacctgcctcccgcttttaagcaggcaatcgtgcaaggaattgctgactaccaggaaattctgatagaaagggcccggccaaaggttaagatcaacctagccagcctggatcagatccggtccgacgcggctgaaaccaaggaaagcctgctgactgaagaagagcggcagctggaggccgaagaagctgagagaatcactagcgagagtaataagcaagtatctgagtcttctgctgcagaagaaaagatgacgaaggacattgatgaagcggcggctagcggcctgggcttagacgagaatgaagagcagctgcttttggctcttttttccggccagccctaccaggactttttacgccagcggcacctgctcttaagcgtggtcgtggaccagattaatgagaaaatttttgacgaaatcggcgatgccgtaatcgattgcgatggccggaaggcagaaatcgtggaagattaccggagcgacctcgctgacttattaggaattgaggagaaatagtggagcaaaagaaacggattcccaagcggattgcccaaacggttatcagttcacttaaaggcggggttgtgccccggatcggcctgccatatatcacggtgggccggaaggcggaaatcgaggcccttttacacgacgttgacttagtcaaagaaggcggggcctccttccgctttgttgtgggccggtacgggtcaggcaagagttttttgctgcagaccatccgcaactacgtgatggacagaaattttatcgtcttagatgccgacctgtccccggaacgccgcctgcagggcagcaaggggcagggcctggccacctaccgggaactgatccagaacttggccaccaagacccggccggaaggcggagccttaactttagtcctggaccgctggatcaacaatgtccagacggcagtagccagtgaaattccttttgatgaccccggctttcagacagccgttgaccaaaagatcgtcagccagatttcctctttgagcgaaatggtgcacggctatgactttgcccagctgttagagcgctattaccatgcctacctggccggcgacgaggataccaagggtaaggtggttaagtggtttagaggggaataccggctgaaaacagaagctaagcaggatctgggcgtcaacatcattatttctgatgaagactggtacgagtacttgaagctttttgccgtctttttccgccaggctggctacagcggcatgtttatcatggtcgatgaattagtcaacctctacaagattcctaacgccatctcccgccagtacaactatgaaaagctgctcagcatgtacaatgacgccatgcagggcaaggccaagtacctgggcattattatgggggccacgccccaggcagtcgaagaccggcggcggggcgtttactcttacgaagccctcaggtcccgcctggccgaaggcaagtttgccaaggaagggcagcgggacctgtatgctcccgtgatccgcctggaacccttgacggcagaagaaatgctggttttaacggagaaactggccgacatgcatgccagcctttatggctatgagcggacgatcagcgaaaaggacctggctgactttatcaagattgaatatgccagagttggcacgagcagcatgatcaccccaagagaaatcatccgggactttatcgagctgctggacattgtctttcaaaatcctggccagaccgtgcagagtcttttgacagacggggactttgcctacactaagtcagacgccgtgtctgatgaaaagaccagcgactttgcggaatttacgatttaagttttaattagggaagttttttatggatactttttcccgctatgctcccttcatccaggactatatctattcccgaggctgggagaccctgcggcctttgcagacagcagcggcccaggtaatttttgctactgacgacaatttgtttttgtcggcttcgactgcttccgggaaaaccgaagcagccttttttcccatcttgacagatttggcggaaaatccggctgactctattgcctgcctctatattgcccctttaaaggccttgatcaatgaccagtatgaccggcttaaagacatctgtgaaggcagtgatgtcccggtttggcgctatcatggggatgtttcggctgctcaaaagcggaaaatgttcaaaaggccccagggggtcctgcagataacgccggaatccttagagagcctgatgatcaacaagcacgcggatattccccgcttatttggcgatctgcgctatgttgtcatcgacgagttgcactcctttttaagaagcggccggggcgggcagaccttctgcctattagagcgcttaaatcggctggctggtgttaaaccccgccggatcggcctgtcagctacgatcggggacccgaaagcggctgggcagtttttaggggccggatcgggccgtcagaccaggatccctaaggtgaaaagccagccccagcgctggcgcttgtcaatcgagcatttctataaaagcggtgaccaggctggcgaccattctgccttgccggcccaggccgttttagatcaagccagcgaccaggcaccagaattatctgacccgggcctggcctatatttttgaccataccaggggcaaaaagtgcctggtctttactaacagccgggaagaatgtgaagctgtctgccaggttctaaggcaatattgcgaatataagcatgaaccagaccgcttcatgatccaccacggcaacctgtccgcggccctgaggcagggggcagaggctatcatgaaagacgaagatgccaatattacgacctgcgcgacggctactttagaactgggtattgacgtcggccagctggagcgggcctttcaaattgaagcgccctttaccgtttccggctttttgcagcggatggggcggactggccggcggggcaatccagcagagatgtggtttgtcatgcgcgaagagcaggctgaaagccgggccatgctgccagttttgcttccttggtcgcttctgcaggggattgccttagttgagctgtatttacaagagcgctgggttgaaccgccaagagaccaccaattgccatacagcctcctttaccaccagaccatgtctactttgatggccggcggggagatgagcccggcagaacttgcttcccgggttttgaccctgtcctacttctgctgggtcagccaggatgactatagagttttgctccgccacttgatcaagaccgaccagatccagctgacggaaaatggcggcttgatcgtcggcctagccggcgagcgggtgaccaacaatttcaagttttacgccgttttccaggaaaacgaggaatacagcgtccacgctgagtcagaagaactggggacgatcgttaagcccccgcccttgggtgaaaaaatcgccatcgccggccatgtctgggtggttgaagaaattgaccgccgccgccggcaggtctacgtccaccaggttaaaggccagatcccagcatattttggggatgtagccggcgatatccatcccaaagtcctccagcagatgaggaagattctggcagaagagaggcagtatccttacttgatgaaaaacgcggctgcccgcttgagtgaaacgagagcaatggcggaagccgctggcctgccagataagcagctgattaacctgggggctaagacctactgccttttcccttggacgggttcttatgcttttctggcgctagagcgcttcttgcgcttgaaatgtgccagccgtttagggcttaagaatattgactcagttcggccatactacatccagttcagcatggatgtcagtgaaggagacttttaccagattctggctgaagaagccgctaaagactttgagcctttggacttgctctatccaagggaagtgccggtttttgacaagtatgatgaatacctgccagacgacctggtcagaaaagaatttgcctatagtgttttggatttgactgaaatgcggcgggcaatcggagagattacgagacaaaaggcttaaaaaagatgtacaataatgtctaataatcaaatctcgattttttagaaaggacatttatgtcagtaagcaagcgtccgatttccagttttcaagaattagaaacagccgctgatgacagcgatgagatacattttaagttaaatggccagcagtggctgttagttgatgacggcaatcctttgaccccggccagcaagaccttgatcaactgtgatttgcctgaagagcagcagttttttgccaatacggaggaatttctgacctgccagataggcggtcagtccctggctgactgctggccccagatgagcgaggtagctgtctggagcgtgcagtttgacagcctggaggaatttgtccaggcgattaaagacggctgcgacattaagttttctttagccggccgccagtacagcctgggccagtccagtgaacgaaaggtctaccggcagctcacctggcgtttggagaagggcgggcagatgaaggtggaaaaatttgctgacttgaagcagcttttggcctttgaaattgccgggcaaagcctgggccagcagtggtcagccatgaaaaatgtcgactacggctgattttaatctaa

SEQ ID NO: 2174 - DNA, 34330 bp, Unknown
  gut microbiota DNA sequence
caagatatttatattgttgcggccaagcgaactccatttggccgttaccacaagcaattggctgacttttccgccatcgacctgggccaaatcgccctgcgcggtgcattaaaagaagccggccttgacgccgaagccctggatgccctcttcatgggcaatgtcctgtctgccggcttaggccaaaacatggcccggcaaattgctttaaacgccgggatgcggcaggactcagtcgccgtgtccatcaacgaagtctgcggctccagcctcaaggcggcccgcctggctgaagcccaaatgttaatcggtgacctgggcctggttgctgtcggcggcagcgaaagcatgaccaacgccccaaaggaaatcatgttcagcgatggtctcgttgactccttctctggcaaatccatgggcatcactgccgaaaacgtagctaagcgcaaccacatcagccgccaagacgctgacgccttcagcttgtcctcccaccaaaaagctatcaaagcacaagctgaaggactttttgccgatgaaatcattcaaattggaggtctcaagcaagatgaaaacgtccgcccggataccagcctggaagccctggccggtcttaaaacttccttccttgaagacgggaccgtcactgccggtaacgcctccccaatctccgacggggccagcatgatcatcctggctaccgcggaaaaagtcgctgaataccagctgacgcctttagccaagctggttgcttacgccgaagtaggctatgacccggaattcatgggctatggtccatactatgctatccgtaagctgcttaatgaaactggccggcaggtagccgactacgacttctttgaaatcaacgaagcctttgccgcaactactttggctgttgcccgcgacctggaaattcctttagccaaggtcaacaagcagggcggggcgattgctttaggccacccgctcggcgcttccggcacccgccttctggctaccgctgcccgccagctgcaaagaggcggccagcgggctatcgccagcctttgcatcggaggcggcttggccatcgcttttgaaattgagaaggcgtaagaatgaaattctatcagttgccgcccgaagagaggcggcagtttttgcaagaagatggggtcgtcctggaagatatccctgcagctgatttagcccgcctggatgagatgagcgaaaacgtggtcggtgaggtcaagttccccttgagctgtttgaccagcgccctggtcaatggcaaaaattggcggatccccatgacgactgaagaagcctccgtcgtcgccgccgccaaccacggcatgtccgtcttcgctaaagccggcggcgtaaaagcgaccagccagcgcgacggcatctacgggcaaatcatcttagaagtcacggaagctttttccctggctggctttaaaaaggaattcccggcctatattaaggaagccaacaaggaatttgccagcttgatccggcacgggggcggcttaaaagacctgaccgcccgccaggaagctgacctggtctacctcctggcccttgttgacccggctgaagccatgggggccaacaagaccaatgctatcctggaattcctggcccagaagatgctggcctttcctggtgttgaagctaagctcttcgccatcctgtccaactatcccagccagctgactacagctaaggtggcaattcctgttagcctcctcagtaaaaaaggggacctggcagaaggcagggaagtggccaaaaagatggccctgttggctaaaatcgggagtagtgatccttaccgggctgtaaccaataacaaggggatcatgaatggggtagacgctgttatgctggcgaccggcaatgactaccgggcagttgaagcagcctgccatgcctacgctgccaaaagcggcgagtatcgaagcctcagctcctggaaactggaaggggaaaagctccttggccaagtcaccctgcccctggccttaggggtggtcggcggctccatttcatcgcggcctgatattagacaaagctatgccattttaggtaaaataaaagcagctgaattggcagaactgaccgccagcgtcgccttggccaacaacttcgcggccctgaacgctatctccaccaaggggatccaggctggccacatgcgcctgcagagccgcaacgtggttcagaccctgccggcagcagcggaagaaaaagaagctgtttatcaaatgatgattagccagggaaagtatggcgaaacagcagctaagaattttttgaaagaattgcgaggacaataattaatggacatcggtattgatcagataggtttttatactcctaataagtttgtggacatggttgacctggccaacgccagaaaccaggatcccaacaaatttttgatcggtattggccaggaccggatggcggtcgctgacaagacccaggacgctgtttccatggggatcaacgcgacggctgaatatcttgaccaggttgatctggagcaattaggcttattgatctttgcgaccgaaagcgggattgaccagtcaaagtcagcctccctttttgtcaaggaagcacttaacctgccagcccggatcagaacttttgaaatcaaggaagcctgctttgccttgaccgccagcctgcaggttgcccgcgactacgtccgggcccacccgcaccactcggccatgatcattggcagcgacattgcccgctatggtctggccacggccggcgaggttacccaaggcgccggggccatcagcatgctgatcaaggagaatccggcaattatcgccctggaagacgggcacacttcccactctgaaaacatcaatgacttctggcggccgaacaacttggccactgccgttgtcgacggccactacagccgggatgtctacctggacttcttcaagagcactttcaagcctttccttgcagaaaagcagctgcaagtttctgactttgccggtatctgctaccacctgccttacaccaagatgggttacaaggcccacaagattgccattgaaggccaggatgacgaaaccgtcaagcgcctcagcgacaacttccagctctcagccaagtacagccggcaggtcggcaacatctacacggccagcctctacatgtctgtcttgagcctgctggaaaacggcgaccttgaggccggtgaccggatcggcttcttctcttacgggtctggcgccatggctgaattctttagcggcaaggtggttgccggctaccaaaagcgcctgcgcccagccttgcacgcccgcatgctcaaggaaagaatccgccttggcgttggccaatacgaagacatcttcaccgaaggcttggaagccttgccggaaaatgtcgaatttaccagcgacgccaaccacggcacctggtatttggccggccaggaaggctatgtccgccaatacaagcaaaagtaaatatgaagctaaccgtctcagcttgctggggcggttttttgataaaaataatctgcatagcaagcgcttaactagggagggcgggaaattgcagtctctttttatgttaaaatgaaaaagttgagaaatgcaaagaaaaatgaaagaaggcaaacacggtcaacatgaaaaccgaaagtactgagcaagagtaccaccaccacctctctcaccaccaccatatgcgggtgcagtgggaagagttcttccaaagcgatgacgagaccaagatcaaggaagcaaccttgattgaaaaagggtcgatcatctcccgggtcggaatgatgatgctgagctgcgggactggggcctggcgggtccgcgacgccatggacaccctggccagaaccctggacttaacctgcagcaccgacatcggtctgatctccatcgtctgcacctacttcgatgtcgacaaccagtcatattcccaaagcctggccctgccaaccaccggggtcaacatggccaagctgaacgaattggaaaagtttgtccgccagttcgaagcagccggcggtgactttgaaatcaagacaatccgccgtcgcttaggggaaatcgaacacatgaaaggccgctatccgctttggggatccagcctggccgcggctttggcctgcggcggcttcattttcctcctgggcggggggcttcctgaaatcatctgctcctttatcggggcgggactgggccagtttgcccggggcagcttagccaaaagacggatcacgattgccgctacgactgccgtggctgtggcagcggcttgcttgtcctactacctggcattcatgctgggccacttgctctttaacgtcgacatgatccatatgcgcggctacattggggccatgctcttcgttattccaggttttccttttattacttccggtctggacatcgccaagctggacatgcggtcaggcctggagcggatggcttacgccatcttcattatcttgatcgcgactggtactggctgggtgatggctacggctctgcagatcaagcctggcgacctgccggccttgcacctgtctaaagtaattttcacggcttgtcgcctggtagccagcttctgcggggtcttcggcttctctttgatgttcaactcccaccggcggatggccgccgcggccgggctggtgggggcgattgccaataccatgcgcttgtccctggttgactttgcgcatttcccggctcccttggccgcctttttagccgccctgctggctggccttttggccggctatgtccgggaaaaggttggctacccgcggatcgccttgaccgtgccttccatcgtcatcatggtgcccggcctctacatgtaccgggggatcttcctcttggttttgaccagtgttggggccggggccacctggatgactgaagccttgatgctagtcatgtccctgcctgccggcctcttgaccgccagaatcttgaccgacaagaagtggcgccgggtcgattaaacatagaaagaaaaaacagcttttgcccaaaaataagggtaaaagctgtttttgcgtattattcctgcaggtcagccaccgtggccttgaccagtttctgcagatcaagcgggttgaccatgacgctgcggcccacttcgccgctggacacccagatcccgtcttcatttaagacactctcatccaaaaagatcgggaacttcttgctgtggtagatgccaatcggcgtgttggccccgtgcacgtagccagtggtcttttccagctgcttgaggggaatcatttcacacttcttgttgccggaagccttggcaatcttcttgaggtccaagtggccgctcaaaggcaccacgccgacaatcgggccggtcttgttgccattgactgccagggttttgtaaaccgggtggccgtctaaaaccggcttgccggtcccaacctgggctaccccgtggtcttcggaaatttcgctgatatgctgctcataggcaattttatgctggtcgagaatcttttccaccagggtcttgtctaatttgtctttattctttttcttttttgacattgttatcaccgctttccatgataccattttaagagaagaagctaaagaaagaagatataatcatgaaattacttgagatcaagattgaaagcagctacgacgttgaagacgccctggcatattttgccacggaagacttaaaggccctggggaccgaagcccggcgcagaagcgactttgaacaagccggctggctgcacgactcaacggttgttgacatggatgacatcccaaacctgcccgatgagctggaattcattgcctactttgatgaagaaaccgaccctgaagaaacggtcaagtgcttcaaggacaagctggctgagctggcgggctatggcttaaagaccgctcctggtgaaatctccgttgactatgttgctgaccaggactggaacactgtctggcaaaagtactaccacgtcatcaacttgtcccgccacctggccattgtgccggaatgggaagactaccagccggcctttaaggaccaggaaatcatccgcctggacccaggcctagcctttgggacgggcaaccaccagaccacccagctggctatgctgggcattgaacgggccatggtcaagccgcttactgtcgctgacgtggggacggggtccggcattttggccattgctgcccataagctgggggccaagagcgttttggccacggacatttctgatgaatcaatgacggcagctgaagaaaacgcggccttaaacggcatccacgacatcgccttgcaaaagaccagtttgctggctgacgttgacggcaagtttgacttgatcgtggccaacatcctggctgaaatccttttggacctgattccgcagctggacagccacttaaacgaagacggccaggtcatcttctccgggatcgactacctgcagctgccaaaaattgaacaggccctggcagagaatggcttccaaatcgaccttaagatgcgggctggccgctggatcggcctggcaatttcccgcaagcatgactaaaatgcgttaaaataaaagcaaaagaaactctcattttttaataagtaagcccggtcaagcattcaggcttgtttttaaggaactttttgcgctaaaatagcaggtactgattagttaaatgttagaaactggtgatctagatgtcaaagtatactgaaatgactcacgagcaggtcatggccgcctgcaagaaatacatgacggccgaccaattgacctttgtcgaaagtgcctatcaattcgcggcccgggcccatgagggacaaaccagagcctctggccagccttacatcgtccacccgacccaggtagcagggaccctggccaatttaggtctggacccagacacggtggctgccggctttttgcatgacacggttgaagacacctcggtcaccaacgacgacattaaggaaaagttcggcgccgacgtggccttcatcgttgacggggtcaccaagctgaacaagtacgaatacaagtcccacaaggaattcctggcggaaaaccaccgcaagatgctgatcgccatggcgaaagacctccgggtcatcctggtcaagctggctgaccgcctccacaacatgcataccctggagcatttgcgcccggacaagcagcgccgcattgccgctgaaaccctggacatctatgcaccattggctgaccggctggggatcgggaccatcaagtgggaactggaagacatgtccttccactacatgaacccggaagcgtactacaagattgtctccatgatggacgccaagcgcagtgaacgggaaggatacatcaaggacgccatcgactacttgcgggggaccctggattctttagggatcaagtacgacatcagcggccggccaaagcacatctattccatctataagaagatggtcaacaagcacaaggacttcaacgaaatctatgacttgctggctgtccgggtgatcgtgccaacggtcaaggactgctacgccgttttaggggcggttcacaccaagtggaagccgatgcctggccgctttaaggactacattgccatgcctaaggccaacggctaccagtccctgcacacgaccatcatcggccctggcggcaagcctttggaaatccagatcagaactgaagaaatgcacaaggttgctgagtacggtgtggcagcccactgggcctacaagcggggcaacttccaaggcgttgatgaaaaagacggcggggccctggatatcggccgggaaatcctggagttgcagaaggattccagcgacgctgacgagttcatggaagccgttcattcggatatttttgccgacaaggtctatgtctttacgccaaaaggggaagtctacgaactgcctaaaggatcagtcaccttggactttgcctacgccatccacacccaagtcggtgaccacgccatcggagccaaggtcaacgacaagctggttcctttggactacaagctgaagaacggggacgtggtcgacatcttgacccaaggcaatgcccggccgtcaagagactgggcggaaatggtcaagacctcccgggccaagaacaagatccgccgctacttcagagatgttgaccgggaagagagcttggcccggggcaagagtgagctggttgacctgctcaaggaaaatggcttaagcgccaaggattttttggacaagagccacatcgacgaagtcctggaccacttcagcttcaagaccgacgaagacatgtacgctgctatcggctttggcaacatgtctgccgtatccatctacaaccgtttgacggccgacctgcgccggcagcaggaagaagaaaagcagaagcagtttgaagcccagatcatgtccgccggtcagcaggcagcagcttccagcgtggttaaaaagcccgctccgcaaaaagacgatgccaagtccaaaaccaagggcaaaaagccggacagcttggtcagagtccaggggctggaagatttggacatgcactttgccaagtgctgcaacccggtcccaggcgacccgatcgtcggctacgtgaccaagggccggggggtcactgtccaccgggctgactgccggaacgtggtcagcgcggacccggctgtccaagggcggatgatcgatgttgaatggaataacattgacgaaggcaagcaggccagcttcaacgccaacttcgagctctttggctacaaccggcagaagctgctgggcgatgtcatcaaccgcttgaatgtcttgaccaagaacattaccaatgtttcagccagcgtcaacgaagaaaacattgcccacttctacatcacggtcgaagtcaggaatgccgcccagctgaatgacatcatggccaagctgcgggatattccagacgtttatgacaccaagcgaacggacaactaagctagaagcagggagatttttagaaaaaatgcgcgtagtaattcaaagagtcaaccatgccgccgtcagaatcgacggcgaaaccgtcggccagatccaaaaggggggcctgctcttattagtcggcctggctgaaggcgatggggaagaacaggtggttaaggccgctgacaagatcgccaagatgcggatctttgaagatgaagcaggcaagaccaacctgggtatcaaggatgtcggcggccagatcctgtccgtcagccagtttaccctcctggctgataccaagaagggaaaccggccaagttttgtccacgccatgcggccgcctaagtccagccagctctgggaagaatttaaccaggagctggttaagcggggcctgaccgtggaaactggtgaattcggggcagacatgaaggtcgaactggaaaacgatggtccttttaccattgttttagacctgtaattttttcccctcagcccttgattaggagggcaaaacaggataaacttaatgagaattatcaatgacaaagaatgaagatagcccggcctttttagagactgcccgtttggtgaaagagcagatggctgctagctgtgaccctttagcagataatagttcgtttcgtcagcgttaatgacagcaagcaaaaggtggtaccgtgctgttttcaagcgcccttgattaaattcaagggtgctttttattatcttagtcaaaataaggaaacaaaggtgaaattatgagagttcaaagaccaaaaggtacagtcgacattctcccggaaacgtccggccagtgggaaaaggtggaacaaaccgcccgtgacctcttcaagcgggccaactaccatgaaatcagaacgccaagttttgaaaattacgaactcttttcccggtcatctggtgaaaccagtgacgtggttgaaaaggaaatgtacgattttgaagacaagggcggccgccacatcgccctccggccagaaggcacggctggggtggtgcgggcctatgtggaaaacaagatctatgggccggactatgtcaagcccttcaatgtctactacattgccgcaatgtaccggtatgaacgcccgcaagccggccggcaaagagaattccaccagatcggggtggaaagctttggttcaaacggctacctgtctgatgttgaaactatcctgctgggccacgacctcctggcggaactgggggtcaagaactacgaactgcacatcaacactttgggtgacagcgaagtccgccaggcctaccacgatgccctggtagactactttactccggttaaggaccagctctcagaagattctcaaagacggctgggcaagaaccccctccggatcctggactccaaggctgaggaagaccagcagtttttgccggaagccccaaaaatcagggactacctggacgaggaatcaaaggaaaacttcaacaagatcctggccagcctggacaagttgggcgttaagtacgtcatcgatgacgacctggtccggggcctggactactacaccggcgtgatctttgaattcatggttgacgacccgactctttgggccagcccgtcaactgtcctgggcggtggccgctacaaccacctggttgaagaattctccggcccggaaaccccggccgtcggcttcgggatcggggaagaaagactgatgctggttctctccaagcagaatccggaaatgtttgaagatcaagggatcgacttcttcatcaccaatatcggtgaaggcacggacattaaggccgtggaagttgcccgccagctccgcgctcttggcttcagcgcccaatacgacgttgaccagaagaagctcaaggcccagttcagaaaggctgaccgggtcggggcccgctatgtcgtgaccctgggggccaaggaactggctgaagggaaattaaccgtcaagcgcttgagcgatgggcagcagttcagcctggaatttactgacttggaagacaaggccaacctgctttccaggatcgaaaaataggagatttttagcaaaatgatgcaaatggaaaaaagaactgattattgtggcaacattaccagccagtacctggaccaagacgtccttctttacggctgggtgcaaagagtccgaaacctgggccagctgatctttatcgacctgcgcgaccgggaagggatcgtgcaagtcgtggtcaaccatgactccggtcaggaactgatggatgtcgcttcttctctgggccaggaatacgtggtcgaagtcaaggggcacgttaacgaacgttccagcaagaacccggacatgaagaccggggacgtggaagtcattgccagcgaaatcactgttttgaacaaggctaagactccgccatttgaaatcaaggatgacctggttgccagcgaacagacccggctgaagtaccgctacctggacttgcgccggccaaccctgcaaaacgccttgatcatgcgggcccagatcatgaccgctaccaatgcctacctgtcaggggaaggtttcattaacattgaaaccccggacctgggcaagtcaacgccggaaggtgcccgggactacctggttccttcccgggtttacccaggctccttctacgccttgccgcagtcaccgcaaatcttcaagcagctcttgatgggggccggctttgacaagtactaccagatcgcccgctgcttcagagacgaagacttgcgtggggaccggcagccggaattcacccagatcgacctggaaacttccttcatggatgaagaaggcgtccaggaagtaactgaaggcctcctggctaaggttatgaaggatgttaaggggatcgacctacagctgccgctgccgcggattacttggcaggaatccatggacaagtacggctgcgataagccggacacccgttacgaaatgctgatccacgacttgggcaatgtttttgccaagtctggcttcaaggtctttgcttctgccctggaaaatggcggctttgtccgcgggatcgcggttaaaggcggggctaagttctactcccgcaagaagatcgaagccatgcaggactacatcaagcgttaccacgccaagggcctggcctgggttaagtatgaagacggcgactactccggtcctgtttcccgcttcttgagcgaggaagaaaaggccggcctggttcaggaattcagcctggaaggcggggaactcctcctcttcatcgctgaccaatggaaggtctgctgtgactccttggactacctgcgccggcaaactgccagggaaactggcatcattccaaaggacacttacaagtacctctgggttgttgactggccgctctttgaatacgacgaaggcgacgagcgctggattgctgcccaccacccattcaccatgccagatgacaaggggattgaactcctggaaactgatccgcacaaggctcacgcccgcagctacgacatcgttttgaacggctacgaactgggcggcggctccatccggatccacaagcgggacatccaggaaaagatgttcaaggccctgggcttcaccaaagaacgggcctacgaacaattcggcttcttgatggacgctctggacatgggcttcccgccgcatgccggcctggctatcggcttggaccgctttgccatgcttttggctggcaaggacaacattcgtgacgtcattgccttcccgaagaacgctagcgccagcgaaccaatgatgcacgccccggctccagtcgctgaccagcaattgaccgacctgggcatcgaagtagctgaagcagccaaggaaggcgttgaaaagtacgaagcttctctggaagctgaagcagctgaagacgttaagtcccacgaagaataaaaaagctgaaaaagcgcaaaaaaatagttcaagatccgaaaaagatcttgaactatttttctttaccaacttttaattatctgaattatcgatagtttcttctggcaggtcttcagtcgtgttgacatcatcgtcagccgtagacttgctggtggtcgtgctgctcttcttaggcgtatagctggaagagccagttgaagtagatgacttagtggagctcttggagctgcttgggctggagtagctgtagctgtaagttgagtttgctcttcttgctcttgcttttagccttgcttgatgattcagactttttgtcttccttgtcggccttggccttttccgccttgctgtagaccttgtaggtcttgctgctgccagcggactgactgctcttgtcagcctggctttggtgataaaagacagctgccccgactaaagcgagttcagcggcaaggatgccggccagcattggtttgcgcattgtatttcctcccaacacaatttggtcgattagaccaggttagtaaatactgtataccacgcctggcggctgtaaacataagaaaggcttattttctatcaataaatgctgatgttttccgcgttgccaagcaattaccgcttgaattataatgattttaagaaaaaatattctcaaattgcgtcagtcagcctagcttgtctgaacaatagaaaaatgaaagggagaaaaagatgaaacggaagtatctttgggtcctggctttatttttggccagcttttcggctgcttttttaccggaaaaagtttttgccgattatgacctgaccaagatggatgtcacggcaattgttaattctgacgggtccttgtcaatgacccggaagatcgtctatgactttgacgattcagctaacggggtttattacacccagaacttagccagcggacagaaggtcagcgggcagagcgtcgaggtcaaggacctggccagcggaaagacggtcaagccggccttgaacaaccaggcggacagcggcaatgtctaccacttcaataaagacggcaattcctataagttcaaggtttaccaccatgttgacgatggaaaggtccaggtggtttaccgatacaagatttctggagcagttgacagctacgaggacgcttctgaactgaacttcaagattgtcggggacggctgggataaagagatttccaatgtcacggcgactgtccgcttccaggataaaaagctgtccttcttgaaaggctgggcccatgtcaatgctaacggccatttgaccgttgacaaggaaaagggcctggttaaagcggaagtagccactttgccggaggcgacttttctggagctgcacctgctttttccaaacagtttagtcagccagaataaaaagcagcattccggagaaatcgcggctaaagtcgtggaccaggaaaaagcgctggctaaggaaaccgccgcaaaaaaggcccgccacaacgtttatgaattgatcggcctggctctttttgctttatcaccgctcctttatctgccggtctttatcaagagcagaaagtcgggcagcccggtcaaggccaagaaagaaattggccacaattttgaaattcccgccttcagcccgaccacggcccagatcctggtgaccaagaaagacccggacggcaaggctttggccggagaaatcgccctccgggccggccggggtgaaattaccattaaggcaggcaagaagggaaagaacttcacttatgccaagaccagcaagtacaagggcgacctgccgcttttaaataggcttttcaaaaaggtcggcaacgggcaaagtttcagcaacaaggacttaaagcaatatagcggcagccaggggattacttccagcttcaaaagctggcaggaggacagccaaaaggccttgatcaaggagggctacattgaccagaaattgcaggaccgggaggagcttttgtccctctatacttttggcgtgatgtttgtgtcagtggcagccatcgtcgtctgcttcttcctttatgacaaatacaccttctggctcctgcccgccatcctgtgggtgctggctgcctttggtctggcctgcctgcgcctgcaccacttctccgacttgacggaaaagggggcaagggcaactgaacaggctttaggctttgaagccatgctggatgacattggccagttcaagctgcgcgacatcggggaactgaccctgtgggagcaggtcatgccttatgccattgcttttggcctggccaagaaggtccttaagcagctgaagctggaattcccggaagagatcgcggccgacccttactggacctactactatgccggtgccagctacggggcctttgcctccagctttgatgaggcgatttcgtcttcagctggctcaggcggcaacttctcggcctccagcgcctccagcggcggttttgggggcggcagcggcggcggtgccttctgatttgttttttctggtgaaaaagtttacaataaacaaaataatttttccggaaattaattagttggggaaggcactatggaagccaggttatggaacagatttaaaaacaacattcacttgcggcgggcaacggtcctggtcatgatcattctggccctgtactatgtgcgggcgatgatgaacacgatcctgctctcctttatctttacctacttgatcgttcacctggtcaggttcgtccaggggaaattcaagcatgtttctgacaaattgattgtcgctttgacctatctcttgattgtcgtcctgctttactttgccttgcgctactatgtcccggttttggtcaagcaggtgaccaagatgaccaagtcggtgatcaactattaccagaccaatgacgtgggctggctgatgacccagctgcacaagtatgtctctgaaaaaacgatttccagccaggtcaagagcagcttaacggcgctgacggcggccttgaagggcttcgggtcagtcaccatgtcctttgtcatggccctggtcttgagcttcttttacacgatcgagttaaaagaaatgcagaccttcagccagtcttttttgaagtccgacctctttggctggctttttgaagacattgcctactttggccgtaagtttaccaataccttcggggtggtgctggaagcccagttcttgattgccatctgcaacgcggctttgaccattgtctgcctggccatcatgaagatgccgcagatttttgccctgggcctcatggtcttcatctgtagcctggtcccggtggccggggtgatcatttccctgatccctctgtctctggtggcttatacggtcggcgggatccaggacgtgatctacattttgatcatgatcgctgtcctgcacaccctggaaacctatatcttgaatccgaaattcatgtccagcaagacggaattgccgatcttctacaccttcgtggtcctgctctttggcgagcacttcttcggcacctggggcttgatcgtcagtgtcccgatctttactttctttttggatatcctgggggtcaaaaacatcaacagcaagcaggagaagctgcaggaggccaggaagcggatagagcacaagcggctggaaaaatagcataagatttttaaaaaataataacctggtcgacagactcggagcaaatgcctccgggtcttttctttttgctagtaaaaaaacaaaaaagaaaaagctatacatgggccaggtatgcaaaaaaataaaagttttttgctatctaaaaacccttatgaatactagctttataaggattttgtagactatacaatacgtgaatagtattgacattttttaggtgaggactatactttgtacatgtcgataaaattatagttttgaacaggaaagaggtttgccttgacttacgccagaattgcaaaaagcagccgttacctgcccgaattcgcggtcagtaatgacgacttgagccagatcatggagaccagtgacgagtggatcaagacccggaccgggatttccagccgacggatcagtcaacaggaaaacacctcggacctggccatccaggtggccaagcagctcctggctggcgaggatccggcaggggttgacctgatcattgtcgcgaccatgtcgccagacgcctacaccccggccacggcggccctggttcaagcagcggttggggcggaaaacgcggcctgctttgacctgtcagctgcctgttccggtttcgtctatgctttagacgtggtggaaaaaatgctgcggcggccgggcgggatggccctggtaatcggggcagaaaccctgtccaagctggttgactggcaggatagaacgacggctgtcctcttcggggatggcgccggcggggtcttggtcaaaaatgacgcgcttgagccgcatttcttggccagccagctgaaaagctacggccacttggccaaattcctgtcagctggccagaccagcccgcagccctttcccggtccggtaacgggcctggcccccttcaagatgaacgggcgggaggtttacaagtttgccacccacaaggtgcccgaagtaatcaccgcctgtttagaagaagcaggcgtggggttagcggaagtcgaccttttccttttgcatcaagccaactaccggatcatcaagcaggtagccaggaggctggatttgccagaggaaaagttcccctgcaatattgccgaatacggcaatacctcagccgccagtgaagccattctcttggccgggctggccgaagaggggaaggcgcaggcgggcgacctggtcgtgttggccggctttggcgggggcttaaccgcggccgcccagctggtcagactataagaatattggtgttttagataagttagatttgattttacttttagtttttattttttaaaaaggagcagacacatgtcagaagcagaaattttcgcaactgtaaagaagatcgccgttgaagaactggacgttgaagaagaccaagtgaccatggaagccaacatcaaggatgacttggaagcggacagcctggacttgtttgaaatcgtcaacgaactggaagacgaatatgacatcgaactggacgctgatgaaaacaccaagacggttgccgacgtggtagctttggtgcaaaagcagctggctgaaaaggactaacaggaccagaccatgaaattcggaattctctttgccggccaaggggcccagcaggccgggatgggcctggattttctaagtgaccccttgtttaaggaaacaattgaccaggccagccaggcatgcggcttagacttgccggaaatctggaaaaacgaccgcggccagctggatgaaaccaggtatgtgcagccggctttggtggcctttgaatacgggatctggcaaatgctggtccgggacactgacctgccagtatgcggtctggccggcctctccttaggcgaatacggggcccttttagccagcggctgtttaacctggccagccggcctggccctggtcgtcgaccggggtgaatacatgcagcttgattcagaaaaaacggccagcgggatgctggccctgaccaagccggatcttccgggcctggaagactttttgcgagcaaagcaggcagctggccaagcagtctacctggccaactacaattcacctaagcaggttgttcttgccggagaaaagcagcttttgccagaactgggccaagaaattgctgaccgcaagctggccaaaagagcaattcccttggatgttgccggagctttccacactcccctttaccaggcagccagccggaaaatgggccagcggctgaagaatgaaacttttgccgctggaacttacccagtcatcagcaatagcacttgccagccttttgccaaagaagatctggccaaaatcctggaagttcagctgatggtgccaactcactttgatgcttgcgtcaaaggcctgctggacttaggcatgacggccagcctggaaatcggcccaggccacgccctgtcagcttttgccaagcaggcggacaagggcctaaagacctggcaggtcgggagtctggctgaataccagcagtttgtagaagaggagcagaatggatttacaaaataagcgggtcctggtgaccgggtcaacgcaaggaatcggggcagcaactgccttggcttttgcgcaaaagggctgccaggtgctcttaaatggccggcggccggaattgccggaggaaatcgctgaccaactggaaaaaatcggggcagactaccagtatttttccgctgacgtcagcgacgaaggcgcggtcaagcagctttttaaagaaattggcgagattgacatcctggtcaacaatgccggcattaccaaagaccagattatgatcgggatgaagctggctgactttgaccaggtgatcaaggtcaacttgcggtcaagctttatgctgacccagaaggccttgaagaaaatgctgaaaaagcggtccggagccatcatcaatatggccagcatcgtcggccagcacggcaacgccggccaggcaaactacgcggcttcaaaggctggcgtaatcgccttgacccagaccgcggctaaggaagctgccggacgcggcgttcgcgtgaacgcgatcgcgccggggatgattgccagccaaatgactgccgtcctgccagatgaggtcaaagagcaggcacttagccaaattcctttggcccgctttggcaaggcagaagaagttgcccaggcggcagtctttttggcggaaaacgactatgttaccggccagaccctggttgttgacgggggaatgaccatttaaggagaagatatgcgagtagtagttacaggcatgggggcagtcagcccgaacggcaatggctgccaggcttttgttgaaaatactttaaatggcgtggtcggcatcaagccgatcaagaagtttgatgccagtgagaccggcatcagcgtggccggggaaatcgatgattttgacgtcagtcaggttgtcggcaagaaaaacggcaagcggatggatctgtattcccaatacgccatccaggcctgccaggaagcctacgagatggctggcttgactccggaaacagtgaaggcggaagagctgggcgtgattttcggctccgggatcgggggcctgaccacgattgaagagcaggtcatcaagatgcatgacaaggggccaaagcggatgtcacctttctttatcccgatggccattgccaacatggcggcgggcaatatttccatccgctttaatgctaaaaatatttctacctccattgttaccgcctgcgccagcgggaccaactccatcggggaagcctaccggcagatcaaggaaggccgggctgaggtcatgattaccggggccagcgaagccagcgtcaatgaaacggctatttccggtttcgcggccttgaccgccctgtcaaccagcactgaccccctcaaggcgtctttgccctttgaccaaaaccggcacggcttcgtcttaggcgaaggggctggggccttgatcctggaaagcttggaccatgcccaaaagcggggggctaagattctggctgaagtagtcggctacggggcaaccagcgatgcctaccatatcaccagtcctgatcctaaaggtgaaggagcagccagagccatgcggctggcggttgaagaagctggcatcaagccggaccaagtcggctatatcaatgcccatgggacggcgactaaggccaatgacagcggggaagccaaggcaattaaggaagtctttggcgaccaggtcctggtttcctcaaccaaggggatgaccggccacctcttaggggccgccggagcggttgaagccgtcattacctgcgccagcctggaaaaaggcatcttgccggccaatgtcggctgctttgcccaggatccggaatgcccggtcaaattggtaaaggctggtaaccaggaacaagccattgactatgctttgagtaattccttcggctttggcggccacaatgccgtgttagcttttagaaagtgggcctgattttggaaataacagatgttgaaagactgctggacaagtttgaaaagtccagcatccgggaaatgaagctgaatttggatggttcagagctttttctgagcaagaacgaatacacgcaaaagacagaggcagaagcaggcccggttttgccagcccaaaaagctgaaagtccgcttttgccaaaagaagcagctgaagccgtgccggttgttcaagcagaaaaagctgcatccggtcatgccatcaagtcgcccctggttgggacgatctacctgcagccggccgcggacaagccagcttttgtgaaggccggagaccaggtcaaggccgggcagaccgtctgcatcgtggaagccatgaagatgatgacggagatcaagagtgatgtttccggcaccgtcaaggaggtctgcgtggaaaacgaagacctggttgaatgcgagcaaacgctctttttgattgaggaggcctagcatgactgtattggattccagccaaatacaagaaattatcccccaccgttatcccatgcttttgattgacaaggtcatcgacctggttcccggcgaaagcgccgtagccattcgcaacgtgaccaataatgaggcggttttccagggacatttccctggaaatcctgtcttgcccggggtcttgctcgtggaatccctggcccaaaccggggccgtggccctgttaagtgccgaccgcttcaagggtcagacggcctattttggcggtatcaaaaacgctaagttccgccagatggtcaagcccggcgaccaggtcaagctggaagtgactttggaaaaggtcaagggccatatcggcctggggcagggaattgcctgggtcgacgggaagaaggcctgcacggcggaattgaccttcatgatttcaggtgagaaaaatgtttgacaaagttttagttgccaaccggggcgaagccgcggtccggatcatccggacccttaaggaaatgggcatcaagtccgtcgctatctactcagtagctgaccgagacagcctgcatgtccagctggccgatgaagcggtctgcgtgggcgctagccgccccagcgactcctacttgaacattaaaaatatcatctcagcggccaccgggaccggggcccaggccatccacccgggctatggctttttgtcagaaagcgcggaatttgccagcctttgcgcggcctgcggtttgacctttatcgggccaaaggcggaaaccatcgaccagatgggcaataaggaacacgcccgccagctgatgatcaagcacaaggtgccggttaccccgggcagccgggactttatcaagtcaccggaagaagctaaaaaggttgctgctgaagtcggctacccggtcttattgaaggccgcggccggcgggggcggcaaggggatccggcaggttaaagagcctggtgaaatggctgacgctttcagcctggcccaaaatgaagcccggctggattttggcaatgaccagatgtatctggaaaaggtcttgaccaatgtcaagcacattgaagtccaggtcatccgggacagctttggcagctgcgtctacttcccggaaagagactgcagcctgcagcggcgcaagcaaaaggtgatcgaggagagcccttgtgaactgatcagtgaaagcgagcgggaaaaactgggccagattgctgtccgggccgccgaagcagctgattatctgaatacggggacgattgaatttttgatggatcaggaccataatttctactttatggaaatgaacacacgcctgcaggtagaacacacggtaacggaaatggttaccggcgttgacctggttaaggcccagatcctggtcgcggccggggaaaagctgccttttaagcaggcagacttaggctttaaaggcagtgctatcgaatgccggatcaacgctgaagattccagccgggacttcatgccgtcaaccggccaggtcgactacctctttttgccagtcggcaacccgggtatgcggattgattccgccctttaccagggcatggtggtttcgccattttacgattccatgctggctaaaatcatcgccttgggcagcagccggcaagaagcagttgcccggatgcagcggcttttaaaggagctggtgatccggggggtcaagaccaaccaggactttcacctggccattctggctgattcggaatttaagcaggggactttcaccaatacttatttagagagggaatttttgccccgctggaaggagcaggtagacaagcatgaggctgtttaaaaaaagaaacacgatctctgagcggcatgtcaaggctaataaaagggcggaagacctggtgcctagcggtttgatgcagcggtgcccgaattgcgggctggaatttttcgccagccgcctggacaagtacaagacctgcccggactgcgattacggcttccgcttgaccgccagggaacgcctggcctggctctgcgaggaaagcgaggagtggtttaaggacattcagcccagtgaccccctccattttcccaattatgaggcgaaagttgccgctggaaagaaaaagactggcttaaatgaagcggtttggaccggcctggccaaaattggcgggcaggagacagccctggccatcatggatcccttttttatcatgggttctttaggccagatgaccggggaaaagctgacccggctcattgaggcagctactgaaaaacggctgccggtcgtggtctttacagccagcggcggggcccggatgcaagaagggatctactctttgatgcagatggctaaagtggtcaacgcggttaaccggcataaggcagccggtctcttatacctggttgttttgaccgacccgactaccggcggggtgacggccagctttgccagtgaaggtgacattactctggctgaagctcacgccatggtggcctttgccggccgccgggtgattgagcagaccatccatgagcagctgccaaaagatgcccagcgggcagaaacggtcttaaagcacggctttatcgaccggatcgttttgcggcaggaggaaaaagagaccctggcctggctgttaaagtacggagggatgcaggatgactgatgctatggaaacggtccgggccgcccgggccagtgataaattgtcggctcactatctgcgggcgcacttgttcagcgactttgtggagctgcatggggaccggcagggggcagatgacccggccatcgttggggggatcggcctgtttgccggtcagccagtgaccgtgatcaccaccagccggggacataagctggaagagcgcctggccaagcactttggtcagccggaaccagccggctaccggaaggcggcccgcttggtcaaagacgcggcccgctttaagcggccggttctcctttttatcgatacggccggggcctttcccggtaaagaggccgaatatgccggccaggggcaggcgattgcccagtgcttaacggatattggccaggcccaaacgccaattatcagcgtgattttcggtgaaggcggctctggcggggccctggctttggcttgcggggatgagctttggatgatggaaaattccatgtattcagtcctgtctccggagggttttgcctccatcctgtggaaggacgcgagccgggcggctgaagcagcagagcttttgggcttgacgccggaatccctgctcaaggggcaggtgatcgaaggcgtgatcaagcaagaaggcagcaagtctgcccagtgccgggaaattgcccgggttttggaagaagaattagcaaaattgcaaaagctgccggtcagcagtctgcttaaccggcgctatgaacgtttcagaaagttttaggtgaagaagatggcaggaattttagctggaaaaaagtttttggtaatgggcgtggccaacaagcggtccattgcctggggctgcgctgagcaaatcaaggcccagggcggggaagtggtctacagttaccaaaatgaccgcctggaaaagagcctgctcaagctgggcctggcggaagaagaaatggttgaatgtgatgtggccagcgatgagagcattgacgcggcttttgaccaagtgaaggaaaagttcggccagatcgacggcctggttcacgcggtagcttttgccccgaaaaatgaactggaagggtccatcctcaattccagccgggaaggatacttgactgcccaaaatatttccagctactccttgatcgccgtggctaaggctgcccaggaaaaggaacttttggcccctaaggcctcaatcgttaccttgaccttcatcgggtcggaaagagccatcgccaattacaacacaatggggattgctaaggcggctttggaaagttctgtccgctacctggcccgggatctgggcaagactggcagccgggtcaacgcgatttctgccggggccatgaagactttggccgtgacggggattggcggacacaaggatctcttggagcagtcccggtccttgacggttgatggggtcaatgtcagcctggaagagctgggtaactgctgcgccttcctgctcagtgacctgtcaaccggcctgactggcgatatcatctacgttgacaagggcgttcacctctcctaggaggccgcgatggagatttactgctacctggtcctgccttcaacgcaagatctggctaaaaagctgctggaaaagaaaaagccgccttttgccgttagtgctttagagcagacgcagggctacggcaagcaggggcgggccttttattcaccgaaaaatggcctttacttgtcagtttgcctggaaaagcaagagaatcccttgctgaccttggcagttgggacagcggtagctgacttcctgcgggccaggtacggcttagagattggcctcaagtgggccaatgatcttttttatcaagggaaaaaagttgccggcatcttgactgagcaggtggcaggcgggatagtagttggcctgggcctcaacttaggcgcggaacttccggccagcctgccccaagctacccgcttgctggaagcgggggattttgatccgcttttggcagatgatttggcctgtgtgatctgccgggctgccagctggcaggattgcctgccccgctatcgggaattgagcatcttgactggcaggagggttactttgaaaattgctgggcggaccatctccggcacttgcgccggctttgatgaccagggccggcttttgctggaaaaaggcgggaagatcagtgcttggtccagcggggaagtaattaagacaagttttttgtaaaaagtccttcccttttccgaaaacttttgctattataaatattgtcatcggaaagcccacttggcggaattggcagacgcgcagcgttcaggtcgctgttctggcaacagagtgaaggttcgactcctttagtgggcatgacgtgagcaagcagaaatgcttgcttttttgttttattttctatctccagcttatttctcaggtcaaaaaagagctcccggaatccgggagctcttttgctttagttaaagttctgggcttttttggcgaccagcttgttcttctggaaggtaacgtagaagttggcctggccgtcgctcttcaggccgctggtgtagagccagagggccacgtcagaattggaatagtcagattctgagtagccgttgggcttgccgacaatggcttcgacttcctcttgggtcatcccctttttgagggacttgtagtctttgggtgtaatttgcttggaccggttgacgactaggccggaaatctgcttggcaatagccaccccgttggcgaattcaacggccaggttggcgccggcactgccgttttggaccccttcccaagtgtagatggtggctttgagcttgctggttttggccttgctcttagcgtcggcttcccggcccaggaggtcagttacctggctgggagtagacccggtcttttcaacgaccttgatcttcttgtaattagtgagattgatcttgttgctggtctgcttgacgacattggagctggaaattgagctcgcggccttcttgtcgctttcgctgtcagtcgtggcctttttgctggagcaggcagtcagagccagggccgcaaaagcaatcaagagaactttctttttcatgacatcctccattttttcgttctagaattttcatcccttttattttaggctttaagagcggtcttgtccacgccggcaagtaattcttaaaagacctttttgatgactcgaaggaaataaatatattttgaacgaaaatgacgttttacctgttagcgctttgtcaataatccaagctggatgctattgcctatcatccccgggggaaaaagatagaagctgcaagttgctacaaattgaaaacggtcagccagcttaagtcttcgaaagactgctatagctttaacaaacaaaagagcaagctggtagacgccagcaagcggaacttgaccaagcttaagccctactggcggtagtttgcttatatggagcagcactatgttggcagtgatttcgtcacttccccggccaagatgcctggctttgactactgggaaaccaaccgcctggaccaggttggccgcttgaccaacgaccgcgtcctctttttgacttttgacgactggggcagcgatgaatccattaataagctcctgtatgtcttgaaaaagcaccacgtcaaggcaactttcttcgtcttgaccgaaaacgtggacaaaaatcccaacctgctgcgggcaatcgcggctgacggccatgaaatcgccagccactctgactctcacgtgcccctggcgaccagtaaaaagggtgcctaccataatttgacggccaaggagaccgcggccatgcggaaagacctggctaagtcttaccagaagctgaacaagtatgtcggtgatgtccaagttggcgggagaaaggccctgtctctggatttccggccgccgactttggaagtttccaaaaagggcctggaggcagcctttgatgtgggctttcagtacgcggtatctggcgacgtttcaaccaatgactatgaacagaccagcttccagaagtacttgcatgatctgaaatacgggtcgggcaaggatgacaatgactacaaggtcacaaacggcagcgtgattgtcatgcacatgctggaaaacgccaagtataccgcccaggttttggacattatgattcctgtttggaaaaaaaggggctacagctttgcccgggttgaccagtatacggcggcttattcccggcaaagagcaaaagaaagcaattaaaaagagataaaagaggaggattaaggaaatgaaaatttttgataaactgcccaaaaaggccctttttctcatgtttgaagacgggagaaaggacacggttctttttacggaaaaattgctggagaaactgaactaccaggccacgatcttaacctacggggaaaagttcaaacgggatgaccagaaattcatctccgccaaggatttgcggaaattgcaaaaagaaggcttttgggaactggggaccaacggctaccgcctgtcttatatcaactgctatgaccgctacaagcatttttaggccagctggactccagggagtttgtgaagattggagatcaagcagtatattggccggaattacaaccgctatctgatgaactatatcagagacaaggacgggatgccggtggagactaccaaggagatgcaaaagcggatcaagcgtgagtaccagctgatggaccaggtctataaaaagcaggtgggagcagtaccggacctctattgcatcatgcactccaacaccagcagctacggggacaatgctaatgtctcaagcgccaacgcggccagtctggaaaagatgttcaagctgaacgtcaaccgggaaggcttttcctacaataaccggaagtcctcgccttatgacttgacccgccttcagcctcaggcctggtggtacaccaaccaccttctgatgcgggttaaagacgacctgccggctaaagagcagaagcagatcaagttcgtcaagggcagccagcgccgctgcaaaaaatggcagctggtcaaaggggcggcggaattcaaacagaatttgattgccttgacttctgaatcggagagcaatggccttttgactttaaaaaaggcgaaagtgggcgactgcaagctgaactgcgaatttttgggcaacaagatcggccagcagacggtctacttgaaaacccagggaaccgcatcgggcaagcataattttgccagctacttgtctctgtctttagaaaacaacattctctacctgcggcaaaaacagggcggggcaatcaagaccctgtacaaggttgacatgttcaagctggaggacgacaagccggtctccgtgcctaaggacaagcgggcggctttaagttcagaactgaatgtccgcggccgctttgcccaaaacagcacgacagctgctttatacaagctcaaggcttttaaaaagaaacggcagaaggccaagagcgtcaaagaaggggcaaaggagtatgtcccggaaatccagatccaggatccaggcgatgttaaagctgagctgactgttaaagggagcagcttaactttaacggttaatggccaaaagctctgccagcggcagatcaaggagcaagcagccggcggggtggccctggagagtgcttttggcggctttggccaaagccagcgcaatatcgctgatgacgtttatgatggagccttcaaagaccttgtcatcgcctacccggctgggaactggtctcataccactggaagcatttttggaacaaggtcattgactggttcattaataatctgtaacaagctcaatcccgcgtgactgctgggtttgagcttttttctttggtactttgttttgcttatattcctactgataatattttcgactgggaaaatatttgatttatatcaagaaaagcgtttacatagtccggagaaaagcatataataatttacaggaattaggtgctttcatgcaaaagaatgagaggtaacataatgtataaggaatcatttgccgcggctgctagcgcggcgcaaaagaaatttaacctgctgaagactaatccagccggctatgtcgtgctttctattttggcagggatgtacatcggtttcgggatcttgctggccttcatggttgggggacaattaggaactaacccggccgccaacttgatcaaggggctgatcttcggggttgccttgagcctggtggtcattcccggagctgaactttttactggcaacaacttcgtgatgagtgcgggccttttggaaaagaaggtcaagctgggccaagcgggtcttctctggctggtttgctggctgggcaacttgctgggggctggcatcttggcttggatgtttgtcaagtccggcctggatctgccggttacggcaactgtcttcaccaaggcggcagctgctaagatggccgcgccagctggccagcttttcttgcggggcattctttgtaatatcttggtctgcctggctgtttggtcaggcttccagaccaagagcgactcagctaagctgatcatgatcttctggtgccttttggccttcttctcaactggctttgagcacagcgtggccaacatgacgaccttcatcgttgccttgctgaatccagtgcaaggggcaggcgccgtttcagccggcggcatgttctacaacctgctctgggtaaccctgggcaacatggccggcggtattgtctttgtagccttgccatactggctggctgccaaggataagcaataattaactgaaagctccttttacaaaaaacaagtcctgcttgataaactcaaacaggacttgttttgctttattggtggattacagatgactaaaattttaggaaaaatccagggaaggtatttttaatacatgctgagcaagagctgcttgatttcagccatgcttggctggcgcgggttctgcaccgtgcactggtcatcgtagacccggtcgatcatggctggcaaggcggcgtcaaaggcttccttgctgaccccgttggctgaaagggagggttcaatatcgcaggccttcatcagttcccggatccgcttgcaaagagaatcaaccagttccgcgtcactcttgcctggcaggcctaagctgcgggcgatatcagcatagtctttttgggcccggtaaacttcatatcttgggtaaggcgtccgcttgacattgccactggcaccgttgaacttgatgaccggcagcatggcaattgaaatgcagaggccgtgcgggaagccgaaggccccgcccagcttgtgggcaatggagtggttgaggcccaagaaggcgttggcaaaagccatcccggccaaggttgccgcgtagtgcatgttttcccgggctttttctccttcataagtcgggtgctgcgggtcgtacttgtaagaagcttccaggttattcatgatcagctggatggccttgagtgaccatggccgggtgaagtcactggctgcaacagagacgtagctttccaaagagtgggagaggcagtcgaagccggagaaggccacggtatgctttggcacggtcatgacgaaggccgggtcaacgattgcgacttgcggagtcagttcgtagtcagtcaacgggtacttgacatgctgcttgtcatcggtgatgacggcgtaaggggtgacttctgacccggtccctgacgtggtagggatgcagaccagactggtccgggtctcatgcttgaatttgacgatccgctttctgatatcgacaaacttctgctgcagttccttgaagagctcgctcacattgtcgtagttgtccagccagccatcttcctggtccaggctgtattcgtagatgtagcgggcgatcttggagacgtccagggcgctgccgccgccgatggcgataatggtatctggtgcaaacttcttcatctgcttggcaatcttgatcgcctggctcagcggcgggtcaggcaagacttcactgtagatggccgtgtcgacctgcttgtctcttaaagccagctgttcatagaccttgtcaacgaagtggaacttgaccatgcccgggtcagcgacgataaaggcccggctgatttcctgctcattttcatctgaaagataggtaatggagtctttttcgtaaaaaatcttctccggcaggcggatccattgcggccggttccgccgcttggcaatggtcttgatgttcaagaggtcgctggtcgacaggttgtgagacagggagttcttcccccatgaaccagtccccaaagtcaagcttggccgcaggccatcactgtagatatcgccgatcccgcccaaagcgtccggctggttaaccaggactctggaagcttggacagccttgccgtattcatcgatgaacggatcgttttgggagccgatttggatggcggcattgtggccagcaccttggtagtcaagtagggctttgacgattctgatcccgtcttcccggtccttggccttgtaaactgacagaagcggggagagtttttcggatgacagcttttcgccaatattctttggatccagttcaaagaggaggacatctttgccttcaggcagggtaacgccggcgtgttcacaaatccagcgggcgctcatcccggctactggcccattgaccccatgcttgtcattgaagacgaagtcggccagcttttggtagtctttctttggaaccaggtaggcacccttgtcctgcatcatttgcagccacttgtcgtagatcggtgcttcaactacggctgaattttcagtcgcgcaaaccatgctattgtcaaagcgtttggacaataggatgtcttcaacagcccggtccaaaaaggcggtgtgatcgatataaacagcaccgttgccggccccgacccccattgacgggttgccagactgcagcgcggcgtgcaccatgccgggaccaccagttgccaaaatagaagcgatctttgggttgcggatcaaggcggtggtgttttccaggctggccttgtcgatccattgaatgatgttctttggggcaccggcctttaaagcagcgtcatacaagatctgggcagcatggattgaacacttctgggccttcgggtggaaggagaagatgatggcgtttctggtcttcaaagctaccaggatcttgaacatggtcgttgaggtcgggttggtggttggcacgatcccggctaaaacgccaagaggagcagcaactttgatatagccttcaacctggtttctttcgataatgccaacagtcttttcgtgcttaattgagttgtagacattttcggtagcgaagcggttcttggtatccttgtcttctaccacgccgcggccagtttcgtctactgcctcatgagcaagcgcgagggaggcctcactgccggccaaagccatggcagcgacaatcttgtcaacttgttcctggctgtaggtcgcgtaggcttcttcagcgaccaaggctttgttaactaattcacctgtatagcgcttggcttcttccatcttttcatcagctgacaattccttggcagcagtaacagtggtctgtgttttctttacatcaaccattttttctctcctaaaaattactacattttttctcaggtccaagtatttattgtgaaccttttcacctaacatgatagtccctttgttttctttgtcaagccgaaaaaggccataaatttcaatgaatctgaagcgtgtaaatgcttacaatcgtgctagagtagaatgatgaaagcgcagaaaagagcaaaaatagtgaatgatttcactttttacaagctgggctagacctgggaaaggtgagtggcgaaaaacagagcagggatgaattgcaaaaagctagcaaatgaaagctaagaaaaattagaagaaaattgaaaataaagattgacgaaagcgaaaaagctagtatactaatatttgttgccgcggcgaagaaggaattcgccggagacacgaaaaagaaaatatcgaaagctgttgacaagaagtcaacaagcgagtaggatataaaacgttgcgttactaagacgcaagttggtactttgaaaactgaacaaagtttcgcagtgtgcgggtcaaacattatttgatccaaacaaataagcgaagtcaattcgcaagcaaataatctggagcagattaaaaaagctcaattttcaaattgagagtttgatcctggctcaggacga

SEQ ID NO: 2175 - DNA, 6082 bp, Unknown
  gut microbiota DNA sequence
ccagcagcctggctgaccgcaactaccaggggcaaaaaggccctgtcgactaaaaagggggcctggcagagctaccacaagctggactctttaaaccgggcctgggaagccgatgccctgctgaacaagcggctcatgccggccaaggccagagagcccctttactggaacccaaccgcctggcacaacaaaaagatcgccggcggctggctctacaaccgcagccacctgatcggctaccagctgaccgggcaaaacaataaccccaagaacctgatcactgggacccggcaattaaacgacccgggcatgctcaagtacgaaaaccaggtggccagctacatcaaatcctccagccggcactacatccgctaccgggtcaagccaatcttccgcggccgggagctcctggcccgcggggttgagatggaggcccagtccactggctctaacgctgtccgcttccacgtctacatcttcaatgtccaggacggcgtcaagctcaactattcaaacggtaccagcgtggttaccggcgcggcgaaaaagtctgccaaaaagacagtagttaaaaaggccgctgctaaaaaatccacatcttctaaaaagaagatcaagacttctaccaccggccggatcgtcggcaaccgccggtccaagatctaccacgttccaggccaggccggctaccacatgaattcagccaacgcggtctacttccgcaccgaaactgaagccaaaagagccggctaccgccgggcactgcgctaaagcatatttcttgtatttttacaagggcctgtgtaatattggcagtaggaaaaggcaagagagatggacctaccttttcctgtaaaggttttatatcatgctcttttcttattgcatttttacacacataatcttttatcttatttgtacagttttggtacaatatgttggcatatcgggcgactcatttcaaacacttctaacatctttcgcatttttaccgattcctttctattcataaaatgcatcgaagccatatgccatccccttttacatcaaagaggagtcccaaccgcgggttggggctccttttttgctctattctgctttcttcttgctggactgcttttcagtcttcttagtcgtcttcttgctcattttcttcttttccgtcttcgtcttcttcaccagcagcgagctctcttccagcttattcaaactgatctgccgaagcagcttcttgaagtggtcctggctgccgattttttctatttgcccccggttccccttgaaccagtaaacgccactagcgtctgcaaagaggcagaccatatcagaacccgcgtaagcgccggtcaaacttacttccgccccaccaatcgccacttttttccggtaaaaatagcgcggcttggccccgccaaccggaaaatagctaggcaagctgtttaaagtaatccggccgttaggcgctactgccaaaaccagcaggtcactcactgcctgcccggtctggttgtcgatcttcagctggagcttgccgctcttttcttctgtctcccagacgtttaatcccgcgaccgcgctggctgctggcaggtcttggttggcctgcttaagtgcctggttttccttggccaggcgggaatttttcttctttaaactggaattgtcgctcgccaatttgtccaggcgctttttgatgctggaagcttcctggctcttggtccggctggcctggtagagctggccggccagctggctgtttctctgggtctgcttggcagcttacgcgctcagccagacgctggctcccatggcggcaaagcccaccaccaaagccaagaccgtcagccaattcttctccttcatcatcttatcccccttatatttttaacatcactctttcattatactacttcctttaaaaaggcttccgccccccctggataaaagaaaaaggcgggaacttcccgccttattgagcatcgcgctcggcaatatcgcagcgcatcagcttctcaatgatgtcaatatattcccgcggcacctgctggcccagataggtcaaacggatatcgaggtcggtcaagtcgaccaccctgcggtcttcctgcccttcctgctccagcatttctaccggcagcccggccagaatgctgttcctggacacgccaaaaatattcgctatcttctcaacagtcttcatccgcggtaccttgcggccaacctcccaattagagatagtctgcttgcttactcccaaggccagggccagctcctgctgactcatcccccgccgccggcgcaggtctcgcaaatacttgccaatcatgttcttttccatccaaagtcaccacctgtcataagcataacataagttgcaataaaatgaaatgtttatgagagttttttgtttttttagaaaagaacagaaaagataaaaagaagcctgcttccgcagacttcttaattaactttattacttggtcatttctgacttcttttcccgcagcatcaaggcgtcaacggtttcccgggcatcagcaccgcggttgaccacggcgtcaacggcgaagacgattggcatttccacgtcatacttgtcagccagttccaaggcagctggaatggcgttgatcccttcaacgaccatgccgacttccttcttggcttcttcagcgctcttgcccttgccgatcaagtaaccagcattgttattccggctttctttgctggtagcagtaacgatcaagtcccccatgccggccaggccgtcaaaagagtcttccttgccgcccatcttaatgcccaggcgcttgatttccgccatcccgcggatgatcaaagcagcccgcatgttgtccccgtagcccaggcctgaacagatcccgctggccaaagcaattacgttcttcaaggccccgcagagctcaacgcccaagcggtcagagttggtgtaaaccctcatgttcttgttcatgaagacatcctgaaccttttcggccacagcttggtcttcacaggcggaaacgatggtggttggcaggtccttggccacttcttccgcgtgggtcgggccagacagggcaacgtagtggacattgccatgcttgccgtccttattcaattcgtcagcgatgacttccgtcaaagtcaagagggtgtctggttcgatccccttagccacgtcaacgatgatctgcccgtctggaataaaggcagcggcagtcttggcagttgagcggacgaagactgatggtacggcgaacaggatgatgtccttgtcttggcaggcttccgcaatttccttagtgaatttaattccgtcaggaataaccatacccggcaggttcttctggcgacgagttcttgagagttcgtcgacttcttgcggcagggctgaccagacggtcacttcacgaccagagttgctgagcatccgggccagtgccatgccccaagtacctgctcccaaaacaccgatttttgccatattattacctcacttagtttgttgattcctattcgcggcggcaaaacggccgccactaatctaacctattatagcactcagccggcaactttctctttaaccccagcctaattattaagaaattagcctttgcccgcgcaaaaaaagacgtttcccaattgaaacgtccgttagagaatagccatattaaaaagtgtaaacaaaaaacagctatgcatttatctccaagtgaaaaactcaagagtttattaaaagcaaccgcttactcttgcatagcctattgtatgatgtaaaataggatttgacaaggatttttgtgaatttaaacaatttttatgcacttttttcaaaagacgaacgattttttcctaattgctttctcagcagcataacattttatcaatttgtaatagcactatccgctatagtatactgaacagtaggattatccttcaacaatttggacatatgtctaagcaaggaggattataattaagaggatattatattataacaacaaataaggcgtaattcagcaatgtttaaacagcttaggaaagcaaaccaaaacgactacttgcttatcacggctactttgattttgttggtcgtcttcaacctcagcttgctcagttacgtccagggacaacagaaagcagccgagcgcgaccaggcccaggccctggcaaccggctgctccaggaccttgaagggcgagatcaagaacgccctgaccctgtcgacgactctgaaggaactagttttagccagcgatggcaaagtcgacaatttctccccagttgccaagtaccttttagcagaaaatgccgcggccagcaacctgcagctggcgcctaaaggaaaagtcactgaaatctaccctttaaaaggaaatgaagcaggcaagattaaccttttgaccgacccgatccggggaccgctttgccgctacgggatcagccaccaggtcaccgtgacccaggggccaattgccttaaagcagggaggaaaaggcctggtcatgcggacgccaatttttatcaagaaaaagggcaagaagcagttctggggcttcgccgttgtagtgatgaagataccccagaccttctcctccaccgcggccaaccttaaatcggccggctacagctacgaattagaaaagcaagtttctcccttaaatactagctacaagcaggtcatgcaaaagggcggcctccacgagccgatcacctacagcttcacgactgcggacaacagcaaatggctcttgaagctagctccggccaagggctggcgctacaacaagtggaactggttcatgggctacatcgtgatcatcgacttcgctatcgctggtctcatgctctgggttatcagcgggcggatcagcgggcggatcctggaaagaaaagctaccctggatcctttgacccaggcctacaaccggcagggctttgactggaagctggcgagccagggggaaaaggagactacggtgatcatgctggacatcgacgacttcaagtcgataaacgacgtctttggccaccagaccggggacgcggttttggtccagctgaccaggaacttgcagaagtgcttcgggccaaaggctatcatcggcagaaacggcggggacgaattcgtcgtggctcttcctggcaggatgagcgacaaccggccagccatcaagggcctgtctgttttaaagcaggaagcggcaagcaacggagaagctattcctttctccgtttccatcggctacagcgaattcccgggccaggccaaggactatgaagaggccttgaagttcgccgacgcggccttgtatgaggtaaaaattgccggcaagaacaattttgccagctacaagtccagcttgacagagaagaagcaccacaactagctaggcctggggttaagagccctggcggcgggcgacccgactccccttttggtcatgcagatggatactaaagaagccatctacgttaacaagagcctgctggaactgtttggctgcgaattgtcgtcagaattctacgactattacggccagtccctgctcaacctgatttccccgggcgaccaggccagggtcaaggaggagtttacggactttgttgagtcagcggttgatgaagaacgctttaggggcgactgccagattttgacggcagatgcccggaccctgcgcgtcttctgcgacatgaagtattctgtcaaccagcgctatggcgccttggttcacatcagttttgtccttaattaacggaggccgaaaaaatggctgaagaagaaaagaagttgaacatccctaacctgcagattctgggccaggacaacagccctctttttcaaggggcgggcagcgagggcaaaagcgtgacctatcccaagaagtttgccaaccacccgggcttttaaacggtcaattgcggactgcttggctgacatggaaaagtacgttttcccggaagtaaataaagactaaaaaacatactaatctagtgttggatgattactcgacggagtagtcgttcaacactttttcttttactatgtaaagtggagatgaagccaatgccgtagact

SEQ ID NO: 2176 - DNA, 209 bp, Unknown
  gut microbiota DNA sequence
ttgcccgacttccgtgcccggtagtggtagcggtacgtaatccggcgcaggtagctgtgcgcttgcttgatttgcttatccgtcagtttagcttctatttcagtcaaagcttcagtgtattcttctggcagctcaattggcttgtgaagaagaacggcttgccatgcgctcttaaatttcaaaataaagaacagaaggtggcgctgatc

SEQ ID NO: 2177 - DNA, 4619 bp, Unknown
  gut microbiota DNA sequence
tttttttgcgcctcttttgggtatttttcctcttttgggtatttttcctttttcatttttgtccaaaacgtttattcatggagaaaatcttgcgaaaaaattacaaaaagcctaggtccggtaagggacgaagcagttttttgataaaagtattttttagcttgtgaataaaaataattcaatagttgccggacttttaacaaaaaatgttttttaaaatactgttattttagcaaaggaaacggttacagcaaatccctccaaaaaacttgtaagaagatgttgacattttttcacaaaaggacaataatcaatagtgaaaaggcttacaagccgagtgatatgaggtgaaaacaatggaaattaacgacaagaaggaattgactgaagaagaacgcgaaaatgcatacgttctttggtttaaccaactgcgccgcgctgacgtggccctggttgggggcaaatcatcatcattgggtgaattgacttcaggtactgacgtgccagtgccttatggtttcgcaacgaccgcacacggctaccggcacttcatggaagtcaatggcttgaacgagaaggtaaatgccttgctggcaactttgaaggacccggaagactcagaagaactgcaccgggtctgcagccagatcagaaagatcatgcgcgaggcaccaatgccggaagacttagccgaagacatcggcaactcatatgacgaactggccaagatgaccggacaaaacgaaccatacgttgccgtacgttcaagtgctacggctgaagacctgccagacgcttcattcgccggggaacaagacacttaccttaacgttagaagccgcaaggacgttatccgcaaggtccaagactgctacgcttccctgtttactgaccgggcaacctactaccggatcaagcagaagttcccgcaagagaaggtggcactgtcagccgctgtccaaatgatggccttctccaagtcagccggggttatgttcacggtcaacgttgccaacggtgatgacaccaaggttatgatcgaaggttcatggggcttgggtgaatacatcgtccaagggacggttaccccggacaacttcgaagttgacaaggaaagcatgcagatcgtaagcaagaccatcaacaacaagaacattgaattgatccgtctgccaggcggcggggttgaacaaagagacgtcccagaagacttggccaagagtccatgtttgactgatgaagaagttattgaacttgccagctacgctaaacaaattgaaaagcactatggctgctacatggacatggaatggtccagagaccaagacgacaagctctggctcgttcaagcccggccagaaactgtttggtcacaaagaaagaaggagggcggcgccaaggaagcaactgacgctaaggctccaagctccaacaaggttttggtcaagggtctgccagccagccctggtgtagcttcaggtatcgtgcacgtaattgacgacccgaaggacatcggtgacttcaaggaaggcgaaatcctggttaccttgatgacttcaccagactgggtcccagccatgaagaaggcggccgctattgttaccaacaacggtgggatgacctgccacgccgctatcgtttcccgggaaatgcagatcccatgtatcgttggtactgccagccgggggacctttgcaaccagattgctgaagaccggccaggaagtaacggttgacgccaagaacggggttgtctaccaaggggtggctgacgaagtcgttaagccaaagaaggccgagactgccccaatggctgcagctgaatacttcccgccaacggcaaccagagtcatgatgaacctgggtgacccggacctggctgaaaagtacgcaactttgccagctgatggtatcggtttgatgcgagaagaattcctctggaccacttacatccaccagcacccgctttacttgatcgaaaccggccacccagaacgggttgtcaacgaactggctaacgggatcagcaaggtctgccgggccatgaacccaagacctgtcgtcttgagattctctgacttcaagtccagcgaataccggaacttgaagggcggggacaagtacgaaccgcatgaaccagctgacctgcttggctggcgcggggcaagccgctactacgacccgaagtacatcgaagccttcaagctggaactggaagcagtcaagaaggttagaaacgaattcggcttgaagaacctgaatgtcatgatcccattctgcagaactgttgaagaagcagaaaaggtaaccaagatcatggctgatgaagggcttgagcgcagccgcgacttcaaggtcttcatgatggcggaaattccatccaacatcattttggctgacaagttcaacaagtacgttgacggctactcaatcgggtcaaacgacttgaccatgctgatcatggggactgaccggaacaacgatgccatttccgccctctacgacgaacgcaacctggctgttaagcgggcaatccgccacttgatcaagaccgcccacaaggatggcaagaccgtatctatctgcgggcaggcaccttcagaatacccagacttcactgaattcctggttaagagcgggattgactatgtttccgtaaacccggacatggttaaggaaaccaagctcaacgtagcgcactttgaacaaagaattctgctggacaaggctactggcctggggatgcaggatactgaagactacgaatggtaattagattgatttgaccataagtcgctccaaaaggagcggcttttttgttgaataattgcaaaaatcaagcatttcatgccaatttgacgtaaaattaaaaatgaattatcatcatttttttaataaaaagcggcactttaagttaagaggaaagcagataaatggcacaacaatactactcaatggatcaaatcgcaaaattggcacaggtttcccagcagcaggtctactacctgatcaacatgaagttcaagttcaaaccgaccttgactgatcccagcggcaataaattttatgatgagcgagcggtggggcagattttccaagaactgggcaaggtcctgcccaagtcggcagcttcgccggcaaccgacaatggcctgctggacatcaatgccttggcggaaaccactggcctgggcaagaagaagctgcggatttttttgcgggaacacaaggacttgaagccagactttgttgatgaaaagaaccacaacaagaaatactggggtccgagcgccatccagtacatcaatgaccacttcggagcagaagaagcaaaggcagaagaaaagactaccgaagttgaaggcaaagcagaagctgcagaagttgtagaagcagcaaagacggaagaaaagcctgctgaggaagaaaagcaagaacaagcaagccaagtagaggatgaaaacaaagaagagactattgcagaggaagaagtcaaagaagaagtagtagaagaagaaaagtctgctgcagaagaagtcaaagaagaagataagccagctggcccgcgctttatcaagaaggcgccgcgcccggcaatggaaaagttggctgaacacccgcaagttgaattaccttttgcctttgatgacagcgaggaagctgaaaacaaggctgaggaggctgacaagccaggccgcgggccagaagtcaaggaagaagcaaagccagcggaaaaggccgaaaagagcgatgagccggccaatgaccagcaatttgttgttagaaagcgcactaacgacgacaagcggggccggggcaattacggcaagcgcagaaacaaccagagaaacggctaccaaaaccagaaccggaccaacaattactctaagcggcgggaactttttgccggcaagatgaagctggttacggaaaaggggactttctacactgaccagtttgccagcctggaagaactggctgaatacgtcttttcatccaaggacagcttcatgaaggtcgagaagtacaaccggggtgaattttcaccagcctacatctcaaccaagatcatcatcgaatttgaagaagtttaaaaaaggcggatctgacgatccgctttttgcatgctttcattaataaaactttgcctaatattcatagaagtattttttgcttgcgaaaagcagaagattgtcctggcaatatccaggctggataaaattaatcttttcacaatgttgacagcgcttacagggagtctataattattactgtaagtaacttttaaaggaattaattgtaaggagattcacttatggcaaaaattaagggcgcaaacgccgttttagatgttatgtacaagtggggcattgaccacctctacggtttcccaggtggttcttttgactcaaccatgaacgcgatctacgaaatgcaagacaagatcaagttcatcgaagttcgtcacgaagaagccggtgccttggctgcctcagcagaatacaagcttactggtaagcttggtgtctgcatgggttcagctggccctggtgccatccacttgatgaacggcttgtatgacgctaagtacgacaagaccccaatggttgccctggtagc

SEQ ID NO: 2178 - DNA, 58218 bp, Unknown
  gut microbiota DNA sequence
agcaaaattaatcagaaagactaatactatccatgaataccgataaaatcaaaattttccttgatttggcagaaagcctgaacttctcgcggactgctcaaaacatgaatattacccagtcggctgtttcccagtcaatttcttcattagagcgctacttaaataccaagctcttctaccgcagccgcaaagaagtcaatttgactccggccggccagctcttttaccaggggatgcagccggtcatcacccagttcaacaaggccgtcacccatgcccgggaagtggcccagtcagttaatactctcttgaccatcggcttctccgggtccggttatgaccgctacgccatcaaccagttgatccatgaataccggaaggtcagaccggaagtcaagatcttcttggaaaattacgaccaccggaccatggttgcccgcttaaagcagggcttttgcgacgtgatcttaaccggaccagaatcaatcgactccggcatcaccctaacttacgacaagctgctggaaggacgcttttatgccgtctgcagcaagaactactgctacatgggcaattcgcccgttaccatgaaggatttgtctaaggagcgcttgatcttcctggacaacagctggtgcctgcccaagcagaactccctgcagaatgctttaagccgggacctggccagcctggactatgccgtagctaacaacatggccgactacacccagatgatttccgccggcctgggcatcggcatctgtgctgactttgtcgttgaccccagcgatgaccagctggagcttttccctttggaaaaggaagttactgatgaaatcggcatcgtcaccttgaaggaccggaagtcaccggccgccgactttatcgcctgggtcaaagagcggaggctgccggccacccacccggtcacaaaataaggagctggagagcaaagaatgaacacagaacacttggcaatttttattaacctggctgaaacgttgagcttctccgggacagccatgaatatgggggtctcccagtcggcggtctcccagaccatttcctcgatggagcgctatatcggggccgaccttttctaccggaccaggaagaaggtctccttaaccccagttggcaaggccttttatgaagacatccgccctgtccaccacaattacgtggacactttaaggcagctggaagccctaaacgagcaggccagagacaagatcaccatcggcatcagcaattccccttacgagatctttgccttgtctaaaagcatcaaggcctaccaagcggaaaatcccaaggtccaattttacatcgaaagccataacaaccgggacctggttggcctcttaaacgaaggcgccctggatatcgtcttcttaagccaagactccttgagtccgagtgccaatgtcaaattcaagccgcttttaacaggcaagtactgtgccgttttccatcaggactatgattttgccatccgcggatcggtcaagcacagcgacctggacaagcaaagagttatcttcttaagtgacaatatctgcacccctggccagtactctttgcaaaagatcctctggcaggaactcccccacctcaaggtaacttccgccaactccatcaacgctgccatgctcagcatcaaggccggcctgggtatcggcatcctgcctaacttcctcttgcctgaccagctgaaggacttggcagtcgttcccctctccggcaaaaacgaggtcagctatggtccagctatccccgagcggactatgtctaccgccagccaagccttctttgactggctggaagagggcaaattgccagccatgcatgaactggcttaaattaaaaggctagaagcacttactgcttctagcctttttgcatgctatttcaaattttccttggcggtcaaggccaggtcccaggccagccagtcgccgctgctttctgagcccagccacttgtccagcctgcccaggctgaccccggtcaatttcacccaagccgccttggttaagcctttcgctgccaagctgccggcaggcacttttttcgaaaagatcaggtcagctgggccaaatccgttattgccgtccctcttttcttaagccagagcttccttcagcggcttaaagcgcttgtcgcctgtggaaaaatctctgaccagccactggaagtcaccttcatacttgcagtacaaaaagcagcaggccaggtagtccccctgctcttcagtagcccggtcaaaaacttccgtgtccgcgtaattttccaagaccaattggtcttcatgctcgtcccggtagtaggcccgactttcttccgccgtcttccccagcctctttaagtcacctaaactgaccagggccaggacttgctcataatcctggtagttttcctccagaatacggccggcgatttccaagtccccgtcatggtccaaaaccaggctggaaacggtattgtctttttcttgaacggcaatcatgctttgcgtgtcggtcattttattcttctttctaaaaaattacttgaaaaagcggtcaaagaagccccgcggcttcttttcctcgctcttggcggcttccgcggcctccttggcctgggccagttcatccagcagcttctggatctggtcggcctgctccttcttctcagcttcttcctgctgctgcttttcagcctgggcttccttttccgccaaaagctgggcattctgctcggtgaccttcatcatccggtccatcattttggcattcttcttcaagtatggagcaatgttttcgaccattctctgcccctggacttccgcggcggctctggccttttcaatttcaaagcgctcagccgcgatcccagtttccttctcatagcgctcaatcagcaagtggttgccctgccagaggtccatattggccatcttgaccgtcagcccctggctgttaaaagtcttgcagatctcagctgaagccggcaggtatgcgaagtagcggttgatgtcgttgcccttgttggggaagacccgggcaggaatcatgcattccggattgtcccgggtaaaggtgatttcccgcaaggtcgcctcatcgtgcaaaagaatgctccagttccgccggcccaggtcctcaacaatattgtagttcttcatgtggatgtagtacttggtttccgtgttgaccaggccgtattcttcaaccagctgccagaaggcgtgcttaaccgggtagaggaagtcgtgcttgagcttcaagtagtcctcgtcatccatctcttccagccagcggtggatctgccgggtcagataaagaaagagggtgttgttcagccagtggccgtggttgtcggtattgccatccaggtattcaaaaaagtggatgtccgcgtccgtcttcttgcggaactggttgccctggctaattacgtagcccctgcggccaacttcagtcaaaagctcgatatccttgcccttgctgttcatgctgaaaatggccaccggttccactcccagtttctcgccatgccggttgctccgctttttcaaaaagctctgggcggcgctagaagaaaagagggagacttccgggtcatcgatgcagatcggggtgatgacctggtcttcatccatgtagtggtcggtaaagttccagatattcttgttgatgaccttggggttggagctgtaggcgctgacccggtcctgcttgctcaagctcttgccggccagcagcttctttctgaccgctgccgtcatcccgaagagcttgtcttctgaaccggcctggacgatctccttggtattgccgatggtcaagttggaggcaattttaagcagggtcgacttgccagtttctccctgcccgaccaggccggccacgatcgggacgtcttccacgatcccgtttcgctcatcgatggcctggcggatcttccagatgctgccgctttccaggacatacatcaagaaggagaaggcagcctgggattcattatcctgcttgcggtcccggtagaagcggataatgtcaaaaattgctgacacgtcctgccgggtcggcttttggaccgcgactggttcttcctggtaggagtcgattgccggcttcttcagaatcgtcccggttaccgggtcttgcaggtaaagggggcgcgggtagtgggccttttcatccggcaaaacaatggcctcgccattttcattgccttcgccaaagacgatctggctgagccgcttactcaattcctcatcagccaggatcttttttcccgtcaagttctccttgtcaatcccgcttttaaagcggaggagcttggccgtcttcttaaaggacacgccggcctgactttggcctaattgccccagccgggtcgcttctttgaaatcctttaaaggtgcttcagccattttatctgccaagccgctgacttccagcaggtactgggatcgcttgtcttctgccaggtccaaatagccctggtagatctccttgtctaaaatatctctggccttggccgtcagctctttgaccagctgctggaccatggcccagtcgtcaccggtcttttccccgctgcttaagaagtaggtcgccccctgcccccagtagaagcggtactggtctttcccggtcagcaggaagaagttgctttctttctgcggtgaaaaactaaccgccagccggccagcagccagtttttcctttaagtccgggcaatcgctagctaagagcggaaaaagccgggacagttcacttgccgcggcaagttcgggaacttcttcctccccaaaaagcaggcaaaactttacctgcttaaataaagggctgagctcccggtccagcagggtccagtcaggagcggccagggcggccgtcagactcccgtattcctcccctgcttccttgatgtcttccagcaagccgtgctggatcagtaactttcgctgagtatcaataatccttgccatctgtcttatttcccattcatgactttttgcctgccatattgcagacctttaacaagattatagcactatccggccagttttcggcagcgtttacccgctttactggcaagattctgcggatttttgccaaaagaaagccgggctggattggctgcgggatcttcattctctttgccttgatctggctctttggcctcatcaccagccagtcccgcctccgctttgcctgcgacttcttcatggtcggcgccttgttcatcatgttgattggcttcggcggccggcacaagcaggtcctgctgcaagagaaaaggcaggctgctatcgcacttaagcaaaagaattacgaccagaccggggaaaagttccggcaaaacagcacggacatcgccaagagcatcgatgaagcagctacaagcgtaactactgcctggcaggatgccttaaaggcgaatcagcaaaagaaaaagagccagagccagaacaagaaagctcccctctccccgtctaaagctgtcagccaggcttttaaggacgaaaagagccagctggaaaagagcaagaaaaaactgctcaagcaaggccgaccttctggcccttctcaagtagtacaagtagtatcagtataaaaatgccaaaatcaaatatgccagttataaagcggtccaaaagactgaactggcctactacaacgccgtcgtccgcatcaatggcctgattttggcccagtaccaaaagcaggtcagccgggctaaagaaaagtacgaccataccgctagtgaattaggaccacgttaaaccccgggtctggcagaagtccaggataaaggaagccatcttctgggcaaccttcggctcttgggccagattccggctggccaggctgatggtgtaagaagtatcttcccttaccggcacggcaatggcaccagcagattcgtggtacttggacttaggcaagagagccaccccttcaccgatcgccaccaggtcaaccagggtccgcacatcgtcagtcacgctgctgatctggggatggatgtcatttttagcaaaaacgtcagcgatgatcccggccaaggcatgttcttccccaaaagccaggtaaggatactgctcgatctgcttcaagctgaccgacttctgcttggccagttcatgacccgccggcaagagcagctccagctttctgtgcatcattggtactaagtcaaagccggcaatcttttcacccggccgggttgtgacaatggccaggtccagttccccgctttgcagcatgtccaggagcttgccggtcacggcccgctttaaattgaagtcgacccggtattccggattgacctgccggtagtccttgatcacatcggtaatgaatttatgggccacgatttcagccaccccgattgacagcttgccgctttcgcccagggccatctcagacaactgccgccgcccttcctggatctgctggaccccggcttcactgtactctttgaagaccttgccgtaaaccgtcaggcggatgttgcggccttctctttcaaaaaggggaacgcccagttcctcttccagtttcttgaccgcgtagctcaaggtcggctgggaaatccccagtttttccgctgcctgggccatatactgggtctcagccagctcgttgaagtattccaagtgttgaaagttcatgtctttttcctcatcgttaagtcttacctcttatttttgccaaaatttagtttttagcaagaatttagcattttttaaaacgttttttagtaattttcaaacttttttgccaaaatttcctgctaaaaaccgccaacataagttcggaaatatatgattcagatttcatataccgcttttattcctctttcttgatcggaaaagtcgcatttatccgaaaaattagcagtaattatttgaatttcaccgaatattatgtcaaaattgagtaagcatgattggcgttgactaataagaaaaaggcgctataataatcttattgtaaaatttattttgtaaattcattcacttaaaagagagccttaagatgaaacaagacgtactttaccaaatcttgaccactgctgaagactgccagacagtcagcgatatcgctaagaagcttttcctgagccagccatatgtcagccaggttttgagcaaggcagaaaagaaatacaatgtcgttctcctggaaagaagaaccctgccgatcgaactgactgaagccggccggaccctttgcgacggcttagccaagctgcacagcgaccagatgaagatcgaacaggacctgcgccgcttcactgaagaagagcagtcctacatcaagatcggtttctccccgatctgggcaccaggcgaaagcaggaagatcatccccgttctgcaaaagcagtttgaaaccacccgctttgaactgatcaagaccttctctatcaactctgccaagcgtttgatcgacaaccggatggttgacatctacctggggccgctcctgcggggggaaaacttgaagaacttcttcctcttccagccgcggatcttcttgatcatccctgaaaccagcaaactttaccaagaaggtaagcgggacgttccgttcagccagcagctcttgatggacctcagcgaagaaaagatggtttccttaagcgatgactccggcttccaaaagaccgttgaccacctgcttgaagaccagaacctctccgttaacaagagtatcaaggtcaacgactacgaagtcgccctgcaaatggcagtcggcggtttgggctggacggcaactttggaatacatgctgccggacatggacccagaccttaagtacaaccaggttgaacttcctcacaccttgatccagtcagacaacggtttgaccatccacatggactccaacgaccgggccaaggaagttgcccaggtgatgaccagactgatgaaggatgacctggttgcccgcaagctgatcaaggaataagagcagaaatttaaaaatatgcagacaaaaaacgagccagctggctcgtttttttattggcatttgactattaaaaactatttttctttcttcttggcccggaattctcgccgccattctttgtgactaaacgcggcataaaccaagatggctaaagccgtcaagagtgaaatcagcaggccgcttcgcaatcccggcgtccggtaaaccaggcggacgcggtgcttgcctgctggcattttgaagccgacaaaggccgtgttggtcttaattaccttgactgccttgccgtcaaccgtagccgtccaaccgtttgaataagggatggtcgaagtaacgacaccggctttcttgctagtaaagaggccggtcagctggttttgcgcgagtttcagctgcttgaccccctgcttttgaatctgccgcacttctttcgtgtattcttgattcaaaggaattgctacaactttgatcttgaagcggtaggtccccagttttgaaggctggaaggtcagactattgggcagagtctgataagtgcccatgttcatgaccgcgctgtcgaccaggcggtaaaaagaagtcatatcctggcttctctgcacaattgtttcactggccttcttccccgttaccgtcagcttgtagctggggtctggtgaaccggccagaaggtggtagcgccagtacttgtagcgggtcgcccgctcattaaaggtctgcccggccaggtcggcctcctgcttggccttcttcagctccaagtccagctgctggcttaaagtgaaaggctggtaggaaatctggctgatctcgacatgtagctcgcttttgcccagtttggccttttctctatctgacaagtgcagcttcaacttgtagctggcatcagagtccgtataagtcaatttattcttgctcagcttcttgccactggcatcgaccaggctagccttgatggtcttgaccccggtcaatttcgcggctttaaggccaacccccttgaccaccaccccgctggccagagcccgctctttttggctcgctgacagtttttggtagcggctggggctaattgccttatagcttagccaaagcagcgggaaggcctctgtggtcttgtagagctcggcctggtagacaggctcctgattttgatcttttttctccttgccagcagcgatcaggtcgtaagtcccgggcaccttgctaccgtttactgagtatttttggttaaaaatatagcggacgcccaggaaattgttcaatatcgtccggtcatcaagctggtggaagggaatgttgttgtcatactgcaggttgcccaggtcggtcgagaactgacccaggtactggttctggatggaatagtaagatgacacgttggccaggccgctggtcaagtcgttaaacagcttcttctggctgacaaactggttatttgacaccgtgttgacccggtaaaagccagccggcaggatatggttcaagccgccatagcggtcttccgcgatttgctcatattcccccctgaccagcatgttggctgcaaagttgccattgtatggaagagccgcgtacagggcgttaaaggccaagttagccgctacagtaagcaataacgcccgctttaaagcccgtccttcgttgaccaggtagctggcccccagactgagcaagaggaagatgactggcaagaagagcttgtagtcattttccaaaaaggacatggtgaccaggtagaccaggtagatcccgctggtggtaaaaatcagccgcatctccttttgactgaccgcctgctcactgatggccttgacaaagaccatcacgctgaaggcaaaaggcaggtacaagagcagagtccagcggtttgacgctgacatccccccgttaaagactgccccgactgccgggatcaagagcatgactgcccctaataacagagaagcagcgaccagccggtacttgcgccagttacggaagaggtagaccagggccggcaggatgatgctggccaggcccaaggctgaccagaacatcaacttccagttgtccccgtcaatcagttcctttggcaaaagcaagtagtagtaggccggataaaaggtcaagccattggcaaactgcgatccggtccgggtggagttgaccacggccaaaagttccggcaaaagcaggccggctgacagaaggaccgctcctaaactggtaaagaagagcttcttaattgtcggccagaaaggaatctttttccaataagccaggccccagcgcaaaaacaggtaaatgattgcccccaggcccaggacaaaggccaggtaatagttgctgaccagcatccagacaaagaccccgaataagggccaggcgctgcccccctgcaagagtcgctccagctggaccacgatcaagggaaaaagaataaaggtcgtggtgaacattggctgggccagggacgcgtacagcaggtaggcattgaccatgtagacaccgctgccaatcaagacaacaccgtctttaaagtcaaaatggcgggcaaaataaacaaaggccaaacccacgcagtaaaggcgcaacagcaggatcagctggtaggcaaagaccaggtggctggtcggaaataaaagggcaagataggcaaagacgtcaccaatcgtatagtaagaaaagactgaaaacaggtcactgcccaggcccatggtccaggaccattcagctggtccctgacttaagtggcgcaggaaactgaacacgtactcccggtacttgaccagcaagggcaggtgctggttggccgtgtcagtgttccagatcaggctatggcccgtaaccaagtaaggtccaaaaacacaggccgccaaaaagaggaagaagacagagtacttccagtagacggcccggtcacgctttttgttaaagctgaattgcaaaatcatccctccaaaatgtttaatggtctgtctttttattctaccgcttttcttccctgcccgctaaaaggctagaaaatattaaaaaagaaaaatgaccagcaaaagctggtcatcatccaaaattctaatttctcagctgttcgtaaagatcctgcatttcctggtcatctggcacaagcttcaagtacttttccagcaattgccgggccagatcgccatgggcgctctcttgagcaaaggagatcattccccgcaagaaggcaggactggtctgcaggctctggtaggccaagagatattcctgcagggcctggtcatatttttccatttcctggtaggaccgggccatgttccagtgggcctggggctccaggtcgctgtcagccagagcagtaaacaaggccaaggagtcctctgcccgcccctgggctaagtagaggtcgctcagcaagaggcggaggctggaattgtccgggttgacctcaaggccccgctgcaagaggtcctcagcatcctcagccttgcctaatttggcagctgccttagccccagtcaggtaaagctcttcatccagctcattgtagcccaggcccgtctgagcggcaaatagggcttcttctgggttgtcttcttcctggtaggccttggccaggaaaggataagcgttgacgtagtcagggctttgcttaatgacatcatcaaggaaggaaatggccttgtcaaactggccggcctcttccatgattaccccggcttggtacttggcgtcgatgtccaggaggtcttctttatggtcattgataaaagcagctgcttcttcataccggcccagtttagccagggtctggaagacccgctggttaagattgacttccccgaacatggtctgtctttgccgcaagtcctggtacagaggcagggcctggtcgttcaagtcgctcatgtagtccagttccgccaggccaaaagtaatggcatcttcatccggggcctgctgccgggcctgctccatcttggcccgtgccgtttcgatcaggccctcgctttggtagtagtcagcctggaccaggaggctttccagataggcatctgaatcagccggcacattgtaaagcagggtcaagccatcgtcctctgctccgtcattgaggaggatttcggccagatagaccttgaagaggtcttcattgggaaaatcagcgatcaagctgcggtagacttccttggccaggtcggtaaagcccaggtcggtcaggttttccgccagagacgccaggatctccggatcatcgttttccagggcctgcttcaagagggcgcggctctcgctgaaacggtgaccttgaatcgcgtccaacaattgttcagaatatgtcatctttgtcctcactttctgcttactattgtaccgtaactagtcagctaaataagtttttttgcccaaacaaaaaaacgccagaaataccggcgtttctttattttaaagcgcgtcaattacttaacagcgtccttaagagccttacctggcttaaatgcaggaaccttgcttgctggaatttcaatttcagcaccagtttgtgggttgcggcccttgcgagctgcacggtcacgtacttcgaaagtgccgaagccgatcagttgcaccttttcgcccttagccaagtcttcttggattgcttcgaaaaccgcgtcaacagcttctgaaacgtccttcttagtcaacttagtctttgcagctacttctgaaactaattctgccttatttgccatgtggaattcacctcctataaattagactcgcgtctaatcacttcatttctcttgtagaaatgagggacactgagcgcttgctgcattcaattaattccctgctctctaaaatatcacaagaacgttgtccctacaaggcttttagcccgcggcttagcactttttcaagagaatgtcacaaattgaaaaagaaaagcccggtcctacttccgcttacgcggcaggatcttgatcggggtcccggtgaagtcgaaattctcccgcagctggttgatcaaaaagcgctggtaggagaagtgcatcagttctggatcgttgcagaaaacaacgaaagtcggcggattggtcttgacctgggtcatgtagtagacccggagccgcttgcccttgaccatcggcgctggcaccaagcggctggcttccaggagcaggtcgtttaagacggatgactggatccgctggttcttgttctcgtaaacttccttgaccatctttggcaattggtcgatgttcttgccggtcttggccgaaacaaagacaattggggcatagtccaggtaggagaattcttcccggataaccgcttcaaagtccttgccggatgaagagtccttcttcggcaagtcccacttgttgacggcgataatcatccccaggcccgcttcatgggcgtagccggccacgtgcttgtcctgctctctgatcccggtgctggcatccaggacaaggatggccacgtctgaccgttccatggcgctcatcgcccgcatgacggagtacttttcagtcttctcatagaccttgccccgccgtctgatcccggctgtgtcaacaacccggaacttggttccatccttgacgaatggcgtgtcaatggcgtctctggtcgtcccttcttcgttggccacaatcacccgttcttcgcccaacaggcggttgacgatggatgacttgcccacgtttggccggccgatcacgctgaaggagataaccccttcttcggtcttttcggcatcggccgggaagttcttgactacttcgtccagcaggtcaccgatccccgtcccgtgggaaccggaaaccgggattgggtcgcccaagcccaagctgtagaagtcatagatatcggtccgctgctcagggttgtctgccttgttaacggccaaaagaactggcttatcggcccggtagagcaggtgggcgatccgttcgtccagactggtcaccccctggctggcatcggccagcatgacgatgacgtcggcctcttcaatagcgatttccgcctgggcccggatttcttcgtcaatcgtactgtcttcccaggtaatccccccggtgtcgatgatgctgaactggtggcccatccagctggcccgggcatagttccggtcccgggtcacgcctggccggtcttccacgatcgccacccgttcattgataatccggttgaacagggttgacttgcccacgtttggccgccctacgatggcaacaattggtaatggcatcttttcacctcttttgctttctattgattattgtcaaacaaaaagaccgaccaacggtcggtctttttagtgctgattaacggttcttaagttggtcaccgatcatgtcaccaagtgagaagccgttgtcgtcgttgttcatgtacttgcgagcaaatgcgtcgttgtttgatgagcgacgtgcgcgaggtctgtcgtttgatgaagaagcgttctctggatcagcttgcttaattgacagggagattcttcttttacttgggtcaatgttaagaaccttaaccttgaccttttgacctacagtcaagacgtcgcttggcttgtcaacgtgcttgtatgaaatttctgaaacgtgtaccaagccttggatgccgtcagcaacttcaacaaaggcaccgaagttggtcaaagacttaacttcgccttcaattacatcgccttcgttcaagcttgaagtagcttgttcgaatggggatggttcagtttgcttgattgacagggagatacggtgacggtcattgtcgatgccaataaccttaaccttaacatcttggccaaccttcaagacgtcgcttggcttgtcaacgtgcttgtatgagatttcggagatgtgtaccaaaccgtcaacgccgccgatatcaacgaatgaaccaaagttggtcaagcgtgatacccggccttcaactacgtcgccgacaaccagttgtgaagcaacgttttcaaaggcttgttcgcgttcttcttcgatcagttccttgtgggaaaggatcagacggttcttagccgggtcgatttcagtaatcttaaccttgatagccttaccgatgtaaggcttaaggtctgaaacgaagcggtttgagatcaagcttgctggcaagaagccgcgggtgccgacatcaacgagcaaaccaccgcgaactgatgaagtaaccttaccttcgatagtcttgccttcttcgaagtccttttgcagcttatcgtaagcttcacgttccttaacgcgggttactgagaagaaaaattcaccgttttccttgtcaccgcctgcacgacgaactacgtaaaccttgaaggtatcacctggcttaacttcgtcacgcaagttgacactacggtcgttggtgaaatcacggcgagtgattacaccttcaacgccggcgccttgaacaccaacgttaatttggccatcttcaacgctcaaaacgttaacgtcaacgatgtcgcctgccttaacttcttgcatttgagcaagagcatctaaaaattgattgttttctgacataaatacaaaatgcctccctgtttattcgttctctattttaccaaaaaatagatgaatttgctactattttaccagacttttttcgactttacttgctggtatttgtttttttagcaatttcggccaagatagcggcaacaacctggtcaatcgttaaattagttgaatcgatttcgattgcatccgctgccttcttcaaaggtgaaacttcacggtgggagtcaaggtagtcccgcttggcgatatcagcttcgatttcctcaaccgtctgcttggcctcaatccccttttcctgccagtccaaaagccgtctttctgctctagaccgggcgctggcaaccaggaagatcttgacttcagcctcaggcaaaaccgtggtcccgatgtcgcggccgtccatgatcacgttggttgacccggcaagttttctttgcaggtcaaccatcttgcttctgacccccggcagggctgagacctgggagacattagccgtgatttccggggtccggatttccaaagacacgtcttccccggctaccagaaccttctggccgctttcgccgggctctaaaacgatgccgtcttcgtcgatcgcctttaaaatcccggcttcatccccatagtccaggccgtgcttgcgggcgataaaagtacatgcccggtacatagcacccgtgtcgatataaacgaatgacagcttattggccacaatcttggccaccgtgctcttacctgctgaagcaggtccatcaattgctacttgcataacatcaaaatgaagcgactcgtatcgcttcaatcctttccaataaattcagctatttggcttgcttgatcttcagtttctgaccaactgccagggttgagctggtatccagaccattttgctcagccagctcttcggcgcttatgccgtacttctgggcgatcgcggcccagctgtcgccggccttgaccacgtaagtcttgaccttgggagcaggcttggccttgctagtcttttcaacggccggcttgggcttggcctgctctttctttgcttgcggaacggcgtagtcactgttttgactggtgatcagcggcacggctgccaaggccatcataaccgcgatcaagagggccgtccaccacggcgcctgcttgttcttgcgctcttctctgaccgcttgctggcgggccagacgtgacaagggcttttgggcattttgatccatctagcttccccctttaagcttacattctaacataaaaccaggtgctaatcgaaaagaaaaggccttccttaaggaaagcctcatctaatattttatttgtcttttcgcattagtacttgctggaaacgctgaagtgcttgatcacgaatggcttgatcgtctttaagacagattcaaagaggatgtagaccacaactgagttgatggcccccttgatcaagttgaatgggacgatgatgcccatgatgtagctggacatgcttggaatgtgcagcatcttgcccaggtaagtctgttcagtaaaagtgagcagctgagcgtagctcatgtgcatccccgctgcctgcggtactgaagtgtaggcgtaaaccggagtcaagaggaactggttggtcaaagccatgaccaccgtcaatgacaaaacgcccaaaagcaggcccagggccggcagcaggtagcccttcaggctctttctgtcttcttccttgactgagccagccaggaagtaaaatggcagggcaaaggccattgaagccaggaaggcagccagttcaccgaccagtgacgggagggcaaagccggcaaagatcaaggacaaaaggcacttgatcgcggctacggccaacccgccgccgatgccgaagataaaggtggtaatgaccacgatgacgtctgagaagtccatcttcaaaaagctgacacccggcatgatagggaattcaaacttcatcaccacaaaggcgatggccccgatcatggcataagcgagccagttgctgactgatttagctgtccgtttgttagcagcttccatattaacatacctccattaaaaaagtccgttgcctcgaagagcaacagacctttcttagtaagcatgcttattattccagcgtctgccttcttccatctagactataactatcggtagctttacagcattcaaccactcgcgtggctcgcggacttgcaccgccggtcgggattttcaccctgccccgaagacaacttgtattatttttgatttgattacgtttacattctaatccacttgcttgagtctgtcaacttctttgcggtttaattcccggtactgtccggatgtaaggccttgcaagtccaggaaggagtagcgttctctggacaatttgtcaaccaggtgattgacagctttaaacatttccttgacctggtggtagtggccttcatggatggtcagctggacgatctgggtctgggcccggggattggtcttcaaaaccttgacttgggccggcttggtcttgtagcggccgatctggacccccttcttcaaggccttgatttcatctggctgcagaatgcccttgatcttagccacgtagaccttgtcaacttcgtttctcgggtgcatgagtaggttggccagttccccgtcattggtcatcaagagcaggccagaagtgtcgtagtccaagcggccaaccgggtaaaggcggtatggcaaatcagtaaagtagtctgccaccgtcttgcggcccttgttatccttaaccgcagagatcacgccccggggtttgtaaaaaagataagtatggtggctttctctttcaatcggctggttgtcaacaacaacttgttcaatcgagctgaccttggtccccagcttggttaccacttgcccgtcgactctgacccggccggccaggatcattttttccgcttctcttctggaagcgatccccgcctgggcgatcactttttgcaaacgttcttccgccattataaatcctccatcttctgcaatgcttcatcagccgtgccgttttcggcaaacaggtctacctggccgtcggcatcaaagctgctgtcttcaaaattctcaattaccggcagatccgccagagacttgtagccaaagtactggaggaaataatcggtcgtcacgtacagcttggggtggcccggggcgtccttaaccccctgggccttgaccaggccccgccaaaccagggtctgcagggcaccagaagagttgaccccccggatttcatcgatctcaattctggtaatcggctgccggtaggccacgatcgccagaatttccaaggctgactggctgatattcttggtcaggtccttgttgaaataggcttcaaccaggtcgctgacttccccgctggtcgttaatttatattcgtcgttgatttccaaaagctgcaggccgcagtccggatcactggccagtttttcctgcagccttttggccagactctcaatttccgggtccgccagctgcagcaggtcccgcagctgctctttcttgatcccgccgtcgccggccatataaaggagggcttgcagcttggctattttactcgtcatgcttgcttctctctatttccaagtcgccaaagcggcgcttttgcctaactttcaagtactggtccttggccagttccaaaattgccaaaaaaaggccaaccaggtcggccaggctttccacctggtcagtcaaggcaaaaaagctgacccggccctgctgctctaaaacttccttcagccaggcaatcatttcctggatcggccggccggtcaaggtcacctgggcatggtcgttccttttcttaaagcggcgcatagccaaaataaagctggccgtcaggtcctgctggctgatttgccctaaaggcaggggctgaaccttggcccctacagccacgctgggctccttggcggccaaaactggtaccttgtcatttctgaccttgaagtaggccgaaatctttttaaagacggaatactgaaccagttgctcaaccagttcttcccgggggtcggcaaattcttcttctgtctcgacaaagtcgtttttcggcagcagatactgggacttgatccgcagcaaggttgccgccatcacgaaatattccccggctagttgcaggttcagccgctgcatctgctggaggtagtccaggtactgctgggtaatccgggcaatcgggatgtcatagatgtctaattcctgcgaccgaatcaggtggagcaaaaggtccagggggccttcaaaattcggcagctcaatggtcatgccttcattcatcattgttcaagtacttcatcaaataggtatattccggaaccgtcattactttttgcttgccagcttcctgggccagttcccgcatgatttccgaaaaatgctcatcatcccggaaacccggtgctaaagacaaatagcgcaggaccaggcagccggccccggtctcgcagcccgccaggccgacgatgttttggtcctcgtcccggtaaaggtagagctggtgggccgggtcttcagcgtaaagctgcatctcttccttcaaattctgcaggttcttgaaatccggcagataggacaagaggcccatggcgactttttcataatctttcttatatggtactagcatatgatcgcctctaaatgcggggatgggtcttttggtagacgtccaggatatgcttctgggtcagattagtatagatttgggtcgtggaaatgtcagtatggcccagaatttcctggaccacccgcaaatccgccccatgctccagcaaatgggtcgcgaagctgtggcggagggtgtggggagtcacatccttggcaatgccggcctgctggcagtacttcttgatcttctgccagacggcctgccgggtcaactgcccgccccggctgttcaagaacaggtaatcgctgctcttgccccgctttaaaagctgctggtccctgaaaggcaggtagcgcttaatccagtctaaggccagggcgctcaccggaataagccgttccttgctccccttgcccaggactttgatcagctgcaggtcggcatggacatcggctaattgcaagttgaccgcttcgctgacccgcatccccgtcgcgtaaagcagttccacaagggcccggtcgcggattcctaaatccgtagtcagatctggctgctctaagagcttgcctacttcagcctcagtcaaagccaagggcatccgcttctcccgcttgggagcatcaatctggctcatggggtccagggcgatcagctgctggcggaccagccactggtaaaagcggctcagggtcgacaccagccggctgatagagctgttagccttgcccaagtcccgctctttagctaaaaaagcatcaatttccacggcttccagcggccaggcgggcatctgctcttctttgacaaaggccagaaactccagcaaatcctgcttgtaggccgcgatggtattcggactgagtccccgctcaatctggctgtagcgcagataatcgtttatctgctcagcgagcttattcatccgcctcatccttaatcagcttgatcgtgccggcttccttgtcctggctgaccaggccccgcttgatcaagttgcctaaggcccgcttaaaggcagacttggagatgccgaaatagtccttgatggcctgggcctcgctcttgtcgctaaatggcagggtcttgtcgcccttgcggcgcaaagacatcatgatcatagccgcgtcatcgtcaatttcttcaaaagaccggggcaaaacgctcatgttcaagcggccatactggctgaccccgattacccgggcctttacttcctcacccagccgcagcggctgctgcatttgagattcatggatgaagcccaaatagtagtcattggtcaaaataaagcaacccagggacttgctggagtatacccgggccagcaggttcttgttgaccaggttgttggggaaacggacagcgatttggtcaaagacgttttcgtcagcggccttggcccagatccggtccttgtcatcagtttccagccgcaccaaaagacggtcatctttttgcggccagcgggccgggtcaagtggcaggtcgtccagggacataactatatccttatcaggcaagccaacgtccaaaaagacccccagcccccgctggaccctggtaaccgtggcccagccgtattggtcagcctgggcaaaaggcaggaactgggtcatttcccgttcatgtttttggttatcataaataaatcccgtgatttgcccgccaatttccggcgtctcttcctgggtgatttcttctttcttcaatttgaacgttacgccgtcaatctgcacgaaataggcttcagcgttgctgtcagtgattttaccggtccggatttctccaagcatagtctgcctccaactttacataattctaatactagtatacgggaacaaagaaagaaaataaagcaattaacaatagtttttccgccagttcgctgatttttttcaattcacgcatagttttttctattttaaagcaagttttgaccaagttctttaattaatctaggtaatcaacgaaaaggaagcttacatgaccaagaaaaaacacctttacgaagttgacctgatgcgctgcttctttatgttcggcgtcgtgctcaaccacgtggccagcacatttgccgcagctttaggcaacacggcgaccccctgccggccgcttttcagtatcaacccacttgatcctgcactttcccggcttcggctttatgttcatcaccggcctggttctctttttaggctactggggccggcctaaaaaacaaaactggccggtcttctggaaaaagcgctatatcggcagcggtattccctacctcttctggaacggcctctttttggcctttctcttgctgaccagcggctcttttagctggaacaagtggctgaccggctggctggaagccatcagcaagggcaaccagttctacttcagtccaccctcctgtcctctccccagctcctgcttttggacaaccccctcggagcccttgatgccttgaccagatccaagatgcaggagctcatcctccaggtctgcaaggaagagggcatcaccacagtgctcgttacccacgacgtccgggaagccaccatcatggccaacaagatctgggtcatcaaaagccaagggatcgcggcagaaatgatcaacgacttccgcgaccaagacgatgaccaggcccaactggccaaggacaagatcgtccacgacaccttgcagatcatcttaggtgaagatgaccttgcagcttaacaattaaaaaagtgataattcaactctagctcagctggagtttttttaatgcgctttttcctccctgctaaacagcccggtcttctaaggtcggctattctttttgggtagattaagtttgcagacgatttaaagcggctcagcagtttaaaatacctcttctgccttagctatattcaaggcaatcattaaagaaagcagagaaaaaattggcaaagaaaaagagctcaatcgattgattgaactcttttttctgtggttgtcaaacttgcaatcctagattacaggtttgaaacttcaccttggtaaattgcgccgcgacgtgcgtcaacagtcaaagttgagccgtcagcgatctttgaagttgcgtcagcagcaccgacaacaactggaatgccgagtgatacgccgacaacagctgcatggctggtcaagccggaagcttcaacgatcataccgctggccttcttgatagctggcatgtagtccttgtcagtagtcttagctaccaggatgtcgccttcgtgaaccttagcgttggcttcttcagcgctgttcgcaacaacagccttgccgataactgagccagtgcctacgcccaaaccttgagcaagttggttgccgatgatttgcagcttcatcaagttagtagtacctgattggccgaatggtacgccggcaacgatgattaccaggtcgccatccttaacgaaaccgtgttccttagctacgcgggcagcttcttcgaacatttcgtcagtgtttgaaggttgctttgccaaaactggttcaacgccccaaacgatacccaatgagtgttggatcttttcgtcgaaagtcaaggcaacgatggttgcgtctggacggtacttggagatcatacgagctgagtagccggagctagtagcagtaatgatagtcttaacgcccagttcttgagcagtgcggacaactgattcaccgatagcttcagtaacgtttgaacccttgtattcttcaaagcgttgcagagccagagtgttccgggtgtccatttccttttcagtccgaacgttgatgtcgtgcatagcttgaactgattgtactgggtacaaaccgtttgctgattcacctgacagcatagttgcgtcagtaccgtcaagaacggcgttagcaacgtcagtcacttcggcacgggttggacgtgggttttcttgcattgagtccagcatttgagtagcagtgataactggcttgcccaaagcgttgcacttcttgatcaaagtcttttgaacaaatggcacgttgatgaatgggatttcaacacccatgtcaccacgggcaaccatcagaccatctgaaacttgcaagatttcgtcgatgttgtcaataccttcttgtgattcaatctttgggaagatcttaacgtatgatgcgttagcttcttcgcaaagtgcgcgaatgtcaagaatgtcttgagccttacgtacaaatgaagcaaagatgaagttaataccgtgcttcaaaccaaagcggatgtcgtcagtgtccttttcagtaatccctgggaggcggatttcaacacctggagcgttaacacccttctttgagccgatgacaccagtgttttgagcttcacaaaccaattcgcgcttttcttcgtccttggccttgatagtcaaaccaacagcaccgtcgtcgatcaatacagtgccgcctacgtgagtgtcgtcgaacagacctgggtaggtaacgtggatcatgtccttgttgccggccttggttgcgtccattgacacgcggatttcgtcaccagtgttgatagtgaacttgccgccttcttggtcagtggttctgatttcagcacccttggtgtccaaagcgatgcccaaaagcttgccagtcttcttttcaacttcacgaaccatgttcattcttgccaagtgttcttcgtggtcaccgtgtgagaagttgaagcggaatacgtttgcccctgcttcggctaacttggtaatagtttcaatatcgtttgaagctggccctaaagtactaacaatcttcgtttttttcatcttgaaaaaatctccctaaatcaaaaactataaaaataactatcttgataaatctgcgttgagctttaacaagtcatagtcacccttgtgagactcatcaaacaaatcaaggatgtcgtgtgaagtaaccttgccgttttcaatgccgacagccaggccgcccttgccttccaaaagaaggtgaacggcttcactgcccagcttggaagccagcacccggtcagaaacagttggcgtgccgccccgctgcatgtgacccaaaacattggcccggacgtcgaagtcaccatacttcttcagttcagccatgaattggtcagcggtcattacgccttcagcaacgactaccaaaccgtggtccttgccgctttcctgggattgcttgagccggttggcgatttcttcgacatcatatggtctttcaggaatgacgatcgcgtccgccccgcaggctacgccgacgcgcatagcgatgtcaccacagttgcggcccattacgttgacaatgaagacccggtggtggctggaagcagtgtcacggatcttgtcgatcgcgtccattgccgtcatgcaggccgtgtcatagccgatcgtggcatccgtgtaagggatgtcgttatcgatcgtgcctggcaggccaattgagttgaagccgtggcgggtcagctgcagggcgccatggtaggaaccatccccaccaataacgacaacagcatcgatgccgtgcttcttcaattgctcaataccagccagctgtccttcttcttctgcaaattcaggataacgcgcagagtagaggaaggtaccggaaacattgatcaagtgggctacgtcttcactttccaatgggaaaatgtcgcccgcaaccaaacctgcaaaaccgtatctgataccgaaaacttccaaaccgttcgcgatcgcgactctggttacggctcttacggctgcattcataccaggggcgtcaccgccgctagtcaaaataccaatccgtttcatgaattcacctcatcatgatttaaattgtgtaatatctcacatcacataaatcataacatttttcccgcataaagtcttgtaaaatctggtttaaattcgattttttcagactttcgacctgttagggcttacaaatcccagcctggcgtttattatttatttcactaggagagatttttttcaaaaaagcaaattggtcaagtcgttttcagcgcaaatttacctgcttcatgtcccaaattttgaagtccaggctctctctttggcctaaagcttccagcttgagcaggtagtagtcatttacctgtaaattcaaagttaatttggccagttccccggcaaaaagccagcacctgtagcggccggaagaatcagccagaatcaaggtcgccatcttccgtccccgcttgtcttcctggtagcggacagccaaaagcttggccagggcctggcccctttctttaacctggaagtcgcctaagcgcttggtccggtagtgctggtcaaaataacgctcaagagccaggtccttaggcttgacggtaaccggcttgacttcttcagcctgctcgagctgctttaagtccaaaaggcgcaaatcctgcaagatcagctggtagccccggctgtccttttggtcttcttttttgtcaacttgcaggaggtagacggcgttttctttcagaatttgggcaaagcggcggtactggctggtaaaaatggtcaccttctcgctggtctgtccgtcgctaaagacggcgttgctgcctaactcaccggcccgggctccccgcttgacccgccagtcgtttttcttaatgaactgggcaagcacctgcccggtctcgtttaaggcaagaccagcaaaaggcttggccccataacgcttggccagggccttgccggcaatttccaggggagatgccgttacggcaaagcccatggctctttcttccatagctaccttttctgctggcgtcggcattggcacgttttcttccttggcggccaaaaagtcctgcaagaccaggcttttttgcgacaagcgggcagtattgagcatgttgccgcagttgaccaaaagactggcccggttgggactgacctggtcaaagaggccggcttcgatcaaggggaccagctgcttttctttcaattccttggtatccagctgccgcaaaaaagccgggaagctggttactggccgttttagggccagaagctggtccaaaaaggccggcgtaatccccataatgtcctttaagcccaggtagatccggccttcaaacaagcgggcctctgcctggctcaagttgatgtcgggccccaggatctcaacgccggcctttctggcctggcggatgatggcccctttttccttgccccggctggccctgagcttttccaagtaaaactccctagggaaatggacggacaagaaggcctgccagtaggccaaaagggcataggcgacggcgtgggagtggttgaagccgtagttggcgaaaggctcgattaaggcgtagactgcctcggcggcttgccggctgtgtccctttctgacagcgccagcgacaaacttgcccttttcttcggctaagaggccagcctgctttttggaaatcgcgttccggaagacgtcagcctccgccaggctgaagcccgcgaaaatccgggctgtctgcatgacctgctcctggtagacgaaaataccataggtcggtcccaggacttcttttaagctggggtcaggatactgaaccgggctggtcccgtttttccgggcgacgtacaaggggatgctggcgatcgggcccggccggtaaagggccacggcgacggacaagtcgtcaaaagtccggggctggatttttcttaagacctcctgcatcccgctggaattaaactggaagatctgctgggtctccccgcgggcaaaaaggcgcaaggtatccggatcatccaggggcagccgggtcaaatccagggggccgctggacttttgaatctctgctaaaacgccttccaaaagttccaaattgtccagggtcagaaagtcgatctttaagagaccatacttttcaacgtactttttggtctgctcaaccgtccacagaggggcttctttcccagtcatcaagccgatctgcctggataggggctcttcactgatgaccaggccgggagcgtgggtgcccgtgtcttccggcagcccttccagccttgcggcggtttgataaagaaggcgggtcaagggactggcagcgaccagggccttaaattcagcctgctggccagcttcggccaaagttttggctgcccccatggcctgcttgaggcgggcgatagccggcagggttaagccaaagacctggccggtccgctcaaggacgcttttggccttcatggtcgtcaaggccaaaatccgggccaccaggtcagagccctcgccaaagcggactttagcaccgtatttttcctgcacgtaagcaaaagccagctttcgtccgctcgtggtaaagtccaggtcgatgtcgggcatgtcggcccgggcggggtttaagaagcgctcaaagagcaggtcgtattttaaggggtcaatttgggtaatgcctaaagcataggctaccaaggacccggcagctgacccccggcccgggccgaccagggcgcctctttgccggcagtaattgacgatgtcgccgacgatcaaaaagtagtcagcaaagcccatctgctggatgacggccagttccttttgcaagcgggcgtggtaaattccctgcctaaggcctaatttttccaggccggcaaaagccagcttttccaaatattggtcggaagaaagtcctgttgcttgcggaaagaccggcagctgtggctccttaaaaggaatcttagcctggcagctggccgcgatcttgccgctgttggccaaagcttcttctaagcccatttcccggcaggcatcttccaggacaggcgcgggccgcagccaatgtgacccctgcccctccgccatcaaggtcagttcatgctcatccaggacccgtctttccttaatggcctgcaggaccttgcaaagaaactggtcgcccgggtctaagtagcggacgtcctcaacaaccgtgatgggcaaggctgaaatttctgccagctttttgacataggcatcataagcggccgcggattcagccgggtaaacgcctaagtataagggcagaccttttggcaaaaaggcctggagctttttaacatattcctcaccactgttcctcagtttattaagctggcgcagttcgctggtcagcccggccggcacgatcacggtcaagtcagacaattcgggcaggtcagccaggctaggcgccgggccggcaaggtcgccagaagcgatatttaaaaagctggataggcgcatcaaggactggtagcctttttgactttgagccaaaaagaccaggtcatattctgcttcttccaattcgactcccttaaagcggccctgcaggcccaaaaggggcttgatccctgcttttacggcttcctggtaaaagtcggccaggccaaaagttacattgatgtccgtcagtgccacggcgctataaccccgctcttttgctccctggaccaggtcagccgttttcattgggctggccagaatggtattggccgaaatcgtctgcaatgctgctatgttcaccttgctcgccctgcctttcgctttttgctagttattttaattatagcaaagtcctttttccaccaattgaatttgcttgccgattctggtaaaatgcaaagcgaaagaaggaagatactatgggacgttacattatttgcatcgtctgggggatgatttttactttcatcatcggcttcatcggagcccctctgacccagagcacgtataaccctgttaccttgttgatcgtcggtgccgtatttggcctgctgttctctttgattattccaaagatcacggccaagtcatacaatgacgactccgcgtacagcaaataaaacagaagaccacagtggctagcctaaccggctagccctttttgttgtaattttttctatccacgggcaaaagatgctatgatttacctagtctaattttattaaggaagttgactaatgaaagataacctgatcgtttttaaagtaggaacctcctcgctgaccagcccggccggcgacctggatccggagaagatcaaaaaaattacccggcagctggcccagctgcaccaggccggctacaagctggtcctggtaacttcaggatccattgcggctggcttccgccgacttggctttgacaaacgacccaggaaggtggccgacaagcaggctgcggccgctgtcggccaggggctcttgatcgaggaatacacccgcagccttttggtccagggcgtggtttccgcccaggtcctcctgacccaggacgacttcgctgaccagcgccgctaccaaaatgcccagacagccttgaacgttcttttgagccggcgggtcatccccatcatcaacgaaaatgacaccatcgccatcgatgaactgaaagtcggtgacaacgacaccctgtcagcccaggtagcctcccttttaaaggctgacctcctggtccttttgacagatgtgcctggcctgtacagcgacaaccccagaaagaaccctgatgcccggccgatcccgatcatcaacgagattaccccgcaaatttttgcaatggccggcgggaccgggtccagcaatggaaccggcggcatggccaccaagatcaaagccgctgacatggcgaccaagtccggcgtcccggtcttcatctgttcagcagactccactgccctggttgacgccgttcaccagaagaaccaggggaccctttttacagccaacgaaaatgccttcaaccagaagaagcagtggctggccttctacgccccggccaaagcccgggtctacatcgaccacggagccgtccacgccatggccagggaaggctccagcctccttatttccgggatcaaacaggtccagggcaactttaagaaagatgacatcgtggaagtctacagcttgaagagcaagaagctgatcggcaagggcaaggcccgattctcccggcctgttcttgaagaaattctggagcaaaagcaccctgaaggcatcttcatccaccgtgacgactgggttaccaccctttgatttgagaaaggaaaaagaaaatatgactgaaagctcaactcagcaactgatggacagcctgctggcaaacaaggcggctgtcaacctggcgaatactgccgataagaacgaagccttggccttgatggctgacagcctgctggatcatgaagcggagatcattgctgccaaccagcttgacctggaaaaggccaaggggcagattcctgacgtcatgctggaccggctccgcctcaccccagaccgcttagccggcatggccagcggcatccgggccttgatcgacctgccagatccagtgggccgccttttaggcgagcacacggctgacaatggccttaagattgaaaagcggtccgtgccttttggcttgatagggatgatctatgaaagccggccaaacgtcacttctgacgtggcggccctggctcttaagtccggcaatgccgcccttttgcggtccggcaaggatgcttttaattctgctaacgccatcatgcaggccttaaaggcgggcttagccaaaagcaagatctccccaaaggtgattgaactggtgcaagacaccagccggcagtcttccaccgaaatgatgacggcccggggcaagatcgacctcttgatcccgcgtgggggcaagggcttgatcagagcggttgttgacaacgccaaagttccggtaattgaaaccgggaccgggatctgccatatctatgtcaacaaggccgctaatttggacgaggcagtcaagatcacggccaatgccaagatgagccgaccatcagtctgcaacgctgctgaagtctgcctggttgaccaggaagttgccgctgacttcctgccccgtttagctgcagcttttgccggcaaggttgagatgcgggctgacgaaagagccaaggaatttttgccagaagctaaagcagctggcccggacgacttcgacacggaatttttggactacattatggctatcaaggtcgtagacggaattgaagaagcgattgaccacatcgccaagcactcaacccaccacagcgaagccatcgtgactgaagaccaagcagccgctgaccgctttacccaagccgtcgactcagccgctgtttacgtcaacgcttctacccgctttaccgacgggggtgaattcggcctgggctgcgaactgggcatttccacccagaagatgcacgcccgggggccaatgggtttaaacgaacttaccagctacaagtacatcgtccgtggccagggccaggtcagagaatagcaaggagttttttatgaaagttggatttatcggtttaggcaacatgggaagcgcgatcgccagagcagttgccaagtgtgatgacgtcagcctgcttttgagcagccacaacccggaaaaagccggcaagctgcaggcggaaatcggcggccagctcttagacaacgcgcaagttgctgctgaaagcgacgtggtctttttaggcgtcaagccttaccaggtggccagcaccatcaaggaaattggtgaaaacagcaataacggcagcatctggatctccatggcgaccggggtcagcctggaaactttggccaagcttttgcccggccacgacctggtcagaatgatgcccaacaccccagtagccatcggccagggcatgaccagctacaccagccagagtagccaggccaaagatgtcttcaaggaattaatggctcactccggcaaggtcgtggaaatccaggaaggcttgatggatgccgctacggcagtagctggctgcggtccggccttcgtctaccagtttattgaagccctgggcgacgctggcgtgcaaaacggcctctcccgctcccaagccattgaaatggccgcccagacggttttgggctcagcccagatggtcctggcgaccggccagcacccggcccagctcagagatgccgtaacttcaccaggcggctcaaccattgccggcgtcgttgaactggagaagaatggtttccgctacgcggccatcagcgcagttaacgcggctcttaagcggaaccaggaattgggctaaagagctaataaatatgataacaaagaaatacccactgaagatttgctttccttcagtgggtattttttcgtaagtttaatggctggtttcgaccatgatataagaccgattgctgtagaggtttcttgaccgagaatattcaaggttgaccccggaattggtccagacgatctgctcgatttccagaatcggcgtgctttcgttggccccagggtactgccggtcatatttatctggcagatcagccttgatccggcggaagaccccgccaaacttgatatgcagcttcttgtgcaggtaagagtagatcgacccttccaagatccttttggacagggccggcacctggctgaccggcatataggtatgctcaatcaccagaggctcgtcgtccaaaaggcgtaagcggatgatctcataaaccgggtcattttcatccaggttcaatttctcgcacaagtcagctgacggaaaggctacttcaaacttgataatcttgctgctcacccggtcactgccgttttcagccgacaggccggcaaaagaattgacgggggagtcatgctggcccaaaaggatcaagttggacaagaccttggttcccaggcctgactccttatagacaaagccttcctgctccagcaagtccaaagcgctcttgaccgtaatcttgctaaccgaaaactcctaagcctatgtattaatagtatggcgtctattatttttagaaaaaattaaatattttcttacatcaaagcctgatcgtagatggcccgctggccgccgacatactttggccggcggcgggcacagatgattctggcctccccgatcttgtccagggaaattctcaggggaacgaccaccggatgcaggtgcatcccaatcaaggtaccgccaatgtcaatcccggcttccccccgggcagcaatgtcttctaccagtaccgcgtctggcattttctggtaggctacggtcgcgaaggccccgccggcatggtttggctggggaatggcgttgacctgctctaagtcatacttttccatcgcttcccggctgaccaccagggcccggttcaagtgctcgcagcactgggcggccaggaatatccgcttttgctccaaaacttcattgatcccctggtaaagggcttcagcaacatcagtgctggtattggtgccgatcgcctcacctaagacctcgcttgaagagcagccaaccacgaaaaactggccggccttgatcccggatgcctcgacaatttcactgacggcctgcttggcctgcttttgaatttctgctaaatccatctttttcctccaatcttgtttcttgctttgcttgctgcctttattgtaactcagtcagcagattctgctgcgagcataagcaaatctgttaaaatatagaaaaaataataaaaatttctgttcataattagtgaggtgttcattgccatgcacaaacaaagtctggccctcaaattttcttttgtctttgtcgttctttcaatggatatttccttgctcactgctgcctggcaattagcgcaaggcaagtccggtagcctgctcctggtccttgagaccggggctggcctgctcttggtccttttgccggcccttttgagcaagtggcttcgcttttacctgccggcttttttatactttttcttcctggcctttatctattgcgccatttacctgggagatgcctaccacttctactacatcccttactgggacaagttcctccacttgatcagcggggccctgctcttcggcctggcctgggccatcctgggctgcttcaagtttaaagaagagctgccagccggctttttgtgcctgtacggggtggcctttgccgtcttctgcggggtcctctgggaatgctatgagtttacctgtgacggtcttttcgccatgaacctgcagcgctacctgtcagcgggccgggctcttgccggccgggcggccttactggacaccatgggtgacttgatcgccgacctggccagcagcctcctcttcagctgctggagctactggcggctgaaaaacgaccgctcctggctcaaggccttctttttcaagaaatacagcccggacgactaggcaagcgtccgcctgaccgccgccagcaaggcctgctgggagaggtctttctttttcaaactgtctaatacatgccggtcaatcgttcccttcgtcaaaagatggtgaatgatgaccggctttttctgtccctgccggtaaaggcggccattcatctgctggtactgctccaggctccagggcagggtaaaccagatcagggtgtggcccccttcttgcaggttaaggcccgccccggcgctggctggctggaccagcataaccgggatcttgcccttgttccagcggcggatcatgccaggtgagccgtcaaaaagctcagccttgaccccgtttttccggtaaaaggctaaaaggcgggaggcgtctgacttgaaataataagcgaccaggctgggcgtagccgtattgctggttaagtagaagcagctttctattttttcagcaaaaatctcctggtaatgctccccgtcttcttcatagatggcaccgctggctagttgccgcaggcggccggctaaaacagccgcgttttcggcgctaatctcctggccaggcaggtccaggacctggtcttttttcagctgctggtagctctttttggcccttggaggcatttccacccagtccaggctctctgtcagttccggcaatttcagtcgggtatttttcatggagatgacgatatcgtcgatggcctggtagattttttcctcacttcctggcaaaagccgccacttgaccgggtggttgttgaccagcaaggtcggctcaaagtactgctgccggtaggccgtgatgctcctgcccagccgctctccctggtccaagaggtagatttgtgaccacaggtcctggagggaattaggcgccggggtcccggtcagttcaatcaggcgctggattctcccccgcacgctctttaaggccttgaagcgctgggaagccggtgacttgaatgactgggactcatcgattaccaggtttttaaagagccaggggccgaggtcaaccagcttgctgaccaggtcccggctggcaaaatacagctgccagtcacccttggcggccttggccgcggcagcttcatagagctcttgccggccggctggagtcagctggcggcctttttcatcggtcaaaaaggactgggtcttaaagggcaagttccacttatcaatctcatcttgccaggtcgacttagccacggtctttggggcgatcaccaaaatatgccccttcatcccctcttcccgcaatttagccagggcagccagggtcgtcaaggtcttgcccaagccgatatccaggaaaatcccgcagtaagggtggtccataataaagttcatgctgtagagctgatagtcatgcaggggcaaagtctgcccgcccaatttaacctgggcatcaaccattttcccggcaaaagactcagtcttttcttttgctccttttgcttttttagctcctttaactcctttaactccctttacttcttctgctttatttgcgtcatttggcttttgggcagccatgatcaccccatccagctgcaattgccaattgccatttctcccggcttggctgagagtcaaggtcaccactttcccggccgggacttcctggccaaaaatctgcttgagcctgccgccttcttctttggccagccagggcaggaccccttcggccgcctcaaaagaaacaattgctcccggcaaattcttttctaaatggccggcaaccagctcccagtctttcaaggtcacgaaagcatagggcttttggtggacaggcaggccggctaatttttccgctgcctgcacctgccgcaattcttcggctgaaacgaaggaagtcaaatggctcttaaccactttcccttgcacgcgcacattttctcctggcatactccacctccttaaatcgctgcttttattatgccacaagggcatgaaaaaaaggcctggcggcctttttcttcgttattcgttactaatagaagcggtagtacttcttcgtgtcgaccttgacctctccttgagtcaggtattcgctgaacatctggacatagtccttgtccaaggagaattcgatcttgtccaagctgtattccgggtagaaaccgcccccgttggcccggtagttgttgacggccaggtggtagacctggtcatcttgaatatcctggcccttgaacttcagcttggtcaaacgctggccgaccggcttggagaggtcagcctcgtattccagtgggtaaaagacgtcaaagtggtaaagttccggctttggcttgaggtagcggtcgataaagtggatcttgccgttttcgtctttttccaaaaagctggccgtgtgctctacaatgtgacggagctgcttaccagtcaatttgacgctgaccaattggttggcatatgggtagttcaaaagaatgtcccgcatggttaccgtcttgccaaaacccttggccacgtcattcatcacagccgtggctgaaaggtcagcgtgggtgaagtagagctgcatctgctggagcaggttgatgaaaggtgctccttcaatccggcccttgttggcatcttcaatcggggctggctggtccaggtgggcaattggctggtcaagccatttctgggtggctagatcgagcggcttaactatttcttcaacttccgggtctgatgcaaagtccttggtgtcgatcaattcgctagtcgcttctttgaccttgtagcctgcttccgtcttttccaggtccaaaacgacttccgcaatcgcctcgccccggtagcccggctgcacgcaaggcttgccggacgggctgatcatgttcagtctccgatgctggtggcccgtcagcatgacgtcgacttccgggatctcagtcagaatccggtagccttcgttttccccgttgtgcggttcagttgcttccccgctggcgatgtcactttcaaagccgccgtggtaaaggacgcccaggacatcgacttgcggcttgatgatcttggcaaaatgagcgatctgttcgtaagcagacttaaaggccaggcccttgatccggtcagctgcttcccagtgagggatgtactgggtggtaatccccaaaacgccaaccttgaccccacttctttccaggatcacgtagtcccggcccagagtcggcacctgggtttcggcatccaaaatattgcagttaacgaatggagccttgttgttgtccacataataggccatgtattcctggccaaagttaaagtcatggttgcccaggcagcggacgtcgtagccgaccgcgttgtaagcagcagtaaagcgggccaggttgtccagattcttgctgccatgggtgtaagcagccaaaggagacccctgcaggcagtcgccggcatcagtcacgatgacgtggtctgccccccacttggccttctccgccttgatagcgctggctacccggctaaggccgtaaggagcgtcgtagtcgcccgtgctctggtagtcagttggcagcaagtagccgtgggtgtcgcttgaatgtaaaaaaaccagtttcattcttcgaattcctcaatcctaatttttggcataaaaaaagacaccagaaaaacaggtgccttttaaattagtcgttatcgctagcgctgttttcgctgactacttgacgacccttgtagtaacccttaggggaaacacggtggctcaaacggtattcaccagtagttgcgtcgtagtgcattgctggcacgctgagcttcaagtgagcgcgacgtgaacgtttcttttgcttagaagtatgtcttgcaggaactgccatttataactgatctcctttattgtaatatcacagtatcaggtcggtgacctaaatactcaagtaattaaataatactattgcctggcaaataaatcaagaaaaaccttactttatttatttgcgggaggcaaattcaagcgacaatttgtccccgatccccgggaacaagttgtacaatttggccaaagccgccaggctgaccgggaggttgagctcacgcttgtttgaaccgaagtagtggactacttcccaggcaacgtcgtccgggtcaagcatgaaggcctggacattcttgacgtactggccgcttgcgtcggcaatgttgaagaagttggtgtaaaccggacccgggttgacggtcatgaccttgacgccaaaaggcttgagttcaaggcgcagaacgttggagaactggattacggctgccttggcggcgctgtaagccgctgacttggtcgtcggcaccttgccggccatggagccaaagttgatgatctgcccgctgccctgctccagcatcaggcggccaaaaagccgggtcatgtacatcaagcccaggacgtcaacttggaacatttccgtggcgtcttgcatgtcagcttccatgaattcctcaaacttgccgaaaccagccgcgttgaccaggtagtcgatgtgcttgaccttttccttaacttcggcaaaagccgcttcgatgtcgctggccaggcccaggtcagccttgacggcgaaagctgctgaagcagacaattcccgggcttcagcagcgatttcctccagcttgtccaggcggcgggccagcaaaacaaccgtggcgccccggctggcgctttccagggcaattgaccggccgatcccgctactggccccggtaataactacaactttattgcgtaatgaatcactcatctttatcacgttaacctttcattggaactacgaacttgtccaggtccttggccaaagtcgtggccgggaagatctcccgcgcctgtttgaccatctggctggccagagggcccacgtagcgggccgaaacatgagtcaggtataaatgcccgacatggcaggcgctagccgtctcagcggcttgtgtgcacgttgagtggtaatagtccctggccagcttaccttcgctggcgtcaaaggtcgcttcatggaccaagacatcagcatggtcagccaggcggcggattgacggcgttgaccgggtgtcgtaaatcacggtcactacccgccccttcttggccgggcctaagaaatccttgccgttcaacaccgtgccgtcagccagttcaacctgctcacccctctttagtttaccaaggagcgggccgtttggcactttaaattccgccaatttgtccatcaaaagctcaccggccttgtcagcttcaaccacccggaagccccagctgtcgatccggtggtccagcttttcagtataaacctcaaagccccgctcactgacgatcttgccgccttcttccagggtgacgaatttgattggataagaaatcttcgcttttgaaatcctgagagaggtcttgacgaactgttcaatccctgctggcccgtaaatggtcaaggggccgacgtcgccttgaaaggacctggttgacaagaggcccggcagaccgaaaatgtggtcgccgtgattgtgtgagataaaaatcttcgtgattttgcgcaggcggatattggtgcgcagaatctggtgctgggttgcttccccgcagtcaaagagccaaatctcgttcagctcatccaatagttttaaagccaggctcgaaacattccgtagctttgacggctggcccgagcaggtgccaagaaattccagttccatttaactcccattcttttccaaacaagtataaaaaggctaattcgatccgctggcgcggaccatttctttgacgatataagtgctgtagtagttttgccccacattattcgggtgggtcttgtcgtcgtaaaaccagctggactggccgtgggcgtagccgtaccagtcaatgacggtcaagttcttgtacttcttggtcaaggcctgcagctgctggttgacctggttttgccaggaccgggttggcacgacgacgttgatccaaaagagctggcgcttcggcccgacaatctgcatgatttgcttgacttcgtcatcagtaaaaggcccgttggtccccaggccaatcaagacattgtcctgcagctcacctttttgggcataagactgcagcagctggggggccacgttggcctgccgggaaaccgtggcgtcgatcacggcgtgcggcaaaagctggtgcaagatgtcacttgaagaagccatgaccgagtcgccaatggccgtcacctgcagcttttgcgcggcttgcaagtcagcctggctgatcccgtacttctcaaattcctggttgaccttttttccgctgctcttagacttagtcgtttttgacttggtcttggccttggaagtctgcttgctcttcttgctggatgacttcttagccgcttttcgcgagctcttgatcgattccagggccttcttgttcatcttagcctgctgcttggagttgtcattgatcgtcttgatcaaagccccatccttgttgtcagccttggccagcggggagaagatgatcccgctgctgccgatcaaaaagaccaggaagaaggccgccgtcttcagccagtttttggacaacttgactggccactgaaaaagcttggtcaagttgtagcggatgccttcgctggtgtagcgtcttttttcaaaaagacggtaagtaatttcactgatcaagaggatcaagacaatctcggtcacccggtaaagagtcacatggtcggccaggtcactgacccggctttcgaaaaagatcataaccgggaactggtagaggtagatttcataacttcttgaccccagccagttaaagaccgggttggtcatcagccggttccagattccgaccggagccgcgattaccgctgcgaaaaccgtcacgaagaagctgaagatgaacatcccaccataatatgggaaagcggtctgagcgttcatcaaaggcgagaacatgagcaaaagcatcccaaacagggtcgccagccccgtccagttgagaatcaccccgtctttttgggtaaagcggttgtccagctcttcaaaaggccagagaactgccatggcgctgcccaggcccaaagagaagaagcgggtgtcagtcccgtagtaaatccggcttgtatcctggcccggccggaaaagcagggccatttccagagcggacaagaccgacaggcccaccagaacccagaagatattcctccgctttttggcaaatttgaccaagagggccatcaccagcggccagagcaggtagaactgccagtcaatcgctatcgtccacaagtgggtaaaaggcgattcattattggcaaaacgctcaaagtaactctgcccgttgaatatctgccaccagttatatacccccagcaagttgctggcgacaatctggtaaagcttgtttaaaaggttgcgctgaaagagcacgatatatgcgctggtcagccagagcatggcgatcagcgggggataaagacgcttgaagcggcgctggtaaaaggacttgatgtcaaaatagccctgattgcggtaggcagccataatctggttggttaccagataaccggtcaaaaccagaaagaccggcacgcccaggtaacctccgccaaagtggtccggatccaggtgatacaaaattaccccgattacggccagggcccgcaagccagcatagccagtaatatatcgtttcttcattttttcaattttctaactttcgtttctctattctatttttgcaatctatcccttattgcacgaattcaaagctgaagtcgccaatgtaaacgtcgtctccatcgacagcgccttgcgcccgcagttcatcatcgacacccatcttcttcaagcggcgggccaggcgcatgatcccgtcctggtggtccaggttggtcatggctaccaggcgttcaagctgctcaccgtgaatttcaaattcgtggtcagccagcttttcaaccgtgaattccatcttttcaggccggtggtacttgtaggtcttagtcttgacctcttccttgggcttaacggcagcttcagcctcttgggcctcaacctcgctgaccaggtcagccgcccgactcatcaagcggtcaacgccctggtgggtaacgctggagagttcgtaaacttcctggtcaaccccatgcgcggccaggtccttcttaaactgggccagtttctcatcggcgcctggaatatccatctggctggccacgatgatttcccgcttgctggaaaggtcatcttccgtgtatgaggccagttcgtgcaagatggtctcatagtcctcgtaggcatcccggccgttgttcgggtccatggacaccatatgcaggataaccttggttctctccacgtggcgcaggaactggatccccagccctaccccctggctggcccccttgatcaggcccggcaggtcggccatggagaagtcccggccgtctggcaaaagaaccatgcctaggtttggcttcaaagtcgtaaactgataagccgcgatctttggcttggcactggtgacgactgacaaaagggttgacttgccgacagacgggaagccgaccaaaccgacgtcagccaggacctttaattccaaacgcagggtccggaattcacccggttccccgttttcagcgatttccggcgccgtattgacgctggtggcaaagtggatgttgccccggccgccccggccgcctttagcgacgaccagttcctggccattttcaaccaagtcaccgatttcttcaccggtgaaaaagtcataaacggtcgtgccgaccggcaccttcaggtacaggtctttggctgccttgccgtattgggccttgatgcggccgttttcgcccggctcagccttgaacttgcgccggtagcggaaatccatcaaggttctgaggccgttatcggccacgaagataatggacccgccccggccgccgtcaccgccagctggtcccccgttaggcatgaatttttcatggcggaaggccaccatgccgtccccgccctttccggcttggacttcaattttagtttgatcaacaaatgttgaaggagttggcattcttgtttttaccttttctttctttcgttaattgttaccatttaatcataagctattttgcccaatagctaaagggaaattttgactgcctgcgcctgggttaaagtcagtcccgccttgcgcagatcatcaatagaagcttccttgatcttctttaaagagccaaattcccgcaaaagcttggtccggctcttcggcccgatacctttgatcgagtccagccggctgaccagggagtttttcgcatgggtctgccggtggaaagtgatggcaaagcggtggacctcatcttgaatccgggtcattaagtaaaagccttctgacttcggatccattggaatcagcttgaaaggctggcccttaaacgggtcaccgtacaagaggtggttggtccggtgcttgtcatctttaaccatccccgctaccggaatatccaggttcagctcgtttcttaagacgtcctcgcaggcttccacctggatctgtcccccgtccatcaagatcaggtccggcattctttcatgctcttttaacagccggctgtagcggcggcggacgacttcccgggtgttgccgacttcatcggcgctgttttggtgctcaacttcccccttcagcttgaacttccggtagccggtcttaaagggttctccgtctttaaagacaaccagggccgaaaccgggtctgccccttgaatatgggagtggtcaaaactttcaatgtatgacccgtaaggcagacccagggccttgaaaatttcttcctgggcccctttagtcttgcgctggccgagctccagcaggcggaatttgtcatccagcttcagctgggcattttcccgggccatctccatcaaagaagccttctgccccctttgcggggtccggaccttaatgccgatggccgcggccagttcatcctggtcgatgccttttggcaccaggacttcccttggcttgacccggttcttttgggcgtagaactgggcaataaaggacatgaattcgtcttctgggtcagtttcatcagtcaaagggaacatgtgcgactcccgccgcaagagcttggcctgccgcaaaaagaagacctggatggaaatccaggaccggtccacgtaatagttgaagatgtctctttgggtatggtcattagagatgatcttctgcttttcaaccgtttcttcaatatacttgagctggtcccggagttccccggctctttcaaattccaggtcagctgaagcttgcagcatcttattggtcaagtctttcttgacctcctggatgtccccgttcaaaaagcgcttgatcttcttgatctgctcgtcatattcgctttgccgcacttccttaaagcagctgcccaggcactggcccatatggtagtaaaggcagggccggccggtatagccgctgcagcggcgtaaagggaagaccttctggatgaattttaaagtcgcgctagccgcgtagacgttggggtaagggccaaaatagtagcccttgtccttgtagacgatcgaggtcaggcgggtctggggatttttctcattcgtgatttcgatatagggatagcccgtccccgacttcagagccacattgtaataaggctggtactttttgattagggtgacttccagcaaaaaggcttccttgtcagaatccaccacgatgatgtcataatcggcaatattcttgaccagctcggcccggcggccctcctggctgctcttgaagtaggaccggacccggtttttcaagtttttggacttgccaacatagatgaccttgccgttgacgtccttcatcagataacagccggccttttccggcagcaatttcaatttgttttcaatcaattgactcgccatgtctgcctccccgcgatcatttaccgtacgattttatcacgaaaagtattattctaacaccgatccgcctataatcgcaaaaatattttaatgattttccatgaccaaaccggggcaaaataaggtcctcttgacaataatccttttatagctagtcttgttctacttttagtccaaaataaacttttttctcggaaaatggctgccttttgtccctgcatcacgtataataatattgttacgactataggatttaggaaggtaagatttcatgaagaacttctacttgaaccatgacagcaacatggatgactttacttcacttttgctcatgcttttggcaccagacatcaagctgatcggggtcggggtaaccgacgccgacggctacgttgaaccaggcgtttccgcttcccggaagctgatcgaccgcttcaaccagcgcggcgacaagctggaagtggccaagtccgactcccgggcagtccaccagttcccggaagcctggagagtgtcagctttttccgtggaccacttcccgatcttgaatgaaaaaggcacggttgaaacgccagttgccgcaaagccagcccacttggacatgatcgacaagatccatgctgctgacggcccggttaccctggtctttaccggtccgcttactgacttggctcgggccctggaaattgacccaagcatccaagacaagatcgaggaactttactggatgggcgggtctttgaacgcccacggtaacgtttatgccccatgcgctgacgggacccaggaatggaatgcctggtgggacccggaagcctgcaagacggtctgggactccaagatcaagatccagcaggtcggcctggaatcaaccgaagaactgcctctgaccgatgaaatgcgccagcactttgcatccaaccgcaagtacccggcctttgaattcctgggctatgtctacgccctggtcaactcctttgaagtcgactcaacttactacctctgggacgttttgaccaccatgagcgccctttacccggaaatcgccacgacccgtgacaccaagtctgacgtctacactgacggcgaccgggctgcccgcttctttgaaactgaaaatggccggccaatgaccctggttacttccgctaactacgacaagttctgggaacgctttgacgacctgtgcgaaaaggccaagcttttctaaaaaataaagcagtaataacgattaaaaccttcagaagatttccttctgaaggttttttatccatattttttgattacggccagcatggcctttccatagttggccagtttggcatccccgaccccgctacactggagcagctcttccggcgtttgcggcttcctggctgccatatcccgcaaagacaagtcggaaaagatgacaaatggcggcactccccgcttttgggccaggatccggcgagcctttctgagctcttcaaagaggacctggtcaccgcctgtttcagtaagctgctcgcttttgacttcctggcgccttttgactctggccttgccgtccaaaacgtcccagccccggttggttacatggaccaagggatagcggtcccccaccagctgcaggtagtcctttgaaaccaagtagtcgaccaggctgcttacatcagcctgcttttttcccttgagcaggccgtagtggacacactcatcagccctgatctcactgatcttcttgactttggacccagtcacggcctgggcaacgatttttttgccatagcggccgtctaagtcatagaccatgccgataatagcctgggcttcggccgtcacgtcctggaagtcgccgctgtttaagcagttgctgcacttgccgcagggcgggcagtcctggccaaagtagcggacgataaattgctgcaggcactcatctgtattggcatagtcgctgatcgtctgcagcttttggtactggacctgccggtaggactcatcagcttcagaattgtcgataaaccagcggaactggcgaagatcactggggtgaaaaagcatcacggcctcactctccagaccgtcacggcccgcccggccggcttcctggtaataggcctccaggtttttggcgctgtttgcgtgcaggacaaagcggacattgctcttgtcgatccccatgccaaaagcattcgtagccacgatcaagggaatccggtcatactggaagtcgtcttggacctgggcccgtttctcattggatatcccggcgtggtaggcggcaacgttaaagccctcccggcgcaaaaattcggtcagcccctccacctttttccgggtgttggaataaataatgcccgcctcaccccggtgctgcttcaagtagttgacgatataggcccggctgtttttcggcgcgttgaccagcttgaagtggagattttttctttcaaaactggtgatgacgaaattctcctcggaaatgtccaactgctggccgatgtcctccctgaccgccttagtggccgtagctgtgagggccagaacattgggatgggtatggagggcattgatcccgtcctttagcttccggtaggccggccggaagtcatgcccccactgggaaatgcagtgggcttcatcgatggcgaccaggttgacctccaaaaagttgagctggtagcggaaatagtccatctccatccgttccggcgtcacgtagagcagcttgattttcccttcatagcaggctcttaagatgggattgacgtcttcctgggctgtggagctgttaagtgccgctgccggtatcccgtactcgcgcaggctgtcaacctggtccttcatcaaggagatcaagggtgagatcaccacagtcgtaccgggaatcatcaaggccgggatctggtagcaaagcgacttcccgcccccggtcggcataactgccaggacatttttcccctggaaaactttttcaataatttctctttggcccggccggaaactgtcatagccaaaatacttctttaagacctgctgtggatcaagcaagctctctaccccctttaattcgctttacagtagctaacacttaatgataacaaaaaaagatgcaaaagcatcttttagttgacccggttgaccggcactccgtcgaccaggaaggagacaatattatggctggcttctttcaagacactgcgccgggactcccgggtggcgctgccggcatgcggggtcaaaatcacattgtccagctggcagaattcctcgttgaagtccggttcttcttcaaacacgtccaggcccgccccggcaatccgcttgccctttaaggcccgcaaaagcgccgcttcatcgaccaggctgccccgggaagtattgatcaaaaaggccgtcggctgcatcatgctcaaggctgcttcatcaatcacgtggtaggtttccgccgtggccggagcgttcaagctgacatagtcggcctggctgagcaggtcggccaagggcacgtagctgactcccagggcccgctcttcatcttccggcaattggtgacggttgtggtagagaatgttcatcccgaaggtccgggcatagctggccagggtcttgccgattctccccatgccgaagatccccagggtcttgccgaccgggctctgcccctggttttcgagcaagcctgtgtccaaaaacttcccttgccgcatctcttgattgtagagggccaatttccggctgagagccaaaaggagggtaaaggccatttccgccgtcggctgcatgacgctggccgggcagttggagacgatgatcccctggctgctggcatagtccacgtcgatatggtcatagccaactccggtcgcggaaacgatcttgagctttttgcccgcgtccaaaagttcctggtcaactggcagcttgccggtgatcagggcatcaaaatcccctaggttagccaggtaccagtccttgccggcacctgccggagcaaaggtcacttcacatactttttccaattcgggcagctgcttgaccgccaggcccgccaccaaaactttcgcattttccatcttaagcatcttcctcaaacagcggatcgcggctggcccttaaagccgccacgtggtctgccttgaaataaattcttttcgcgttgccataataaacatcagccagttccgcttctgaaaaaatccctgcgtcttccagccaggaataaagctggccgtaatcattgaaagtggctgaccagggcgcgtcgctaccccataagagccttttggcccccacgatttccttggccaggcccaccgcttcctggcagaaggggtaaggataagtctgctcacccgcgatgtcttgcagggcggccaggtcaaagctgatattcggcaaaggagcaaaaagagccaggtctttttccagcaagtccaacttgccaggctttgggaaggacaaatggcagaggacaaagtccaaatctggataacgcttagccagccgggccaaggaccggggctggtggctggcctggctgctgtcgccgtagtccacggccaccgcgaagcctgggtaagaactgagatagtccaaaattttgcccaagcggtcgtcttctgccaagtcaaaaggcaaatggtagcccataaggccgccggcctggctgacttccagtttcaaagcccgaaagcccaggtcttcaacatggcgcttgacgattttttccgcttcgctggcaaagggatcaacggaaaaagccggggcaaagcggtccggggcggccttggctgcctgccagctgtaataattttgaaagccatacaggcttccctgcaaaaggacggccttggccacatcatggtcttccattactttcctggcggcgtctgctcgaaaagcgtcatcaccccagccggcgggaaagaggcgggtcttaaagccgctgtcccagacaaccaggccatttcccaaggcattgctgcggccattgcccttgtagctggctaggtcccgcaccaggtgcaggtgggcatcaattttcttcattattcgtcttccaatctttttcgcgaaactcttacccttattatagtgaaagcggttcattttagcaaaagtttcagaaaaaaataaaaggtctttcaccaggtaaaaggcctcttacttcatttcttttaattcttcttttctgccagcctagccaaagtcagttcgagcaagcggtcagccacggcctgcttgctcatccgcggccaagggtccagctccttgccttgttccaggatcgttacctggtcctcgtcgccgccaaaggcatccccgctgacgtcattggccacgatcaagtcagcgcctttctctgccagcttccggctggcattggccagaaggtcattagtttcagccgcaaagccgatgaccacttggtccggccttttcttttgggccattgtctttaacaggtccggattcttgaccagctgcagggtcatttcctctaccccggcctgcttcttcagcttgtggtcagcggcttcctttggccgccagtcgctgacggctgccgccatcaacagggcatcagcagccgggaaaagttcttccagcttctccagcatggcctgggccgacagggcgggatggaggtgaatccgggcatcccttggcagggaaactgagacgttgccgtaaatcaagtccacctcggcccctcttttggccgcggcctctgccaagcggaagcccatcttgccgcttgaccggttgccgataaagcggaccgggtcaatagcttccaggttgccccccgcagtgacgacaattcgcttgcctttggctggcaagtcaaactggtcattaacccaggccaggatctcttcagcttccggcatccggcccttgccggcatagccttcagccagtcggcccacggccggttccatgatccggtcgccgccctcctttaacaagcggagattgcgctgtacagcaggattttcccacatatggctattcattgccggcacgatcaagcgcgggcagtgcaaggccaaaagggtggttgaaacggcatcatccccgatcccctgggccagcttggccaagatattggcatcagccggcacgaccagggccagctggctccagtcagccaagtcgatatgggcgatttccgcctgccggcctggactgaacaagtcgtctaaaaccggccatttcgttaaggccgccaaagttgccggaccaacaaaacgttcactcttggccgtcatcgctacccggacttcatggcccgccttctgcaggccccggacaacgctcacggccttataggcagctatgccgccagtcatatagaccgaaattcttgccattatcgctcgccttagtagattttgcgttccttaacgatggcttgtgcccagtccgcgaagctggcagctgcttcagcgtccttcaagataaccaaaagagtatcagtcccggcgatcgtgccgaccacgtcatcgttgtcaatatcgtcaattaatcctgccaaaattggcgcgtaagtcaatttcatgctggtttgaatgacaacggtaaactgaacggcagttacagttgccacccgttcgcggattgcgtctttcagctgcctttcccggttaacagcagctgatggcgccttgacgtagtagctgcggccgtcatcatctggcaccttgctgatgtgcaaggcgtgaatgtcccgggaaatagtagcctgggtcgcgttcgcgccatgggcttgcaacaagagcagcaattgttcctgggtttcaatcttgttggtctgaatcagttcgtaaatcagctgtcttctttctttgtagttcataattattgccccttaatattatatttaagcgttttagatacctttaattttaacgcacttttatatttcaataaagctgttatttaattcttcttgaattatccgactttcttcgatcaatttttctgcaattatcccaaacaacattgacttagccaataaaaaatgccttgaagcaagttcaaggcatttaatatcatttatgtaaaatgaaaaactacatttcgtctggtgccttgacgtccagcaagtccagggctgacttgatgacgtggctgaccgcttggacaacggccaaacgagccttcttgacatcttcgtcaacgtcatcaaccaaaattctggtgtgagcgtagtacttgttgaagcgcttggccaattccagggcgtacttggcaattgcgcttgggtcgtaggtttccatggccttttggatggtgtcggcgtagcggcccatgaaggagaccaggtcccattcttcagcgccgatcttggtcaagtcagcgtctgagaaatcggtaatgccgctctttctcaagaggctttcgccacgggcccgggagtattgcacgtaagggccggtttcaccttcgaacttaacgacttcttccaggttgaagtcgattgggttgcggcggtagttcttcaagtcgtggaagacaaccgcgccgataccgacttgcttggcaacttcgtcagcgttcttcaagccgacgttcttttcagaaatctgcttgcgggccaggtcaactgattcgttcaaaacgtcttccaggttaacgacgttaccctttctggtagacatcttctggccgttgatgctcatcagaccgaagctgatgtgaacaatgtcgtcagcccagtcaaagcccatttccttcaagcaggcacgcagctgctggaagtagacttcctgttcctggccgacaacgtagatggacttgtagaagccataagtcttcttccggtacatggcagttgctaggtcacgggtgatgtaagttgaagtcccgttactcttgataaccatcaaaggcggcaggttgtacttttcaaggtcgacgatttcagcaccttggctcttaaccaagagacccttttcccgcaggatttggattggttcatccatcatttgggcactgaaggcttcaccagtgaaggagtcgaagtgaacgtccagcatgtcataaaccttcttgaaccgttccagggaaacttctctgaaccagctccacaagcgcttggcttcttcatcgccgtgttccagcttggagaaccattcccggccgtcttcatcgtattccgggtgttcttcagcttcccggttgattctgacatagtaagacaaaagggtgttgattgggtccttttcgatgtcggcgtcgttgccccacatcttgtaggcagccatcatcttcccgaattgggtgccccagtcacccaggtagtcgattctgatcggcttgaagccttccttggccagaatgcgggcaatagcttcaccgatcatggttgaccgcaggtgacccatccccattggcttggcaatgttaggtgatgagtattcagttgaaacgttccggccgtggcccaggtcacgggcaccgtagttttcagggtcagccaggatttcctgcaagatggccgccccggtctggctcttgtccaggaagaagttgatgtatgggccaactgcttccaccttttcaaagctgccttggtcgatcttctcagccagttcagccgcgatcaggtttggcgccttgcgcatggtcttggctaaagtaaaggttggaaaagcgtaatcccccagcttttcgtcctttggccgttcaatcttgacatcaatgtcatccagtgaccagtcaggcaaaaccgcctgtaaagcttctgcaacaagttgtttaccgttcataaaataccttctttatttcctatgtctaaaaaattgaataaaaattactcagcgcccgcttgccccatcgctgatgcaaattttagttcatgcttcctattaatctcatggagtgtgacaaaacgctttgtagtctcatttatttttactctgtatattatagcaagagattagaggctatgacaacagactttaacaatttcattatactatttatacagactgcatgcattctatgcgttttccgcttccatcgtcaagcgcccgcccggatactggcgtctgatcagttcatgcacgttcttgatcatctgtctgcttgaaggagccagccgttgctggtttgaggttaccagggcgatcttccggtaaaagggagtgctgaaaggcaggattctgacttccccctgcatcttctgcagggccaaagccggcaggatccccagccccaggcccgcttccaccatagccacgattgactggtcgtcgatggaaaagcgaatagccgttgacttaattgagtagtgatcaagcgcggccttggtatccaggtcgtagtcgctttgctggaggatgaagttgcagttgaccaggtcttcctcactgatgctgtggccgtttttgacctggaagtctttgggggcaatgcagtagatttcgtcttccaggattttttcgcagctgatcccctgctcattttccggcaacatggtcaggcccaggtccagctggccacttttcacagcctgggtaatttcactgaagccagcctggcggacggaaatcttgaccttggggtaatttttagcaaaattccggattaaaggcggcagccagttgatgcaggccgaagagaaagccccgatccggatcaaaccggtgtccaggccctggatctgctgggcgacctgctccagccggctctggtcattgatgatttcctggatcaagggaaggattttctctccatccggggtcagtttaaccccgtttcttgacctgacaaagaccggaaagcctagttcggtttccagctggttgaccgagtggctgatggccgacggggtcacgttcaagactacggcagccttgttgaaggttccctggtcgatcactgtctggaagactagatatggaaatggcagcatttgcccctcctaacatgaaaatatttcacttaaaatcaaaaaagttgagttttattattcttactccagcaattataatatagtcaacgcggaactgacaatattaatttaggagcaaagaaaaatgttaagcaagctttttgccaaaagaatcaaaactcaaaatccatcccgcctgcaagggctcttcccggaaagcaatttttccgacaacatctcctttgggggcggctgcccggacgaaagcctcttcccaagccaagctttgcaagctgcttaccagaaggccgttgaccaggaacaggcccactctttccaataccacggcgttaaggggccgggcaacttgcgcgactacctggcaaaccgggcaaggcagcagggaatcaaggctaacgctgacgacatcctgctgacggctggcggccagcaagggatcgacctggtagccaagcttttcctgggggcaggcgacgaaatggccgttgaagcaccaagctatgtcggcgccctggctgcttttgacaattacgaaccagtctaccatgaaattcctttggaagacgacggggtcaacctggactactttgaagaagtgctgaaagagcacccggaaatcaaactcttctacacggtgccagacttccacaatccaaccgggatcaccatgtccctgaccaagcgccagcgcctggttgacctggccaaccgctacgacttcgtcatcttggaagacaccccttaccgggacctgtgctatcatggggaaagcctgccaagcatcaagagctttgacacggaaggcagagtgattttcctgtccaccttctctaagattctttccccagccttccgtttaggctggctggtagctggtccggaaatcaaggaacagctggtcaacctgaaattgtcagctgacctggaagtgccatacttagctgctggtaccgtagctgcctaccttgcagacaatgacctggaccagcatattgatcagttgaagcaggtctaccgggtcaagctggatgctatggctaaagccttaaagacttacctgccagctgatgccaagatcagccagccggaaggcggcttcttcttctgggttgaactggacgatgaaattgataccagacagcttttgcttaatgaagccgtgccaaaagagcacctcatctacgtgccttcggctagcttctatcctaactgggacaagaataacggcctccgggtcagcttcaccggctctagcctcagccagatcgatgaaggagctgagcgcttaggcagaatcctcagcccggtccagctgaaaatgtcaatatagataaagtaaatactatttgcaaccgtccaagacttgggcggctttttgcggctaactatctgtcaatctattgtaggctattttctggctaaaaagcaatttctattcttttaatcttcctctaattttcatttaaaaaataagatccaccaggccggctttgattcggaagaagtacagcaggttttctttgaaactgccaaggaaatcctggcctctaagccagctgacatggacatcaccctgcatttctgccagggcaacctgcggtcaaagaaattctatgacgccaaatatgatggcctggtcgacaccatcttccagctacccttcagcggcttcttcatggaattcgatgatgaaaaatactgtaacttctcacttttagaaaagaggcaggggcaaaagatcgtgcttggcttggtcaacacccagtcagacgagttggaagacaaggaagtcttgcttaagcgcctggaggaagccaataagcacgttgatccaaagcagatctgcattgctacccaatacgtttttgcctcaacagaagccggcaatttaatcagcgaagaaggacagtggcgtaagctcgacctggttcatgaactggccgaaagtcttaatgcctaatatgctctcaagccctcctaaatggagggctttttacttggtaagaagaagaaagagagaaaacaaaaagagccagacttccatctgactcttgattcgcgcggcagcttcctatcctcgcaggcagtttcccaccaactactttcggcgttaagaagcttaactactgtgttcggcatgggaacaggtgtatccttc

SEQ ID NO: 2179 - DNA, 12437 bp, Unknown
  gut microbiota DNA sequence
ctcttatctgctatgttgttgtagcatacgatgaagtagaaattagtggtgtcaaataagattgcatttttgaagcggtcaattctggtatcagaataaagaacctttaaacttggggtattagaggtctcagttgtgtttcccgggataagaataagttgtacgttgttaggaatgtttctcgcaactttaaacgatgttattgcgggcatccagaaaaaagagagaaagcagaaaatatcgaaaagtttcgggccaagatcagcgtctgaaaaaagtgtgatagctacgataatacaaatgaaaatgtaaattagatgccctaatattctttgccatttttttacgttatataaagaaataagactgtaaaggtgcagcaaataaaagcatttaaacttatcccagaatgttagcttgctagtaaaggttatgctattagtagtatccataattacctcttgaaaaattaatttatgttttgattttagcacattctatcaagaactgaggtgaaaagcatataagtgtatatccagaattaattgcgtttgccatctggctcgctagcctcgccttgttaactatcttaaggcgaatccatgtaaagaaccgaaagctagagcaattcgttgctatagtagagcaagttcttgccgactacgttgctctttaccgccggattggcttttctaatcaggaaaagcagaacatcgtgaattcgattgcggctattttgaaggaaaagggtttcaagctctctagtgaagatgtggcgcaaatcgagaaaattgttgacagtaaattgctagataaagtcgaatagaaagcaaaacgcagagcacctcgatgctctgcgtcttttattcattaatcatcttcaccgcgccagccggcgatatcccatggagtgaagtcgtagtccagtttcttatggtagcagtcttcaaaagcctgtaccttcaaggcatagtccttttccatcaagtccgtcgcgttaaagttcaccgacttggttgggtccggatacagcacctccaaaatgtgcagggtatagcgtgtttggtaaaagtgctcgttatctttttcaacgtctggcaggtcttgaatctccacaaaagttgaaataatcggcacgttgcacttagccgcgaaatagtaggccccgcgctgcggctttcttggcttgcgatagttccaccacatctcttgctctgggtaaatcaagacccagtggcccttgttgaaggcgtggctgaggtgatggatgaattctcgcccaatgtagttgggactttgcactaggggaatggaccccatattgttcatgatgaagctgaagaagcccggcagcttcaagttggtgtcttcaatcacgatctccatccggtggtgggccttttgggctaggcggttgacggctaaggcatcgacctggttgaagtggttggcggttacgatggccccgcccttagccaggtgttgcagtttgtctaagcctgttacctgaatcttgccaaaaaatttctgcgtcaaagtctgcaagatcaggttgccggctaggccttctgccttagttttgaacttatcctgcttggcccagaagtcctcaaccagcttaacccgctcttccatggacatttgcgggtcgccgatttcggttttcgtcgtaaagttgcggttgtttgcagctagctcgatattgtggatgacgtccaggcggtggtcaccaataatcatcttgtacaccttcctatttgtttttcatttaatctctgtgatacccgtaagtttcacgtgtaactatagttgatcttttaacttgaggtattcgtttaacaagtcatcgtactcatgcaggtgcaagacgctgtggacccgtttcacgtcccaaggcttgaccgtctgggtgcggaaataagggaagaagcggaagctggtggtgaagtgctggatgactgtatcgtcctggagggcgtattgctcattgtacttacgcggggcaatccgcttttctttggctaatttattgatggccgtctggtcaggcaggaacatcttcttaacctgcatcaagtggcggacccgtttaaagaggccagtccgcttgatttccggcatgttcaaaaggaggaccccggaattcaagtagtcaaaaatcttcttttgattgtggaagaagaagcggccaaagtagtccaggaccccgaccagttccgtcccggtcaagtcctgggtgtaaaactggtcaatcggccggcggatgatcacgtcatcgtccaggtagaggatgcggtcgggaatttgcggcagttcgtcggcaaaaagccggagcatggcgtagggggtgaagcgggtgcccatgttggccgtcggcggttccttgatgaagttttcggtgcagtcgatcagctccaggctgctgttggggttgtcagccacgatgagcgagcggatgaagtcggccgcgtgctggctgaagggcttgaaggacctggatttgctcttggccctcatggtcaggatgtagacgtgaacctcttcgccgcgttcggctttgagcagggataagacggcaatcagcacgcctctttcagcgttgtggtcaccacaaaaaagaaagttcatggttttgcctccttagtagaaaaagtcctagttcttactgtcaattttaacatacgagcaatactcgcaagtgctcaattttgcccgctcctgcatgcttttggcgatttcaccgtgcagcttttcctgagccgccttcttgcccagcttctcgtccgggtaaaaggggccatcgatgtagaccgtgattttcggccgcttgcgccagcggcagggctggtaggtggtcgtcatggcaaaagccggggccttcaggctgaccgggaagttgaagctggtcgccgggaaagggcggatcttggtgtagtagggccaaagatgggcttccgggtagatgacgatggccgcttgcttttcttcataggcgtatttaacgtccttgagcaggcggatggactgcttgatgtttttcccaaccggcaggccagctgccggaatcacgtacttgcctaaaaaaggaatcccccaattggcctgggcggccagagcatagtagtggtaggggttgacgatggtcatgggggtgaaggggtcacccagcatctgggtgtggttgccatagacaaaatagccctgctttttaaaagggcgcagcttttccttgcctttgactttaactagtaagaagaggcgggagtagagccaggcaaaggcgcaggccaggctgcggaccaggccgttccagaattgccaagccgcccctttccggaagacctggtagtcatctgggagctggaagtcctgctgggcggaactgaccaggtcctcgctttcgctgtggtagtagtaagtctttttactcatcaaaagtcccccgcttgctgtaaaataaaaaaagcactgcgagcgcagtgcttagagatgatgggtcgtcaggggatcgaaccctggacacccggattaagagtccggtgctctgccagctgagctaacgacccgtgtcaaccaacaattttattatgccataaatttcagtaaaagcaatcttcttttttacattaattgtaattttcttaatttcgcgggcaaatcaagtataatagtcacagtgaaggaggttcataatgcctaaaaaaattctcgtcgttgacgacgaaaagccgatttccgatatcatcaagttcaacttgaccaaagagggttttgatgtagagaccgcttatgacggcgaggaagctgtcgagaaggttgaagaatacaaccctgacttaatgattttagacttaatgcttccgaagaaagacgggctggaagtagcccgggaggtccgccagacccatgacatgccgatcatcatggttactgccaagggcggtgagatcgacaaggtcctcggcctggaaatgggggcggacgactacgtaaccaagcccttctccaaccgtgagctggtggcccgggtcaaggccaatttgcgcagccgggacatcgtcaagaaggcagtggaagttaaccagcagaaggaaaaagaacaggaaagcaatgacatccagatcggcaacctgctgatcaagccggatgcctacctggttgaaaagaacggggaaaagatcgaactgacccaccgggaattcgagctgctctactacatggcccagcacatggaccaggttatgaccagagagcacctcttgcagacggtctggggatacgactactttggcgacgtccggacggttgacgttacggttcaccgcttgcgggaaaagatcgaggacaacccagtccggccgaagattttggttacccggcggggagtcggctactttatcaagcagcaaatagaagaataatttgggagccactgtttgaggtggctttctttatgtggatggattaatgaagaaagataaaaaagcacgcaaagagaaagtgaagaaagagaagaccaacctgcttaagcgcgcggtcagctcgatccagaccaagatcgcccttatcttcatgctccttttgctggccacgattgaaatcatcggggcctactttacccggcagatggaacagaccagcatcaacaactttcaaaccacgattcagctgcagtcgatcgtgaccgaccagctgactgcccagctggtcaagaacggcaagagtgctgaccggaagatgaaccagattatcactgactacagcaatgacgcgatttctgaaatccaggtcgtggacagcaagaacgtgatccgggccgtgtccaacttaaacgacaagaaccgggtggggcaattgtctaacaacggcgatatccgggaagtgatcaactccggccagcagaagacccaggttgccagtgaccagaagggcagcttcatggttcagatcgtgcctctgaccagcggaaccaacatcgtcggggcggtttacgtccgggccagcatggctgacgtcttcaataacttgcgaaatatttcgatgatgttcttgacggcctcacttttggccgtagtcgtggcggcgattgcctccatgtttatttcccgggcaataacccggccgattgaagagctccgccagcaggccatccaggtggctgacggggactactcaacccaggttaagatctactctaatgacgaactgggtcagctgggggcggcctttaacaccctctcagtcaagatcgagcggtccaatgagcagtcagaatctgagcgccgcaggctggacagcgtcctgtcccacatgactgacggggtgatcgcgaccgaccggcacgggaatgtgtcgatcatgaaccagatggcccaggacttcctggacgtcaaggccgaagatgcgatcaagaagccgatttctcaagttttaggcctgggggaggactacacttcccaggacttgatctccaaccaaagcgacatgcaggtcacggtcaatgccggcacggatgatgaaataatcctgcacgccagctttaccttgatcaagcgggtcacgggctttgtttccggggccgtctgtgttttgcacgacgtgactgaacagatcaagaacgaagacgagcagcggcagttcgtttccaatgtttcccatgaattgcggactcctttgaccagtgtccgggcttatattgaagccttgaatgaaggggcctggaaggatccggagattgccccccagtttttggatgtgacgcaaaaggaaactgagcggatgatccggatggtcaacgacctcctggttctgtccagaatggaccggggagccaccaagctggaaccggaatgggttaactttactgactttgtctcccacctgctcaaccgcttcgacatgattgtcgaacatgaccagggcgaggcccagagcgataccaaggaatacgtgatcaagcgggacctgggcaaccaggccctttgggtggaaatcgacactgaccagatgatgcgggtgatcgacaacatcatgaacaacgctatcaagtactcccctgacggggggaccatcacggtccgcttgacccagaaccagaaccagatcctgctcagcatcagcgaccagggcctggggattccaaagaaggacctgggtaagatctttgaccgcttctaccgggcagacaaggcccggtcccgggcccaaggcgggaccggtttgggcctggccatcgccaaggaaatcgtgacggcccatggcggccggatctgggcggacagccgggaagggcacgggtcaaccttctatattgccctaccttacgaaccaatggatgaggaggatgaatgggatgaagtttaaattcaagttcaaattcaatgattttctcctccacctggcgaccttgaccgtgattttgatctcgatcggcctctgggtcacggtgatgaccagtgaccagcgcttcagccggatcagcaatgaatcatcctcccagagctcggcttctttgtcgacccactaccggaatgtccagtctttttacgccccgggccagacctatgtctttcaaaacggggtccgctaccaggtccatgacgccaagcggaacctgcctttgaagtttgtccagtacctggaaaaggtcaagctggggacgatcgagaaaatgtcaaccacggccagtgattatgagagactgctggctgaccagaactatattatgtttgcctacccggaccagatcaatttcacggtccttttaggcaaaaaacaagctaattccagcctgcagttcaaccgggtctttgtcccggtcaagagcaagacccgctacctctatttcggcaacgacaagggcagccgggtctaccgggtaaagatcaagtccggctccttccggcagctggccaagtacgtcaagagcgcccaagaccggcaggaggtcagcttcctgcacttaaagaagctctacgtgcctttttatgccaaggaaatcaaggccaaggaatacagctacctgatcagctaccagtccagcagctactatgcttcccggctcttgggcagcagctaccggaagtcagtggctaagaacggccgcactgtctacacggctggttattccaagcgcctgcagattcctaaggaaggcaagagcaatgaccaccagtatctgtaccagaactacttgaccagccaggagcggacggccacccaggagatgctggaaagtgccgcctatgtcaagcagctgggcctggctgaacaggacctgcacttttttgaaagcagcggcaagacggtgtcctacatcaactatattgaaggctatccgatttttgccaacgacgctttggctcagacccaggtaaccatggggacggagtcggtcagcgtggctttcagcagcatgaacctgcagatcccgatcccgtatgacggccatgtcaagaccttgccgaaaaccgcgaccctgctgaaggagctgaatagcatcggcatcaaggaaagcgaaattgaaaaaatcaccataggctaccatatccaggccgacaagaagcgcagcgacttgattaccctgatgccgacctacttcatcaaggttggcggcagctggaacagcctggccggctggaagaagattaaggcggaaaacacggatcagttaatggaggggtcaagtcccagctccagcagctacttatcttccagctcttccagcaatgagtcgagcagtgaagccaactcaagcgcaagttccagcgtcagccaggcaccggccagcagccaggaagcatattccagcagccgcagccagccggcggctgaatcaatctccagctccagcagctccagttcaagttccgccgtatcagcaagctctgccagctcaaaggaaggagaaaagtaaatggatcatcgcaaaattgaatggctttttctgatcctcttctgcttagtcgacatctatctcttgattgagctttggcgggccccggttaccttgacctcatcgaccaattcggtgacgacctcaaccagcttgaaggctgaaatgaagtcagacaatattacggttccttccctgtccagaaagggggactcgggctactacctggccactagaagtaagagcgacttgaaggaagccgccaagaagctcagcagcgacgtctccaccagctacgctgaaggggacaagaccctgtacgcgaccatgaagaccgcgattccgctggagcggatgacggtgggcgagttcaagaatgacagcaattacgtcccgcatggcaagcagtatgtctatgccaagaacctctccagcaacagcagctacgtttacgtgcagaagtcccagtacggcctggtttacagcagcctggcccagctggtggtcaatgtcaagaacaagaagatcacgggctactaccagacctacttgactgacttgtccagcgtccgcgagctgcaggcaactatcagccccttgcgggcggtcaccaacctctacaccacccgggaactggccgacaactcccgggtaatgcaggtcaagctgggctacaccaaattgaccgaggtccggggcagcgtgattttcgtcccgacctggctggtctggatcgaaaacaagagcagcaagagcagcagcttgaagcgggtcaacgccttcagcggccagcttttgcaaaacagtacattggacgattaagggcaggaaggaaaaaatttgcaattcgcggtattatcgagcggatcagcgggcaactgcagcctgctgatgactgaccagcacaagattttgatggacgccggcctttcaggcaagaagaccaaggagcttttagccaaggtaggcgtggcgatcgaggacctggacatggtctttttaagccatgaccacggcgaccacagcggggggatgggggtccttatgcgccgctatccccagctgaatgccttcagcaacacgggcacctggaagtacttggaggagaccgggaagatcggctgcctgccgaaagaccagatcaatgtgattgagccgggccagaccaagtgctatggggacttggaagtgacggcttttgccactagccatgacgcggcccagccccagtactacgttttttccagcgggggcaagcgcctggcctgcttgacggacacgggctacgtgtctgaagaagtcgaatatgagattcaagacgcggatgcttatttgctcgagttcaactatgacgatctgatgctgagaagcggcccctatccctggagcctgcagcagcgggtccggtcagaccacggccacctgtcaaacgagcaggcggctgagactctggccagggttatcagttcaaaaaccaagcatgttttcatggcccaccgcagccagcagaacaatttaaactatttggcccgggacgtggcggaagaggttttggcggccagagatgccgacgtggccagtgacctggaattgcacgataccgagccgatgacgccgagttctttaattaatttataatacagaggatttaaagcttttaattaatacgttttgttcatatatacttcaaaaagctgggatatgataatggcaacgataaggagtgataaccatgtctgaagaacaagataagcaaagaaacacgcgcaagaaggaaaataaccgtttgctaactaaagcggccatcattggggtcgttgccggtcttttgggcggggggattgcttacggcggcttgtcagcagccaatttgaacagcaatacttcatcatccacggccagctcaagcagcagcaacactggtgaaaacgggtcagtgacgacttcatccagtggcacgaccaaggtcaacaagtccacgattaccagcgggacgatgacttccgcctacaagaaggtgcagaacgcggttgtttcagtcttgaactacaagtacacttccagttcatcatcaagctctgacatctacagcatgtttggctacggtgactcggacagttcagactcatccagctccaagaagtctttgactttgtactctgaaggttccggggtcatctacacgacggcaaacggcaagggctacatcgtcactaacaaccacgttatttccggggcagccaaggtgaaggtcatactggcttccgggaagacgattgccgctaaggttgtcggcaaggactcaaccagtgacctggcagttctgtcaatcgactccaagtacgtgacccagaccgcttcatttggtgactccagcagcctgcagtccgcgcagacggtgattgccatcggttcaccggaagggtctgaatacgcgtctacggtaacgcaagggatcatttcctcaccaagccggacgatcacttacaactccaaccagatgacggtcatccagactgacgcggctatcaactccggtaactccggtgggcccctggtcaactctgacggccaggttatcgggatcaactccatgaagctgtccagctccagcagcggcgactccgttgaagggatgggcttcgcgatcccgtcaaacgaagttgtgacgatcgtcaaccaattggtcaagaaggggaagatcacccggccgcaactgggcatcaaggtagcagcgattgctgaattgaacagctactacaagaagcagctgggcatttcaaccagtctgaagaagggcctgtacgtggccagcgtaacttcaggcagcgcggcagccagtgctgggatcaagaagggcgacgtgattacggcggctgacggcaagacggtcaacgacgtagccaccctgcacagcatcctgtacagccacaatgttggtgacaaggtcaagattacggtcaaccggaatggcaagaccatgaccttcacggtaaccctgcaggcaagcaactaatttaagaacaaataatccagtggatcagcagatctgctggattatttgtttgttcaaaacaaaaatagggtaaaaggaaggtaaagttcggatatatttcttgtcaaggaaattttttcaggagactttatccccaatcctgtggaaaagcctgtgaattgtgcaaaaaacggggtaaaaagcgctaaaaaagctgtggataagctgtggattgtgtgtaagttccacgggtaaaaggcatgttaaaacgtctgttcaaggcggcaggccgggcttttttggtgattgtttgtgaaaaggtccagtccacagctagtttgtagaatggttacacgggattttataaatttttttgcaaaaagctagacctagatagaattcggctctagtccactagatctagaaaaggcctttccacagctgtggaaaaaggcggttgataaactgttaattgtggggatagaagtaaaaatggtaaaataggggcattatgaatatcaaaattgtttgcgttggaaaattaaaagagaagtattttaaggacggaatcgcggagtaccagaagcggctgagccgctttgccaaggtggagatcgtgcaggtgccggatgaaaaggccccggaaagcctcagcccggcccagatggaagaggtcaagaagcgggaaggcgagcggatcctgagtaagatcaaggacaaggaatatatttacgttctggccattaagggcaaagagcgggcaagtgaagagttcgccaaggaattgaaggacctggggacctacgggcattccgacattactttcgtgatcggggggagcctggggaccagtgacgccgtcaacaagcgggccaacgacctcttcagtttcggcaagctgaccatgccccaccaattgatgcggctggttttgattgagcagatctaccgggcctttatgattaactccggcagtccttaccacaagtagaatagttttttagcctctcctgggtaataaacaggagaggctttttgtatacgaatcagtctagtgctagaatctagggtgaaagtatttgaataaagtattttagtcatgaaagggatgatttaaatgactaaaacagagcgttacatgtggctggccaatgacctgcttttgacggcagcggcagtgtcgctgatcattaatttagttggccagacggcttcgggttatgccttcagtggcagtcatgggcaggcaacagaactgctttatgatgcttttattttgctccttgccgcggctgctttgggggtctggctgagtaagtggctggctcctgcagcagcttgggtaattggtgcctgccttttgctgggccttgtaattgaccgggtggtaggcctgtatttcggcttgacctggtactggactttggctgttgtcgctttggcggtcagtctggttctggccagctaccgctggcgggggaaggcagtctttaaccattggctggccggcatcctcttggccgtcagcctggtcagctgcgtgatggc

SEQ ID NO: 2180 - DNA, 42982 bp, Unknown
  gut microbiota DNA sequence
actatcttttgcaaatcaagccatttggtagcggtctaaatctttagaataaacaaccgctactaagcctttcttcaaggataaccggcagctatccttatccggcaaaaactcattagaggtaaaagaccgcagatagtcaccgctatacggaggcaggtcatatatggctccctctatcgtcaaatcttctactggcagaaggcaggtcaccccaaagtagctatagtcctgcttcttcatctcgtagctgccagcttgccggtaaaaaatcagattctgcttgtcaatcaaggtcagctggttggcatacttgcgcaggtccgggttcaaaatgccaaaagcattgatcgccgcgtggtcaagccggccgccagtagccccgtaaacctttagctggtcaatcttataatcgccaaaagcaatccccagcatcaattctgaatcggtccagtccttcttgggcaccgaatagcggatatccgcaaccgtcccttctacccaggccagttcatcagccttcagcgagtcaaaatctccgattgccaaatccggcttaaagcctaattccagcaaaagcagcgctccccggtcgaccccaatcaaaaggtcacccttggcttgcgcctgcttcagctgctccttcaaatcagccggccattcttcctttggcccgccaagcaacactgccgcgtccatcacaaaacaccctaccctaacttatttcatcacttcaaatattccggcatccggccttcctcgatttccgtccgcatggccagatagtcatcatagcggaaagcagcgatttcacctagagccagctggtccttgaccgcgcacttcggttcatgcaggtgctggcagccccggaacttgcagcccgtactcaaggccttaaattccttaaaatacgtacacagttcattcagtttgatcggcgtcagatcaattgccgaaaagcctggcgtgtctgctaaaaagccttcccctaatttgaaaagggtaaccgtccgggttgtatgttttccccggttcaagctggttgagatcgcgcccgtcgcctggcccgcgtcttccttgataaagttcagcaaagttgacttccccgcccctgactggccagccagagtccagatctcgctttccccgatctgcttgggaagttctgctgccaggctttccctgtccaggtaaacccggtagccgatcttttggtagtaagccagctggctttcaatttctgccaatttttccttttccagcaggtcgctctttgacaggtagatcgttacctctactccctgccaggcaaaaaagaccaggaagcggtccaggagagcggtggagaaatctggttcaactgccgaaatgaccaaaagcacgtgatcgacattagccaccgccggccggccgatccggttcttccggggcagaatcttcaccaaataagccaagccctgttcatccagctttacctgcacgctgtcaccgacctggggcttctcccggttcttgcggaaaacgccccgggccctggtccgcacgactcctgccggcgtttgcacgtcgtagtagccggcaattaaagaaactaccgttccttgtactatttctgccatttaattcccgctttcactgtcatctgccgaaatcgtctcatcaactacagtttggtcatcacggacaatcttgatcttaccgtcacccttagtaacagaaaaagtgatcgtaaagtccgtgtccttggtgatgtaaaggtcccggtaaatattgccgagactgtggtcgtcatcctggatataaatccggacatggttgccctggctgggggaagagctggagcttgactcacttaagcttgatgagctctctgcagcctggtagtcaaccgtgaaggtcttcttgacctctttcttctcagcccccttggagaccgtaatcgtcaaagtatcaccctcagagacctcgctgccagcggcaggatcagtggaaatcacgtcaccgctgtccacgctgtccgagtagtccttctcaaccttgacgctgagcttcttgctcttggcgtaagactgggcgtcttccaggctcttgcccgtcagatcggccagtttaaaagttgccttcttgctgctggaggagcttgaaggcttaggctggtcttctaaagccacggccaccaccaaagtgatcgttgtcttagaggcatctaccttgcggccggccttgacgctttgggaaatgatcaagcctggcaggtactcatttgatggcgccttccggctcttgaccttgaagcccaacttgttcagcttctttttggcgatcgacaaataaaggccctcaacatcgggcaccttggtcaagtttggtcccttagacaccagcaggttgaccttttcccccttgtcaacgggactgttggccttcggcgtggtcgaaatcaccttgccttttttaacatcgctggagtaagtccgcttaacagcgcctactgccaggcccgagctcttcaaagaagtcttggctgccttctccgtcatgttcacgacgtccggcacccggacattgttatggccaactgccaaaaacatgaagagcaggatggcaaaaaccgggaataatgacccaatccaccaccacttatatttcttgatactagcccagaaagaccgcttctttggctcttcagccttgccttccttggccttctcagcctgcatgaccttgccgttcaaggctggcaggatcttagtttcatcattattgccgtggcttggccggtaaattgcttcgcctgcccggctcggatccagactggagtccaggtctgccttcatttcagccacggaagcataccggtcccgcggatccttggccgtcgcttttaaaacaacgttttccagggcctggggaatggccttgttttgctttctaagggacggaatatcgtcttcagcatgcttgagggcaattgccaccggcgtttccccattaaaaggcacatggccagtcaaggcctcatacaggatgatccccaaagaatagatgtcagactgcttggtgaccatcccgccccgggtctgctcaggagacatatagtgcaccgaacccaggaccgagttggtctgggtgatcgcgctttggttcaaggcgaccgcgataccgaagtcagcaattttgatgttgcctttttcatccatcaaaatattctgcggcttcaaatcgcggtgaatcacattgtgcttgtgggccagttccatcgctgacaaaatctggtccatgatcttgatgacctgcgggaggggaatcgggctgttttcccggatatagtcctttaagtcaggtcccttcacgtattccatgaccatatatggcaggccatggtcggtccccacgtcaaaaacagagacaatattagggtggctcagttcactggtggccagggcctctctttgaaagcgggccagaacctgggagtccttctgcaaatcaaggcgaataattttaacggcgacctgtctcttcaaaattatgtcatcagccaggtagacgttggccattccgccttcacccagggtgtcgacgatccggtaacggtctccaagcaaataacctttattgatcactcgcgccatcctcctcatttacggccaggcagacggtaatattgtcgccgccgcccagacgattggcttcattgaccaacttgttgcacctctcctgcaggttcaggcccttggtcgccaaaacctgttgaatcaaaggatccgatagggaattggtcaagccgtcagtgcagagaaggagcacgtcatcagtcttcatttcaagttcattatattccggatcaatagtgcttgaaacgcctaaggcttgcgtaatgatatttttctgcgggtgggtcttcgcctgttctttggtgatctgccccatcttgaccagttcattgactaaagagtggtcttcagtgatctggcggaaattcccttcagagtagctgtaggcccgggagtcacccaggtgggcaagcaagacttcctggtcaaagaacatggccaggacaatcgtcgtgcccatcccgttcaagtccgggaagcggtctgcggccttcagaatcgtttcgttttctgagcgcagctggacgtccagccattttctggccagattcttgtcgtgcaggtcggtgttagcgaaattgtggcccaggtggctgactgccatcgtggaagcaacgtcgccgccctggtggccccccatcccatcgcagacgatggccatggttaccccaacgcgattctgaaaaatctgcacgaagtcttgattgctctctctaactctaccaatacttgaagcaaatgccgttttaatcacaagtactaacctcttgtcgtaaacttggcaatgaaaaatccatcactgttgtagctgtcgggcaggatcttcagcatccccttgggcgcggagatcttggccgtttcaaatggtttcaatgcaaaatctggatgcgcggctaaaaatttccgcacgttttcttcgttttcttctacagagattgagcaggtggagtagactaactccccgccctttttcagcaagccggatacttcgttcaaaatgtccagttggatttcagccaaatggctgatgtcttccgctgttttcgtgtagcggatttccggcttgcggcgcagcagtcccataccggaacatggggcgtctatcaatatcttatcaaattcttgcccggaaaaatactcccttgccttccgcgcgtccaaatctttgaccttgacccggtcagcaacccgcattctggcggcattttccttgaccagacgcaatttcttttcatggatatccagagcagtcacttgcccgtcaggcaattgctcagctatttgaatggtcttgccgcctggggcgctgcaggcatcaagggcctgctcatttcccttaaagtcaaaggcttccgccaccaggctggctgcttcgtcttgcaccgtcacttcaccatctttgaaaaagtcggtcatcacgatcccgccccggcttaaggcatagctgcggctggccaaaggcgactcctgaggggcaaaatgggcccggtccaggtcccggacgacccgcttttcatcagccaaagccgaaatccggatttcgtttttcgccttgctgttgaagctggccatgattttttctgccctgctcttgccccagttggccacgaaatagtcgctcagccaaaggggcatgctgcacttgacgctgagatagtctggcgcgtctttttccggcaggacctctcctcgccgtaaaagcgagcgcaaaatcccgttaaccaggcggtagccgctagattttggccggccataggccttagccagcttgttggcctcgtctaagactgcccggtttggcaccttgtctagaaagaagatctggtaggccgacatcaataaaaggggcttgatatatggctctctcagccgggccttgaccaggtccttgagctggtattccaggtaaagctggtattggatggtcccatagaccaggttggtggccagccggctctcttcacccggcagcttagccgcctttaacgcgtggtttaagctgatatttgaatatgagccctggttaatcaccttcatcaaggtgtctagggccacggtgcgggcgttagtcttcatctacgatcttttctcctgctgcaaacttcttcccctgcccgttcaaaaagtccttgatggccatggccttcttgccatttggctggacttcaagcaggttcaaaaccgtgttgccggcaaagctgatagcaaagcggccctggttggtcaaaaggtggccagctggcagactggtgttgtcgtcagccacttctgccttccaaacctttaagcgctggcccttgatgaccaggtaggcgcctgggtccggattgagggcccggatcaagtccttggcctccttggccgtcaatttcaaggaaattctttcttcagccttgctgatggttggggaaaagactacctggcttggatcctgcggctttttgacaatttcgccactggcaatctttggcagagtttccaaaagcaggtcccggccaagcggagccagttcttcgaagacttccccgctggtctcatctggtctgatcggcaggctagcctgggcatacatgtcgccggcgtccatttccttgaccatttccatgatggtgaccccggtttctacatccccgtttctgaccgcatactggatcggtgccccgccccggtatttcggcaaaagggatccgtgcacgttaacagccgcgatcttagcggacttcaggaatttggtcggcaaaaactggccaaaggccgcggtgatgatgaaatcggcgtcaagctgcagcaattcgtcaagttcagctgacttggacaggcggactggctggtataaaggcaagtcgttggccaaagccacttccttgaccggggagtaaacgaccttttgcttgcggccaaccttcttgtccggctgggtgaccacggccaaaatatgataaccggccttgatcaggccttccaaaactgtagcgccgaattgcggcgttcctaaaaagattactgaattcacgtttttattcctttacataattctctctggctctgaatcgatctcaacagtcaagccgtactttttcacttcctgggcctggtcctggatctggtgcaggagctcatttaagtgtttttctcttttatattttaccagtatttggtaataatactggctctttaagcggctgatcgttgccggagccggccctaagataatagtcggcgcccgcaattccctctgcaattgccgtttgattttaaaagcctcccgggccgcgttttgctcatttttggctgaaacggagaccaggaccgtgtaaaagtaaggcgggtagtcgccggcatggcggacctgcatttctttagcgtaaaaaagctcatagtcctgcttttgcgccaggtggatagcgtagtggtccggattataagtctggatcatgacctgcccttccttgtcggcccgccctgcccggccagctacttgcgtgagcagctcaaaagtccgctcagaagcgttgtagtcgggcagccataaaccagtgtcggcattgattaccccaaccaaagttacattagggaagtccaggcccttggcgatcatctgcgtgcccagcaagatgtcggcttctccttggccaaaactggtcaaaatcttgtcatagctgcccttcctccgggtcgtgtccacgtccatgcggaggattttagcttgcggaaaaagctcagccagctcttcttgcaccttctgcgtccccgtccccaaaaagcggatctgccggtcccggcagttgggacaaatctccggaacagcttcttggtagccgcaatagtggcactgcatagtccaagtgtccttatgcatggtcaaggacaagtcgcagttagggcactttaaaacaaagccgcaattgcggcagagcatgaagttggcaaagccccgccggtttaaaagcaggattacctgctcttttttctccagccgcttttgaatcgcctcagccaatggacaggagatgtcaaactggatgccggcaaactgcacgtgctttaagtcaagcaggtcgactcgcggtaaaggctggctcttggcccgcttttttaagcgcaaaagctggtagacccccttttgggcccgggcccggctggccaaagacggcgtcgcgctacccaaaatcaagggacagtggtggtagcgggatcgccaaattgccacgtcccgggcatggtagcggggattgttgtcctgcttgtaggagccttcatgctcttcatcgataatgatgaggcctaaattgtccaagggggcaaaaaccgcgcttctagcgcctacgaccacctgggcctggccccggcggatcctgcgccattcgtcatagcgctcaccttccgacaaggccgagtgtaaaaccgccacctgctggccaaagcgggcctggacctgcttgaccatctggggggttagggaaatttccggcaccagcatcaaggctgtcctgcccaaggccagggcctggctgatcgcctgcaggtagacttcggttttcccggaccctgtcactccttctaaaagaaaggtctggctgacccggcccttgatgtcctgactgacccggctcaaggccgcggcctgctcgtcatttaggtctaaaggccggctgggagcaaccggcttggttggccgacggtatttttcctggtctttttcctgcagccatttcttgctgaccgccgtttttaaagttgctgaactgatgcccagaccggtcaattcttcccggcttttaggataagccgcaaagtccccggccaaatcagccagcaattttctttgctggctggccgtttttctagtttctaaaaaaatctcctggtagtcagcggccgacagaagcggatagtagactgaaaccagcttctttttcgccttattttcaaccaggtattctatcctggcctcccccttattcaggagctgcttgaccagcttgatcagacgcggctcttctaagttggccaaatccaccgggtctcccgcaaaaagaggcatttgctctgcccgcgggctgtttggcaggaggattttccggtaattggcccgcattacccccggtagcatggtcttgaggatactgatccggtaggcaaaaatctgccgggccaggtcgctggacagggcgaccagctcgggagtcaaaggcggcatttcatcgaccactaagagcaggtcctttaactggccggtaaagtcgctgctttttttcacggcgacgacaaagccctggaccttgcggcggccaaaaggcaccactacccggctgccaatttcaacttccaggtcatcagggatatggtattcaaaaacgcggtcagtctggtgggcggccacatcgacaataacttctgcgatcaagtccttctcccttcctttacgctaaaagaggagcgggcttctggtccgctcctcttcaaggattattcgttggcttcaccgtgagggtcagcgtcaatcgttatcttgccggcagcaatttcttccaatgcctggccgaccggcttcaagttgtggtagttgtccaaagcgcccggcttgccggcttccagttcaccagcccgcttggcagccaaaactgacagtgagtatcttgaatcaacttcatctagcagcttgtcaattgatggataggtaattctcatcttagtcctccttaaccattttccgataatcgtcgatcacgcgcttgacgctgacgtgttcagcgtcaacgattgctttaatgtggttgacggcgttggcgacagtgtcgttgactaccgcgtaatcatagtcctgcatcaccagaatttccttgcgcgcttgggtaattctgccccggatcacgtcttcggattccgtgccccggtgttccagccggtctcttaaagtgtgcaggtcaggcggcgtcaagaaaataaagacgccatctggcatttgttggcgaaccgttctggccccgttgacatcgatttccagcaagacatccttgccggcagccagcatttccttgaccgggcccaaaggggtcccgtaaaggttgccgacgtattcgttgtattccagcagctgattgtcagcaatcgcctgcttgaattcttccctggtcacgaagtagtagtctttcccgttcacttcgccttcacggggcttgcgggtagtcattgagactgagtattcgaaggggaagaccttgtgttcaacaattgcgcttttgacggttcccttgcccaccccggacgggccggacaaaaccaacagtaatcctttatctgccatgatagctccttttttgactagtaattctattttggaccataagcgccttctgatcaagtcttaaggccgaaaaaagcttttttaaaaaaggggcttgctttttcgaatgcttgttcgtataatatgtttacaaacaggcgttcgaaaatgatttacttaaaggagtattcaccatgtccaaatttcaaaactttgccagccgagccgctcagccccttaagaaggcctttcactatctctttgcttatgacgaagaccggctcaccctccgcggcgacagcctggcagttaacttagctaaattgcagctggccttcttgaagaggcagtatctcctggtcaccttgaatgacggcagctggcgggttggcaagatcaccaagcggatttcacccagccgcttcgttttccgcgatgccgataacaagattttttacttgcttgacattaatgacattttaacagttgagctgccttaaagcaaaaaagagcctggcttttccagactctttttgcacttatgttctcttacgcttttcgttatttcacgctggcgtacttgaactgccagccgccgaggttgtcgttctagacattcttgatttccggtctgatcaagtaagcagttgagatagtacttgttcttgaccatcttccaagacaggttggaccccgtccagtccttttgcacatacggcccgttataaagcatgtactttgaagccgtcccgtagttggacccgtacttcttgaccgccttttctgcctgcgggaagaagagggcgaatctgggagtatgtttaaacttaaattaaaacagcaattatccattgtcaacgcttttcacctgcaattaaagtagaaattgcgtattcttcccatgcgcatgcaaaaaactctcctgccttctggcaagagagttattttttaataattattttctaatcttgtttccgctgactggcaatcaggtcggccgcgttttgctcagcagcttcgctgacattagctccggccatcatctgggcgatcatcttgatgctgctgtcttcatcaagttcctcgacctgggtaaaggtctcaccggctgcaacctgcttagcgatggcaaagcggtggtcggcgctggccgctacctgcggggagtgggtgatggcgataacctgcttttggccggcaatcgcgtgcatcttcttgccgatggccgctgccacccggccggaaaccccggtgtcaatttcatcaaagaccatggtgccaaccggctcaacccgggagaagatagcctttagggccaggatcagacgggactgttccccgccggaaacgatcttgaccagcggcatcagctcttcgcctgggtttggcgcgatgtagaaggccaggtcatcagtccccttgaccgtgaaattatcagtcttggcgaagcggatggagaaacgggccttatccatgtacaggtcagccagttcacgcttgatcgcttcttccagcttcaaggcggtagattctctggcctggtggaggtcagccgccatgactgacattttttcctcaacagcagctatctgcttgaccagttcttcttcgtcaaggccaccagtttcaaactggctgagctccttggagacttttgcatagaagtcaaaaacgtctgccaggcttggtccatacttcttcttcaagttgttcaagaggtccaggcggttttgcacgtactggtagcgttcttcatcaaattccaagctgtccatgatgtcgcccagttctgagcgggcatcgctcagcgaatataccccgtcagtaatggactgggccacattcttgaagtccttgtccaggtcggccaaatcttctgccgttccttgggcatcccccagcaggctggttaagccatgctcgtcatcgtcaaaaagctggatcatgaagttggcggattcagcaatcttctggtaattgtttagcttgttgaactcgtcttccaagttctggtcttcctgctcatccgtcaaatccgcttgggtcaactcttcgacctggaactggaggatgtcctggcgctgggccagttcccggctgtcccggcgcaggtgctccaggcgctggttaaggctttgccaggtctggtattcagcctggtacttgcctaaaaggggcttgaagtccttgcccgcgtattcatcgaccaggtcaatctgccggctttggtccatcagcatctgctggtcgttttggccatggatgtcgaccaggtactcaccaatttttgccaaagcggtgatggtggtcagttgcccgttgatccggatgacgttccggcccttgctggaaatctcccggctgatgatcaggtcatcaccgtccatcggcaggccgtagtcagccgcgatttgttcaacttcccgcatttcctcatcttgcagggtaaaaaggcccgtcaccactgccttgctctggccagaccggaccatttctttttgggcccggtggcccagcaaaagtgacaaagcatcgatcaagatggacttgccggccccggtttccccgatcaggactgtcatttgcggctgaaacttgattttcagactcttaatgatagcgaaattctggatatccaattcgacaagcataagcgtcccacagcatcctttctacagaccctgggcagcccggtcaaccagctcgctgactgagccggaccagagattctgccctggatttgcctggtccttcttcaagtgaagcaaaaattcaatattccccttgccgcccttgattggtgaatagtcaacgcccaaaatggaaaagccaatttccagggccttggccatagtgtgctcgatcactgcctggtgaaccgcgtggtcccggacgatcccgtgcttgccgacattttccggaccggcctcaaactggggcttgatcaagcagacggcatccccctggtctttcaagatttcatacatcggcggcatgatcaggtccagggagataaacgacacgtcagtcatggcgaagtccggcaggccttcggtaaagtcggcgggaaccgagtagcggaagttctgccgctccatcaccaccacccgggggtcatcccgcagctgccaggccagttggttatagcccacgtccaaggcatagaccagcttggccccattttgcagggccacgtcggtaaagccaccagttgaagccccgatatccaggcagaccttgtcttttaagtcaatgttccagaccttgaccgccttttccaatttgaaaccgccccgggaaacatacttgagcttatcctttttaatgaaaaattcctcgtcaacgggaaacttctccccggccttatcgatccgctggtggttgtggtcagttacaagacccgccatgatggctctttgggcctgagttctggagttaaaaattcccttggcggccaataatacgtccgcgcgttctttacttgccattacagtaccttctgatacaaatccaaaaagcccagcaaaacttctgccttttccccggccaggtcagccttgcccttttcaatcagctgcttgagttcatttctggttgcctctgcccccagcatggtcaagctgttgttcttgcccacttcctggtccttatgggtcgccttgcccgcttcttcctggctttcaacgatgtctacaaggtcgtcatagagctggtaagagcggccaaagtgcttggcgaaggccaggtacttttgggcctgctggtcaggacaagcagctaatgccgtagccatctgaacgctggccaaaatcaagcagccggtcttcagccattccatgtggtcaatcacttcttcactgctgtcttcattgttggtggtgtcgatgtccagatattggccagccaccatcccctttggacccacagcttcagtaatgatctcgaccagcttccagttatgttcagcctgggcgatccactggatacctaaaggctggagggcatccccggccaaaatagcttcagcttcgccccatttcttgtggctggtcaattccccccgccggtaatcgtcattgtccatggccggcaggtcatcgtggatcaaagaataggtatggatcagttcaatcccgcaggcggcctggacttctttttcggtgatctcaacgcccaaggcgtctaaagttgccaaaaagagcaaaggccgcaggcgcttgcccccagccataactgaataagccatgatttcagcaaaacgggggtcatcgctttcttttgccagttgtccttctaaaaaatcattgatgattggcgtgtacttagcttgaaattctttaaaagttgtcatggctttattcctttggtgctgaagcatcggttggatcaagttccttctcgctgccatcagactcgatcaacttggccacggtgttttcggccttggtcaattcctgcttcaattcccggctcagcttgactccggtctggaactgagccaatgattcttccagtgacaactggccattttccagctggccaacgatttcctgcagctccttgagctggctttcaaaattgttcttctcagtcattcttttcttccttaatcttttcaatccggccgatggcctggccatcctttaagtgcaggcgaacctggtcgcctggagccaattgctgaactgacttgaccacgttgccgctcgcgtcagtcgtgtagctgtagccccgggccagggtctttaaaggactgtagtcgtccagctgctggacggcctgccggcaggcagcctgcttttgttccagaatccgcttgatccccatttccaggctcttggccaggtagctgttttcctgcttaagctgcttgattctccggtctggggcctggtgctggaggcgctgggtcaaaatgctgagcttttgcccctggtctttgacaattacttccatcatccggctcagctgctgggacaattggtcgacctgctgcatcttctgctcatagaggcgctggggctctttcatgataaaagaattctccagctgggccagggcctgggcccggacctggatcacggcccggatgtcggtcaaaagccgggtctgcagctggccaatttcagccaggaccagaggcagggccggcgtcgccatttcagcggctgccgttggcgtagccgcccggcagtcagctgccaggtcacagagtgtggtatctgtttcgtgaccaactgatgaaatcaccggcatcttcatggcataaacctggcggaccacttcttcttcgttaaaaggccacaggtcttctaaagacccgcccccccggccgataatgagcacgtcatattcatctgcccgggcttggatctgctgcatagcagaaaccaagctgccagctgcgctttccccttgcacctgggctgggaaaaggtcaatttcagcgtgcgggaagcggcggttagccgttaccatgatgtcgtggatgaccgccccggaggctgaagtcacaacagcgatcttatctggaaaaaggggcagagggcgcttgtgctcttgggcaaagaggccttctttagccagcttctcctgcagctgcctaaagcgttcatacaaggcaccaaggccggccggttccatgcttttggcataaaactggtagctgccctgggcttcataagttgacaagcggccggtcacgtagaccttcatcccttcttccggctcgaacttaaccttgtcaaagtctccgcggaacatcaccacattgattttagacttgtcgtcttttaaagaaaagtactggtgaccacctctccggaagcggaaattcgacaattccccttggagaaaaatttgccgcaggtagggatcccggtcaaatttctgcttaacataccaatttaattcactgacagtcaagtacttttcgtccgtcccattagtcgagtccatgctgtctcctcgtcaatttgatgacttcttccattaaaaactctaccgtcaaagggccaaccccgccaggcacaggcgtgatccagctggccttttctttaacgggggcaaaatcaacgtcaccgaccaggtagccgtccacccggttgatgcctacatcaatcacgaccgccccttttttaaccatttccgccttgatcatttccgccttgccgaccgcgcagaccaggatgtcggcctgcttggtcaagtcagccaagttccggctgcgggagtgcaggattgagacagaagcgtttctttccagcatcaaggcagccaggggcttgccgacaatgtttgaccggccgacaatcacggcgttcttgccagtcaagtcaatttggtagtggtccaaaagggcaatgatgccggcagccgtagctggttcgacaaagtgcttgccctgccagaggcggccgatattggccggagtcaggcagtcaacgtccttctccggatcgatcctttcaatgacccggtcagcattgatctgcgggggaaccggtaactggaccatcaggctggaaacttccgggtccgcgttcaagctgtcgatcaactttaagacatcctcttcgctttcatcagccggcaattgataaactacctgcttgatgcccagcttctcagccttccgcttcttggaggcgacatagaccttgctggccggatcatcgccaatattgatgacgcagagcttgggactgaccccatgctcttttaaggaagccacttcactgcctaacttttcccctaattcccgggccagcttcttcccgtctaaaatttctcccaaaactgcctccttaagaaaaaaagccggcgaaatgccggcttaaagattattcttgcacaaagtttgccaatatgccattgatgaaggcctttgacttcggatcatcaaactcgtcacacaagttcaaagcctcgttgatggctgaccggtcttcaataaccgggctgtacagcatttcatacagggctacttccaaaatcgccaagctggtcttgctcagccgctccaagcgccagccttgcttcaagttggcggaaagcttgtcacgcagttcagcctgcttgtcgatcacgccgctgaccagttcctggctgtaggccggcaaagtatccaagtccaaagcggacttgacattgttttccaattcactggccgtcacgctgggatcctggttgtacagataaatggcttgcagtgcaattcttcgactatcgtgttgattcattacttatcttcttcttgatcggggaataatggttgatcagcatcttcaaagttcttttcatcttcagggaagacgagaccaacgacatgaacatcaatggacttcaaattcatatccgtcatctgagtcagctgctgcttcagagcttcttgaatcttgcccgcaacagctggcacgttgacgccgtacttgagatatacgtaaacgtcagccgtcagttcgccgtcttcatcaactgagacggcaactcccttgccccgatcctcgcggccaaagacgcggctcaagcctgacttcaagccaccgcgcatcccggcaacaccgtcgaccttctgagctgaaatgcccagaatgacttcgagtacctgcaggtcaatcttgatttgatcgccctcatcattgccgcttaaaacgattgttgaattatcagccatttttccacctcgaaaattactacttagaacgtgatacgtatgaaccgtcactagtattgatcgtcagcacgtcaccaacattgataaagaatggcacagtgacaaccaaaccggtttccatcgtagctggcttaccaccacctgatgaggtatcgccgcggatgcctggttcggtttcaacgacttccaggtcaaccgtgtttggcaggtccagacccaaggtttcaccattgtgggaaataatgttcacaatcatgttttccttcaagtacttggcttcctggtcgatctgagcgttcggcacttccaattgctcgtaagttgccgtgtccatgaagacatagctcgaaccgtcgttgtaaaggtattgcatttgccgggtttgaatgtcagccgtttcaaccttggcagttgaacggaaagtgtattcttgaacggcgccagtccgcaagctcttcagctttgaacgaacgaaggcactgcccttacctggcttaacgtgctggaattcaacgatacgccacaggtcgttgctgtattcgatcgtgaggccgttcttgaattcgttaacagaaatcattgtcatctggtaaatcccccatttctacatcttaaattgtaccaataaacactaaattttaccataaaaataatcttacaggtgaatgagttcgtcctttggcaaagtggacaaaacttccggagtgtcgccattaaccagaatatcatcttcgatccggaccccgccttgcggcaggtagatgcctggttcaaccgtgtgcacgatcccgttttccagggtcgtctggctgaacaaaaattcgggctgacacatttcatggatttccaggccgatcccgtggccaatcccatggccgaagtattgcccgtagccggcgtcattgatgtagccccgggctgcctggtcaacgtccttgccagttgccccggcaacagcggcggcaatcccccgcttttgtgcttccagaacgatcttgtagatcttttccagttcgtcttccacgctgcccaaagcgtaggttctggtaatgtcggcggtgtagccgttatatgaagcggccgcgtcaattacgaccagttcgtgctcttgcatcaagcggtcgctggccaccccgtgggcccaggaagaacggggaccagaagcgataattgagtcatagcccgggccgtcgccgccgtagagcttgaagaggtagtcgagcttggcgcccacgtctctttccttggcacctggcttaagcattggcagaacttcttcaaaggctctttctgagatttcaacagcctttttgagagtggccagttccaggtcatccttgacattgcggacccgttcaacgatttcagcagccatcaccaggtcaatatctggcagctgggatttgatcgcgtcatattcataagcagaaacaaattctgcttcgactaagagtttcttgacccccagcttcttgacttctgccgcgatttcggccgcttcgtggccatgcttcatgactaccttcagttcacccactgcctgggcttcgatttgcggggcaaagcgggagtctgacagaagcacccggtcgccgtttttggtaatgatcagctgggcttcttcaccggtaaaattagtcaggtagcggtagtttgcccggttgaaaaccaagagggcatccgcgtccttgtccttgatcaagtcagcagtttccttgatccgtctggtcaacagacttaacaattcattgttcttgctcataagcaccatccttttctgcagcttttaagcttttattcatgatgcttttattatacaaaagatcaaggacttaaacatgctttccccggaaaaagggcaagaaaaaagcaggcagctgggctgtctgctcctttgccggcttgattattcagcgtcttctactggcaaaacagaaacttgcttcttgtacttgccaagacgttcgaacttaacaacaccgttagtcagtgcgaacaaagtgtcgtcgccaccgcggccaacgttcttgcctgggtggatcttagtaccacgttgacggtagatgattgagccagcgtgtacttcttgaccatcggcacgctttgcgcccaaacgacgaccagctgagttacgaccgttggtagttgaaccaccacccttgtggtgggcgagtaactttgcgtttgaaagaatgttcatcatcatagtgttcacctcttactaagcttcgatgctcttaacagtaaccttggtgtaaggttgacggtgaccgtacttagaatgtgagtgcttctttggcttgtacttgaaagttacaaccttcttttccttgccttgcttgtcaacactagcaactaccttagcaccttcaactaatggagtaccaaccttaacgtcgtcaccattagctaccaggataacttggtcaaaaacaacttcttcgccagcttgtacgtcaagcttttcaacgaagatactttcgccttcggcaaccttgtattgcttgccaccggtcttaataactgcgtacattagtacacctccgtataaaattacttagactcgccatcaaaggtgctgcccaaagcaggcttgtcaacctcatctgcgcggttgcagaatcgaggtatcactcaaattgcaactctgttagtatagcacgctttgcccgccttgctcaagtcttttgccaggcaaattcctgtttttgccagattttttgcgttaaactcaaaagagataatttagtaaggaagaaatcgagggaaaaacatgccaaaattctatggatacaagcgctgctccacttcccggaaggcccagaagtggtttgacgacaaaggcatcagctatgacttccaggacctggtggagactccgccggaaaaagacctgctcttgtcctggctgaccaagtaccaggaccgcggcctgcgctactttttcaacaccagcggccagcactatcggcaaatgggtctgaaagacaagttgccaaatatgactatagaggaagccgctgatctcttgtctaaagacggcaagctgatcaagcgccccctggtcgttgatgaccagcacttaacctgcggctttaaagaagaggtctacgagcagacttggaaataagcaaaaacaagttccggcttctggaacttgtttttttgcttttattcccccaaggcctggaccaggtcggcaatcaagtcgtccgcgttttccaggcccactgagagccgcaaaagccgcggcgtaattcccagcctgagacgctggtcttccgcaacatcgtcatgggtctggtagtaaggaatggtcaagaggctttctgccccgcccaagctttccgcgaaagtaatcagcttgacgctcttgagaacccggtcgacttcttcgtcgctgtccaaataaaaggagatcatccccgccttgcccgggtagagtactttttccacgtgcggcgtctgctccaggaaagaaacgatctttttcgcgctggccgtgtgctgctgcattcttaaaggaagagtcttcaagcttctggtcaaaagccagctgtcaaaggcggacatagtgtcgccaaccgtaatggtgtactggaagtaaaagtcggccaaaaccggatccttgaccaccacgatcccgcctaaaatgtcgttgtgcccgcccaggtacttggtggctgagtgaatgaccacgtctgccccttgggtcagcggcttttggtaatatggcgtgtaaaaagtattgtcaacggccaccaggatatcaggattatagtcatgaacagcatcagccacggcctggatgtctacgctcttcatcatcgggttggacggggtttccagccaaacaagcttggtctttggcgtcaaaagccccagcaaattttccaaagtttccccgttccagagcttgaacttgatctggaagtggtcttccaggtgacggaagtagcggaagtcgcccccataaaggtcgtctaagctgaccacttcatccccggtcttcaaaacacttaagaccagctggacagcagccatcccgctggctacagcgaaaccttggcagccttcttccagtttggctagggtctcttccacggttttccggttaggggtttccacccgggaataggtaaagccctgcaagcggtcaaagttgaccgcctggtccaagtccgggtgccggtaacaggccgacaagtacaggggctgggcaaccggattggctccgtcttttatgctgccggcttccgccacgatggtctcaaaagaccgggtatctttttctgtcatcttttttctccatttccttaaatccattatcttttagcttcggccagcgcctggtcaatgtcagcgatcaagtccgccgcgtcttcaatgcccacggcaaagcggataaggcccggcttgatgccggcggccagctgctcttcttctgacagttcggcatggctcatcttgcttggcagttcgaccaggctttcaaccgcccctaagcttactgccaggctgaacagatttagactgttgacaaaaactaccgggtcataaatttccttgtccagttcacaggagaagaccccgcccgcccccttggcctctttgcgcaggtcatcatagccggataggtccggatcacctggatagtaaatcttggcaattccggcctgctttttcaaaaatccaataatcgcttgaacattttccatctgccggtctaagcgcagcgacaaggtcttgatcccccgggcaagttcattggaatcttccggcgacaaaatccccccaatggcattttgcacaaagtagacccggtcagccagctcctctcccttggcaataacggccccggcactaacatcagagtggccggccaggtacttggtggcgctgtgaacgaccaggtctgccccgtattcaagcgggcgcaaaagataggggctgaggaaggtgttgtcggtaatagccaaaatgccgtgctcatgggctaattgggcaatcccggaaactggcgtcacctgcaaaagcggattagtcaccggctcaaagtagattgccttggtattcggctggatggctttttccactgccgccaaatcccgggtgtcaactgccgtaaattccaagccccggtctttgaagtactggtagacgatccggaaggtgcccccataaatttggtcaccgatgacgatatggtccccagctgcaaaaattgccaaagccgcgtgaatcgccgccattccgctggcaaaaacaaaggcccggtctcccccctccaagctggccagctgttcttcaacggcatttctggtcgggttgcctgaccgggagtagtcgtactttacttgcgccccgatttttgggtaggcaaaagtggtcgccttgtaaaccggcacagcaacggcccctgtttgattgtcattttgccggggctggtggaccagccgggtgttgaatcctgccatctttttcctcctatttgtattaaatcttatttcattattaactgttttcttaatctaaagctaattataccccaaggatcagccttttcctagcagataagaaatgaagaaaaaatagccttcgaaagcagtttcccgctttcgaaggttattctttttaaccaccaaggtaggccttttgcacggccgggtcgttgagcaggtcctgcccgctgccggtcatcttaacttcgcctgaggccaaaacgtagccccggttggcaatgctgagggcctgtcgggcgttttgttcaatcaagaggacagtcatgccttccttgttgatgcttttaataatgtcaaaaatttcctggatgtagattggcgccaaacccatggatggttcatccagcaagagcagcttcggccgcgccatcaaggcccgagccatggccagcatctgctgttccccgccggaaagagttgcggcgtcttgcttttgccgttccttcaagatcgggaagcgtttgaacatggcttccatgtccttttccaccccgtccttgtcctttcggaggtaagcacccagctgcaagttttccttaaccgtcatcccggcaaaaatccgccggccttctggtacctgggaaaccccggcagccacgatcttaggcgcggtcaacttagccagggactggcccagaaagacgatttcgccattagccggcttcaaaagaccggagatagtcttcaaaatggtcgacttgccggccccgttggctccgatcaaggtgacgatttcgccctccttaatgtcaaagctgacatcgcggaccgccttgattgccccgtaattgactgagagctggtcgacttccaaaatttctttagacatctgctccacctccgaggtaagcgttgataacggcttcgtcattttggatttcacttggcgtccccttagccagcagcttgccttccgctaacacatagattctttccgccaggttcatgaccagggacatgtcgtgttcaatcaaaagtacggcaatcccgtattcggtctgcaggcgcttgatcaatctggtcaagtcagccgtttcttccgggttcatccccgcggctggttcatccaggcagatgatcttgggctccgtagccagggcccggacgatttccacccgccgctgagtcccgtatgggagactgccggccgggaagtacatgacatcttccaggtcaaagtccttcaaaagttccttggcccgctcttccatggcttcttccgtcttatagtaagcaggaaggcggagaaccgccgtcaggaagttttccttgtaatggttggtcaaggcgatcaagacattttccaaaacggacaactggctgaagaggcggatgttctggaaagttctggaaatccccatctgggccaccttgtaggccttggtgttcttcttgacttcctggccgccaatcttgaccgtcccggtcgtggctggtcctaccccggtcaggcagttgaagaaggtggtcttcccggccccgttcggcccgatcagggcaaccagttctttttcgcccacgtgcagagaaacatcgtcgaccgcggtcaaaccgccaaagactttggtgatgtggtccgcgtttaaagcatctgtcatttcagttcctcctcactacttgctttcttttccggcttctttcatatcgccgtcttgctttttcgtcaaaaggcgcttgaaagagaattcccatttaccaaacagaccgcctggcttgaagatcatgatgatgatcaaagcgaccgcgtagaagaccatccgcaaaacgcccaggctttgcagggccgcgtccaaaacgcccaagagggtggtggccacgaaggtcccggtaatgctgcccaagccgccaagaaccacaaagatcaaaatgttgattgattccatgatcccgaaggtggatggcacgatcgtctgcaagtaagaagcgtacagggaaccggcgatcgctgccgttgccgctcctaaaacaaaggctgacaacttccacttggtcgtgttgacccccatggcttcagccgcgatttcgttttcccggatggagataaccgcccggccgtcccggctgtggatgaagttgacggtcacgatcgtggtcaagcagacaaagatgtaaaccacgtcccaggtcgcaaactgagggatgttgaacagaccagctgccccgttggtgatcttcatgttgttgatcacgattctgataatttctgctgcccccatcgtcgcgatggcgaagtagtcaccatgcaggcgcagggttggaatgccgaccagcaaggcaacaacgattgaaatgaccaccccgaccagaattgacaggtaaaagccccctgccgtgttcatcgtctgggtcatgatcccggtggcgtatgcccccagggccatgaagccggcgtggcccaaagagaattgtcctgaaaagccgatgaccaggttcagcccgaccgccagaatgatgttgatcccaatcgttaccagcatgttttcaatgaaggtattgatcacgccagccagcatcaaggtgttgatcaggtaaaagcctgccaccatgaggatcagccagcaaagattgtatttccagtttttcttcatctgacttcttcctcctaaaccttttcaacttgcttcttgccaaacagaccgcccggcaggacaagcaggataacaatcaaaacgatgtagacggccgcgtctctgaaggctgagaagcccatggcctggacagccgtttccagaagaccgatcaagaagccgccgacagccgctcctgggatggacccgatcccgccgagcacggcggcaacgaaagccttgatccctggcgtcatccccatcagtgggtcgattgagttgtagtacaagccgatcaaaacgccggctgctccagccagggcactgcccagggcgaaagtaattgaaaccgtgtggttgatgttgatccccatcaagctggctgcatcgtagtcagttgaaactgaccgcatggcccgcccggtcttggtgtaattgatgatgtacatcaagcccagcgtcaagatcaaggtcgtaaccaggatgatcagctggatgttggaaatcgtcaccccgcccagatcaaaagtcttccgcttgataacctgcgggaagttccgcgtgtctgaagtgaccaggtaggacatcccgttttcaaggaaaaaggacacgccaatggcggtgatcaaggctgccacccggggggcgtttctcaagggccggtaggcaacagcttcaataatcacgccggccaggccacagacaatcatggctgtgatcaaggcggtgataaagccaaagtgcaggtagttgatcgtgtaataaccccagtaagcacctagcatgtagacgtccccgtgggcgaagttaagtagcttcgagatcccataaacgatcatgtatcccaaagccagcaaagcgtaaatgctgccgagggaaagcccatttatcaattgctggaaaaatgtttgcaagtttaaaacctccttgacttgcctgtggcattaccggctaaaaattaatcacttaaccgtgtaagccttgttgatcttgccgttagtcatttgttcaacaacgactgacttttgcgggttgtgcttggagtccatagtgatcttcccagttacccccttgaagttcttcagacttgccagacccttttggatagcgcttgaagatacttcgccttccttcttggccgcgtcgacgatcatgtaaactgaatcgtaagccagggagctgaaggttgccggttcttcaccgtacttagccttgtagatcttcaggaacttaacaacttcaggttccttggacttgattgagaagtgggtggtgtagtaaacgttagtggcgttcttcttaccggcgatttgggccagttttggtgaacccatcccgtcagaaccaacaactggaacgtttaagcccatttcccgggcttgcttgaggatcaggccgatttcagtgtagtagcctggcaggtagagggcatctggcttcttgcccttgatcgtggtcaaggttgagttgaagtccttgtcgcctgattggaagtattgagtagttacaaccttgccgcccagcttcttgaattccttggtgaaggacttggtcagaccagtaccgtagtcagtggagttgtcagccaggatagccacgctcttcttctttaaagtgttgtacatgaagtccgctgccttcttgccttggaatgggtcaatgaagcaggcacggaaagcgtacttttgcgtctgcccgctcttggtttgggtaaattcagaggcagtggctgatggaccaaccattggcacgccggctttggtcaggttggcgattgaagcagtcgcgtaagccgtggctgccgggccgacttgagcaacgatcttgtcgctgttggccatttgagcggctactgaagctgcggttgaagttgatgacttgttgtcgctgatatacagcttaaccttataagtcttgccgccgatcttaacgcccttcttgttgatttcctgggctgctaatacgacacccttcttttcttgctggccgtagctggcaactgaaccggaaagttccaggttaaccccgattctgatcgtattgtcgctggacttgttgccggcagttgagctggtcttagcggttgcacagccagtcagggctgcggcggacatcatagttgcggcggctacgccgaaagcttttttaaaattcatgatggttttccccatttcaattaaatacattaaacttcaacttctgtttttaacgcttaaacctaaattaaaaagtcttcactcatccagtgagtgaagactcttaatccggatcattgagctcgctcacaaatgcagacgaagaagagctcactcagagctctacataatttgcaagagagtaatgacggcagctgagaacagcatggcattattcatttgttgacacatttgacatttcataattctcagctccttttaattttaagttgcttttattttatttaactttttccttaatgtcaagctaatttatcatttttgtttaatttttctttttagcaaaagaaaaaggagccaatagctccttttttccagctttaaaagcgcttgccggttgcccggttgccgatatcacgccggtagaatgtctgcgggatatccagcttggccaggtaggcataaacgtgttcttgggcttcttttaagtcagctgcctcagcccggaccatcaagatccggccgccgctgccggccaaatcagcagccgggccggttacgttggcacagtcaacaaaaatgccatcttcagctggcaattggcccagtttttgccccttaagcggcttcttcggatagccttcagcggccaaaatgacgccgaggactgcctcatccttttcttcaacggctggcatttcctcatcatttacgcaggcagcaaccagttccgcaaagtcgctcttcaagcgcggcaaaacaacttccgtttccgggtcacccaggcgaacattgtattcgatcattttcggcccctgcttagtcatcatgaggcccaggtacaaaacgccgtggtagtcatagccgccagccagcagacccttggccgtcggttcaaccaactggtcaacgatttcctggtattcagcctggctcaattgcggaaccgggctgtatgagcccatcccgccggtgttcggccccttgtcgccgtcataggcccgcttgtggtcctgagccagaggcaggaggcggtaattgcccccctgcataacggcaaagacggagtattccgggccagtcaggaattcttcaagaactacctgcttttgccccttggcaaacatttcggtcaaagtactttccgccgtttcctggtcttcagcgatgatcacgcctttcccgccggccaggccgtcttctttcaaaacgactggcaagccaaagtctggcaaggcactaatggcagtttctgcactctggaaggtttcataacgcgggtgcggcacctggtacttttccatgaactgcagagcatagtcttttgacccttccaattgggctgctctggcattaggcccgaagatcttcaagtcaaaagcatggaagtagtcaacaatcccggctaccaaggcatcttccggacccacaaaggtccaggcaatgtcttccttaatagcaaagcccttcaaggccttgaagtcgtcttctggaatgccagtagctttaacgccgatcgcggccatgccggagttgcccggcgcgcagaagacttctgcaacgtgcgggctcttcttcaaagcgcgggcaacggcgaattcccggccgccagacccgactaccaaaattttcagcttgtctttcatttttttatcagcccttttagtgtctaaagtgacggacgccagtgaagaccatggcaataccgtacttgttggccatgtcgatggattcctggtcacggacagacccgcctggctgcacgatggccttgatgccgtgcttaccggcgtattcaacgcagtcgctgaacgggaagaaggcatcgctggcgatgactgcccggtcgtccagggcttctgccgcgtggtcgatggcaatcttttcagagtcgatccggtttggctggccggccccaacacccagggtgcgttcattgttagcgacaacgatcgcgttggacttggtgtgcttgactgccttccaggcaaagaggagactttccagctgctcttgcgttggcttggcttcagttacgcattcccagtcagcgaagtcttcgtccagaacatcctggtcttgcaccagcaaaccgcccatgacggatacagtttccttgctggttgcttcgtccttcttgctgaagtccagcttaaggatccggaggttcttcttcttggtcttcaaggctgccaaagcatcttcatcgtagtctggtgcgatgatgatttccaggaagatcttgtgcatcttttcagcagttgccaggtcaaccttccggttcaaggcaattaccccgccaaaaattgatacagggtcagcagcgtaagcccggtcccaggcttcttctaaagtattcccctggccgatcccgcatgggttcatatgcttcatggccacgacagttggcttgctgaattcgcggacgcatctcaaggcttcgtcagcatccttgatattgttgtaagacagctgcttgccgtttaattgttcagcctgcaaaactgagaaggcctttggcagggcatcttcgtagagccaggccttttggtggctgttttccccgtagcgcatggcttcctttaagtcgtaagttaaagtcagcttttccggagcagtttcgccggccttttcagtcaggtattgggaaatcaaggcatcgtatgaagcagtcaggcggaaggccttagccgctaagcgggccctgatttccaggctggtagagccgtctttttcaatttcagccaaaacctggtcgtagtcagcctggtcaaccacgatcgttacatcgcggtagttcttggaagctgaccgcaccatgcttgggccaccgatgtcaatgttttcgatagcttcagccagggtcacgtcaggcttttcaatggtctgcttgaatgggtagaggttaacgcaaaccaagtcgattggcgtaatcttgtgttccttcaaagttgccacgtgttccggcaattcccgccgggccaggaggccgccatggatgtaggggttcaaggtcttgacccggccgtcaagaatttccggaaagccagtcacatcttcaactgaaatagtcgggatgccggcttcatccaaaacgcgcttggtaccgccagttgacacgatttcgtaatcattggccaccaggcccttgacaaaaggaaccaagttggtcttgtctgaaacacttacaagtgcacacttcatttatttgttctcctcatcaaatttcagcaaagcttttctcaaggcttccggatacaggtggtgttcacattcgtgaattcttgcttccagagtatcaaccgtatcgtcgtcatagatcggcacgtgcttttgggcaatggccggaccagagtccaggccagagtcgatatagtgaaccgttaccccggtttcagccgggtggtcggcaaaggcccgttcaattgagtgcaggcctgggtaagccggcaaataagccgggtgaaggttgacgattctgccttcatattcgctcaaaatcgttggcccgatcacccgcatgtagccagccagggcaataaagtcgatttggtagtcctttaagacttgaaggatcttttcttcgtacttttgcttgccgccgcaggacttgaccgtaaaagtcactaccggtgtgtggaatttttctgcccgcttgatcaccggagcgtccgggtggtcacaaaagagcagggcaaggtcgccgggcaggtcgcccttttgaaaatgttcggccagaacttcatagttagttccgttgccggatgcaaaaattgctactttcattattctacctatttaataatgatcttctcgccgtcagttctctcactcaagtggccaacttcaaagaccttttcgccacttgccaaaagcagctgcttggcttcttctttcttgtcagccggtactgccaggatcatccccaaacccatgttgaaggtctgccagcagtcatcatctgacaaattgccgacttgcttgaggtagttgaagatgtccaggacttcccagctgccagcggcaatttctgcccgcaggccgtcattgaacatccgcggcacgttttcgatgaggccgcccccggtaatgtgggccacgccgtgaaccagcccttgcttgatcaaaggcaggacagacttgatgtagattctggttggagccagcaggctttcacccacgctcttgcccttcagttcagctggcttgtcagtcagcttgacatcatggtccttaaagaggatcttgcggaccaatgaaaagccattggagtggacaccacttgaagccaggcccaagagaacgtcaccagcttgcggagtgtcaactgacaaaaggcggtctttttccgctaccccaactgtaaagccggccagatcgtattcgtctggggcgtacatgtcaggcatttccgcggtttccccgccgatcaagctggccccggcctgcttgcagccttcagccacgccttggacaactgaagccaggagggctggatcgttgtgcccgcaggcaatgtagtccaggaaaaagagcggttcagccccttgagccaggacgtcgttaacgcacatggccactacatcgatcccaacggtgtcattcttgtccatcttttgggcgatcatcagcttggtgccgaccccgtcagtcccggaaaccaggaccgggtggtcatagcccagggaatcaaggtcaaacagaccgccaaagccgccaatattgcccacgtagcctggccgcttggttgaggctaccgcccccttgatccggcgtaccagttcatagccggcattaacgtcaacgcctgcatccttatagcaattcacgatcattcacctctgttttgcttctttaaaatttcttcaaccggttccacattcagcggttccttgatttgttcttcgtagtcgtacaaaggagtcgggtacttgccgtcaaagtaagcaaccgtaaggcccccgtttggcgcgtcaccggtatctggcatgtcgactgccttgatcaggcttggaatgctcaaaaagcccaggctgtcggccccgatcagcttgcacatgtcgctgacgctgtacttggccgccatcaagtcttttctttcagaaatatcaatcccgtagaagtgcgggtatttgaaaggcggagaagcaatccgcatgtggacggacttggccccggcttctttcagcatctgcacgatctgccgggaagtcgtcccgcggacgattgaatcgtcaacgaccacgatatttttgccgctgaccaccccgcggacaggagcaagcttcattttaaccccctgctcacgcagagcctgggtcggctggatgaaggtccgggcaatatattggttcttgatcaagcccatttcataaggcaggccggctgcttcagcataaccagtcgcggctgacagtgaagagtttggcaccccgataaccatgtccgcttcttctggagctggctgttccttagccagcagtatccccatccgctttctggcggtgtggatgttaaccccgtggataatggagtctggccgggcaaagtagatgtattccattgagcagacggccagctgggtttcagtcgtgtagtggtcaatcttgatcccgtctttgttgatgatgatgagttcacctggctgcacatcccggactagcttggcgtgtaccgcgtcaagggcgcaggattcgctggctacgacataactgccgttgtccatttgccctaaaaccaggggccggaagccgttagggtcaaggccggcatagagggtgtcattggtcatcaagaggaaggcaaagccccctttgacttcgttcaagctggccttcaaggcttcgataaaaggcatacggaccttgcggcggatcaagtggatcaagacttccgtgtcagagcttgactgaaagactgacccggaatcttccaggcgctttttcagcgtcttggcattggtcaagttcccgttgtggcaaagggcgatttccccgtcctggaagtgaaagaggaagggctggacattggccagggagtctgaaccggcagtaccgtagcggacgtggccgatagccatgttcccttttaaaaagtccaggtcagccgggttggaaaagacttctgacaagagcccccggtcacggaactggcggagcttctggccatcgctagccacgatcccggccccctgctggccccggtgctggagggcatggagaccaaagtaggtcacgttggccgcgtcaggaacattgtagatcccgaaaacgccgcattcttcatttaatcctttgatttcataaggcatggcagggcttcctcccaaatttgcttcaattccgctaccggcaagtcggctgcttggtccttcaaggtcagctttaggctatcgccagcagtttggccgatcttaaccgcatcagctgccaaagctgcagcaaattcagctgagtattcgcttggcacgctgaccaggaagcggcctggagtttcgctgaagagttcggcactggtcaagtcgcagtcaacttctgccccgatcccgtggccaaagctgctttcagccagactgacagccaggccgccttcgcttaagtcgtgggcgctggccacgtggccggcttccatttgggccaagaggcgcttctggtagtccttaatgtggtctaagtccaaatcgttcaaggacccggagatttccccggtcagcatcttttgcagttctgagccggcgtagtctgccccggtttggccgaccaagtaaagatcgtcgccttcttcttggaagctgtctctgaccaggtggtccaggttcttgaccagaccaaccatgccgaccattggggttgggtagatggacttgtcgtcagtttcgttgtaaagggaaacgttaccggaaacaactggagtttctaagacttcacaggccttggcaatccccatgactgagtggtggagttcccagaagacttctggttcgttcgggttaccgaagttcaagcagtcagtgatggccagaggttctgccccgctggcgatgatgttgccagctgcttcaacaacggcccgcttgcccccgatttccggatccaggtagatgaaacggccgttgccgtcagtggtcatggcaatccccttgtgggtgccgcggacccgcaaaacgccgctgtcttcaccaggcccgacgaccgtgctggttctgaccatggagtcgtaggtctgggtgaacatttccttagaagcgatggttggctgggccagcatctgcttgtaggtctttgccaaatcagtaatctcaggttcccaggccggcttagccgcgtcatcgatcatgtgctgcggctgcttttcttcgcttgactcttccaagacgtcttcagtcaggctggttaccgggatgtcgcagacaacttcgccgtggtggcgcaaaatgtagttgtgaccgttggtaatccggccgataacaacggcgtcaaggtcgtagaagtcgaaaatcttcttgacgtcttcttcgtggcccttcttaacgcaaagcagcattctttcctgggattcactcagcatgatttcgtaggctgacatcccgctttctctttgcggtaccaggtccaggttcagttccatgccggacttgccttctgaagccatttctgaacttgaggaaacgatcccggctgcccccatatcctggatgccgaccagccagtcagcgtgcttttgggtcaattccaggcaggcttcaagcagcagcttttccatgaaggggtcaccaacttggacagctgagcgttggctttcgtgttctgagtcaaaggagtgagaagcaaaggttgccccgtggatcccgtcacggccagtcttggccccgacgtacattacggcattgccttcaccttgggccaggcccttttgcatgtccttaacgtccaaaaggccgacgctcatggcgttcatgactgggttgcccttgtagatgtcgtcaaaagtgagttcgccgccaacagttgggatccccatgcagttgccgtagccgccgatgccggcgacagtttcgtttaaaagccagcgggtgtgggcgtcatctaattcaccaaagtgcagagagtccaaagtagcaactggccgggcccccatgctgaagacgtcacgcaggatcccgccgacaccagtagctgccccttggtaaggttcaacagcagttgggtggttgtggctttcagccttgaaaacgacagcttggccgtcaccgatgtcaacaacccctgccccttcaccaggcccttgcaaaatgcggggacccttggttgggaagagacggagaaccggcttagacttcttgtatgagcagtgttcgctccacatggctgagaaaaggccggtttcagtgtagtttggcaagcggtgcaaaagcttgtcacagatgtagtcgtattcttcttcagacaagctccaatcgagataaggcttcttttctttgatttcttctggagtcatttcctgcatcattacgcttttacctccgcgtggtccaaaattgacttaaacagatgcaagccgtcggtgttgcccaagagggcttcgactgcccgttccgggtgaggcatcatccctaagacattgcctctttcgttggtgatcccggcaatattgttcaaagagccgttcgggttttcctttgagtagcggaaaacgacctggccattgtcttcgatctgctgcaaggtttccgggtcggcgtagaaggagccgtcagcgtgcgcgatcggcaggttgatcttctcgcccttttggtattcagaagtaaagatggtgtcgttgttggctacttccagttcaaccgtcttgcagacaaacttcaaagagtcatttctcttcaaagcgcctggcaaaaggccagcttcggtcaagatctggaaaccgttgcaggtcccgaagaccggcttgccggccttggccatttcgacaatagcgggcatgatattggtaaagcgggcaatagcgccggctctcaagtagtccccgtatgagaagccacctggcagcatgacagcgtcaaagccgtccaggctgctttccttggaaggaacgtaggccacgtcagctccacaaaccgtgtgcagggcttcgtagaggtcgatgtcgcagttggagcccgggaattggattaccgcaaacttcattatttttcctccaagatcttgtagctgtaggtttccatgttgaagttgaccagcagcccttcagaaatttccttgacagtttcagctacaggcttgtctccttcttcaatagttacatcgaagaacttgccgaccttgacgcccttgacttcatcgtggcccaaagagtgaattgagttggtgatggcttcaccttgcgggtcgaaaactgatcgcttgtaagtaacgtaaatccgtacagtagtcatttgcttaatcctccttggccaaagcatccttcaaacgggccaaaactctttcgtaaacatcgatcaggttgccgatttgccggcggtaaacgtccttgtccatgtggtccttggtttccacgtcccacaggcggcagttgtctggtgagaattcgtcagccaggacgacttcaccgtttggcagggtcccgaattcaaccttgaagtcaaccagcagcatgccagcatcggcaaagagcttggtcaaaagctggttgacctggcgggagatttcccagatctgttcatgttcttcatgagtcagcaagtggaaggcaatggcgtctgattcattcatcagcgggtcgtgcagggcgtcgcttttcatgaagagttcttcaactggagtgtccagcttcttgccttcttctttcaagccataacgcttgcagaatgatccagccgcgatgttccgggtaacgacttccaggtcgatcatcttgaccttcttgaccaattgttcgtttttagacaagcgcttgataaagtgcgtcttcaccccatgcttcatcaaatattcgaaaaccaggctggaaatttccgcgtcaagttcacccttgttttggaagacatcgtgcttcaagccgtccaaagcggtagcatcgtccttgtaaacagcgcggagcacttctggatcgtcagtggtccacatttccttagtcttaccctgataaagcaattctgccattttttaccctccgattaaaacgaactataataatataaacaggaattactgttcgtaatttctttcttgaactaaggataacaacttaaaaaagtttggtcaagaggttagcgaacattttttagatatcgttccgcttacaatcggatatgcccgcattatttttggacaaaaactttaacaagcaaaaatcaagggataaaagccgaacaaaaagcggctcattttatgagtcgcttttaattatctagatttctctatccttattatatattggcaatcgcattgaaaatcattgcctttttacacttattccaaacctaggcgcttgtagatgtcgtcaacatggcgcaggtgccagtggtagtcgaaggcatcgtcaagatcagccttagtcagttgcttttgaatggttgggtctgcttcaaggagaggccggaatggaacttgttcagcccagcacttggccgtgtatggctggatcaagtcgtaggcagcttcccggctcatgccgctttcaaccagcttaagcagaacgcggccggagtagatcaagcccaaagtcttgtccatgttcttcttcatggtttccgggaagacatccaagttggccaggatcttgcccatccggttgagcatgtagtcaagaccgatggtgctgtctggcaggattacccgttcagcacctgagtgggagatgtctctttcgtgccacagggttacatcttcgtaggcagttacgacattgccgcggagaactctggccatcccgcagatgttttctgaaccgatcgggttgcgcttgtgcggcatagcggaagaacccttttgccccttggcgaagtgttcttcaacttcgtggatttccgttctttgcaaagaacggatttctgtagcgatgttttccaaagaagttgcaaccagggcgatggcagcaatgtattcagcgtgcaggtcacgtggcaggacctgggttgaaatttcctgggcgtgcagacccagcttcttgcagacatatacttctacttctgggtcaacttcagcgaaagtcccgacggcaccggaaatcttgccggcttccactccgcgggcagcgtgttcaaagcgttcctggttccgcttcatttctgagtaccagcgggcgaacttcaagccgaaagtagttggttcagcgtgaatgccgtgggtgcggcccatgcagaccgtatccttgaattcaagggcccgcttggccaggacgtcgataaagtcctggatgtccttgcgaaggatgtcgttagcctgcttcaattggtagccctgggcagtgtcaaccacgtcagtactggtcaagccgtagtgcacccacttcttttccggccccaatgattcagaaatggtccgggtgaaggcaataacgtcgtggtgagtcacggcttcaatttcgttgatgcggtcaacgctgaacttggcgttttgcttaatcttttccacgtcttctgccggaatgtggccaagcttggaccaggcttcatcagcagcgatttctactgccagccagcattcatacttcttttcatcagtccaaatggcacccatttctggtcgggtatagcgttcaatcatttattttccacctttaaaaaatcaacaataatctgttttttaattatacatcccaaactttggttgcggcaatctcggctaaagtcttgtccacatcatcagtcaggatcgtcacatgccccatcttccggtctctgcggacctcgcccttgccatagtcatggaaggaccactgcggcttttcggcgatcagattttccgtgccggccacgtgctggcctaaaacattgaccatgacgaccgggctgagcagcttgatctttggcaaaggccagttgcaaattgcccggttgtggacggcaaactgggagaagttgcaggcttcaattgagtagtggccggaattgtggggccgaggggccagttcattgatgacaattttgtcatctttagtaacgaacatttctacgcctaagatcccctttaggtcaatggcttcagcgatcttaacggcagcctcctgggccttttgggccaagtccggagaaatccgggccgggacgatgctttcatgcaggatttcgccctggttgatattttcgctgaccgggaagaccgtgacttggccatcagagttgcggccaaccatgacggaggcttccatacggaagtcgacaaatttttccaaaatgcagtcaccgtaagctaagacatcagcagtcttgtccaagtcggcagctgcttttaaaacaacctggcccttgccatcatagccgccttcacaggtctttaaaacagctggcaggcccaagtcactgacggcttcttccagttcagcccggttcttgaccgctctgaacttggccacttcacagccggcactttggataaaagtcttttcccggatccggttgttggtcgtgtaaaggagcttggtcccctgcggaataaagacctggtccttgacgctttccagggcatccaggtccacgttttcaaattcataggtcaagacatcgcttctaaaggccagttcatggatggcgtcgatatcactgtattcagcgacgatctgatcatctgcggcctggccagccgggcaagccggagttgggtccaggatgatgaccttcatcccgctggccttggcatcaaaagccagcatttgccctaattgcccaccgccaatgatgccgatcgtttggccgggcttgattttaatagacaaggtctgcactgctttctttggcttggtcgtgcatttccttgcggtagtccacgatcttttgctggagttctttgtcttcgatgcctaagatctgcatggctaaaagagccgcgttcttggcgccggccgggccgatggcggtcgtcgctacagggatgcctgctggcatttgcacgatggaaagaagggagtccatcccgcccaaagcgctggtcttggccgggcagccaattactggcaagggagtgttggcggcaatcatgcctggcaggtgggcagccccgccagcaccagcgatgatcaccttagtgccgttttccgctgccttttgggcaaaggcgaacatttcctccggcattctgtgcgctgaaataacctgcttgtcgtagtcgaccccgaacttgtcgagcagcttgcaagcttcctgcatatagccccagtctgacttggagcccattacaacactgattctactagtcacgattattcctcctgtctgctttcccttaggataacagaaaacgggacttttttaaagagaaagatgaactatttgccaagagtttcttattaacattcgcttttagtttaaaaacagtaaaaaaagaccaccacgtggtggtcttaaatgccataaaatcaatcttccttttctgcccgccagtaatgatgaccataagggtcccgttccaagcggcccgtgtcaaccaagtagcggcgcaaaatagcgtagtcgtcatagactgctgccaagatctcattgacttccttttcagtataatcccggccaaattcaaagcggtcgatcagcgcgtcaaacaaggcatctttcgccttttgcttgcggggaatgacctgcaggcggccatccttgaaaaatcctgtaatatccatttaaatctcctcaacttccaattttttactctgcatgccaaaaattgccagcaaaaagataactaagcccaaaacagccagacttacccaggcaaagccgatgccatagcggtcagacaaaaagccgttaattgccaaaatcacgacttcggcgccagcgtccaaggcattggcaacagacataatcgtcgcccggcggttctctgtttgaatcgtcgtttgcaaaacaatcccgcccagcatgttttccaagctgccaaacatggtatggagcatgaacaaggcgagagacccataataccagtttttcaagccaaccacgccgagcaaagtagcagccatcattaccgtgctgacaacaatcaagcgggtctgtcctttattagacagcggctttttggacacatagcggttgtaaagggaaatcgccagcatcccggccaggctcatcaagacagaaatcgtcccggaattgacggtcttgcctctttgaaagtacatctgccactggtcaagcggacctgctgaaataattgccacgggaagcagaagcaagatccaggcaaaagtcttctgctcctgcttgaccgtgtattttacatcggcaaccaagttcagcttcggtatcccttcttccgcctcagccaggttttggctgtcatatttcaatagcgggatgatggtcaaactggtcgcgagcaaaaaggccgcaccgatgagcaagggcagattcaagcggatattgcctaaaatattagccccaacaaaggtggcagccatagtcaaaggcgtgccaataatactgtaaccagagaaaatagcgcccagctgatctttttcaccatgctcaacggccttgttggcaatccaggaagtcatggtgcccgattgcaaggaatcccccagcgcggtcaagaccccgctgaccgtcatccacaataagttcataggactgagtgccaaaattatcaaacctaaggctctgatgatcccgctggccatgatcgtttttaaataaccaaatttgtcagcaatgtagccggatggtatttcagcaaaaaaggtgaccagccaaaatatctctaagaaaagattgatctggctgtagctatagccattatgccgcataaacaagtagatcgttccgctccatagcgaggtcccgatcgtatataagatgctaacgtagtaaaaaatatacttgtatttcttcatgtcttctccagtttgttatctccataaatccgctcttaccgcgactaagtatacctccttaatttaccatctttctaaaaaaattccatctttttcttcatattatattaataataa

SEQ ID NO: 2181 - DNA, 15754 bp, Unknown
  gut microbiota DNA sequence
ttggatcaaacattgtttgacccgcacactgcgaaactttgttcagttttcaaagtaccaacttgcgtcaagtgacgcaacgttttatatcttactcgcttgtttgattcttgtcaacaagttttcgatattttcttttttcgtgtctccggcgaattccttcttcgccgcggcaacaaatattagtatactcgttatttttgaaaggtcaaattagccttttcattcgctttatcatgggtacagcaggcagagttgtaatattttgccttgccgcttctgcttcttttgttctgctttatctttctttttaattctttaatgaattctttgttcgctttttacgctttttaccctttttaccgggaaaaatatttttattttttctgttttatctgctctttatcatcccctctttttaaattgtcactttgccaagccgcgaataagctaaaaacgcctggtaatttgacaaatctttccagcctgctacaatggctaaacataatcaactagttatggaaaggatcctgtcaaccgtgaaaaaacgtcagaaaaacgacttcagcaaagaaattcaagtcaaacattttaacgagctctctgcccgggaggtcttctgcctgtccagaatccgcgatgacgttttcgttgccgagcaggaaatcacggttcctgaactggacgaccaggacctttctgcctaccatgtctttcttttaaatgaagaccaaagcaatgccctggcggccgcccgcttcttcagcgaagaaggccgtttctacatcggccgggtcgccgtgcaaaagactgcccgccaccgcgggattgccagccagctgttaggcgccattgaaaactacgttttggcaaataacttaaccaaagaactttatctgcacgcccaagccagtgcccgggacttctacctggccaatggctaccacgatgtcggccccgtcttcatggaagccggcatcccccaccaaatgatggctaaaagcctcgcctaagcagccgcaaggctgcttttttcatgcaaaaaactgccccgggagaggtcccggagcagtctggcgatttgtgagttagtaaagaaagttttttaaaatagaggagtaaaagttttggattaaagagtaatgttaaaaatggtaaaaatcatcacgctctttagttaaaggcaatttcctgcgcgtcgtcgcccgcctctacagggcgcgggtcgacatccttgacttctttaagtaggtccatgttggtgtaaaccaccatgaccgtgttgtccaggccgtggtcagccacgtcggcgatgtccatttccgccagcttgtcgccagccttgactgaatcgccttgctcaacgaagagattgaagggttcccccttcagttccaccgtgtcgatccccaagtggatcaagacttccagcccttcggccgtcttgatgccgatagcgtgcttggtcgggaacagggtggtaatggtcccggaaaccggggcaactacttcctggccggtcggcttaacggcaaaaccgtcgcccagcatcttttgggagaagacgtcatcgctgacttcggacaggggaatcagattgcccttgatgggcgccttgacttcattgccttttgacttggactttttaaagaaattaaacatgaatatcaacctttcaccgctctaaaggcgagaactacatagaacacaaaacaaattacgaataaagaagcaatcaagtaggtcaaggacagcagctggctcggctttaccttgctctcttcaggtaaatcctctccccgccgcagggcaaaaatagcgaagaggagacagaaccagttgccaacgatcagctgggtccacagctgcagcttcataaacttcatgtactggcgccggtcggccaagagggccccgccgtcgatccagcagaggtaacccaagagaaagtcaccggctgccacgatgattgacaccgtggtcgcgggactggccgcgatggagtcagtgatcgtctgcttggccgccccggcccgcagctgcaagagcagcaggtaggccagcggggcaaaaaagaggacgaaggtgtagatctttaatattcttttcggcgtcagacgggcagacttagtcaacctgtctagccaattcaaagctttctcctgcattattcatcctcttttctcagccactcgcagtagccgttaatcaataaatcaatcattgtgtaagccggactaaaagcccagttcttggtgctgatgctctcatggaagagacttggctggaaaaagagactgtagtcagacagactggccagccggctctccttgatggtcgtcagcgaagtaatcgtcaaatgctcattgagcaggtgcagctcatccagtagctggcacaagtcaggatcttccccggaaaatgaaatcacaatcaattggtcatggtcttgcagccaattcttcgacatcttcaattcactaatcgctgatggcatgacaaccgtcggcttgcccacattcaccaggagctggttggagagatagctggcgatagacgcctgctgccagccggtggtgtaaatgtagatattttttgtctggtttaaggtcgaataaaagctttcaaaatccagtgttctgaaatagctgagctctgagcgcagattcttgaccaggcgctcggcgaaggtatcttgctgcttaaccatccgcttctcccccttggaaaaatctgccagctcgtatttcaattcgctgtagccacttagaccgacctttttgcataagcgaaaaatggccgattctgaaacataaagcttcttggccaatttcgccagactgagttcgctgcattcagcagcattgttcagcaagtaattcaagatcttcttatccgatggattcagatcacttgatttttccacgattcgtgcttttagtcctaccataaaagtctcctcttgctaacttgttgacgttttcacctagttaacagaatagcacttttatgggcttagaccaatttaaaaacttacataatttccttcatcttgtcgacaacccgttcagcttccaggccgaccacgatgtcgatttcctggtcatcccgtctttcaacggcgctggccccgaacttcttgaagtcgtcgtcgccggcaaccttcttagtgtcaaagacgtggactcttactctggttgagcaggaagtcagttctttaatgttgcttctgccgcccagcaggtccaggtagccggtggccttttcttcatcagggtcgacttcggccttggcaacggtgttgccgctgtcggcaataatatcttcaattctttccagaacttgggcaacgtccagaccaacgatgacctggatggctgaaccgtgacggacaaccccgactgcctggttctttctgaaggcagcatcggcgccgaccttgtcaggatccttgacagttacccgcaaacgggttgcacaggaagtgatttcagcaatgttttccggcccgcccaagagagtcgcgtaagccgtagctctcgcgatgtatgggtcagaggagttttgcccggcagcttcagcagcttgttcagcagccttggcttccttgtattgcttcttgttcatcagcttgacttcctggtcgtcagcttcccggcctggagtagcgtagttgaacttgacgatcataaagcggaagatgaagtagatgatcacggcatagatcagaccaatgatgaattgggccatgtaggtgtgccagtggttagcccacagcggcagccagttcatggaagcaatcccgatggccccgtcagtcatttggccgacaacgccgaagatgtacatggtggtgttcatggttgcggccagaactgagtagataacccagaggattggagccgcgaagaggtaggtaaagtcaacaggttcagtaatcccggccaggaatgaagtcaaagcagctggcaaaagcaaggctgaagtctgcttcttcttgtccttcttggcagtgtggtagaaggccaggcagatggctggcacaaggaagactttttcattcccgtaaagcatgaagcccatgtttggagccaggctcttcaggctcttagtgctttcggcaaattcagtcaagtgcttgagccaccatggttgcaagcccccggcaacaacggccggaccgtattggaacggaatgtaaaccaagtggtgcaggccagttggaatcaggacccggttcaggaagttgaagatccaaaccccgatcaagccgctggatgccatgaattcctgcaaaccagtgatgcccatttgtacctttggccagataaggcaggtcaggaaggcaactgggaacatggccacgaagcctaagatgacaacgaaggctgaaccctggaaggtacccaggaagtccggcaatttcttttcaaagtagcggttgtgcagccaaaccacgataccggcgatgaccagggaaccaacgatactggtgtccagggtcttgatcccggcaatcatggtcaaaccattgttggctgagttggccacgatctgggtcttaacgtagtccttaaggccgaagaaggcaccccagtgggtcaggaaaccagcgataaagtagttaaaagtccagtaggtaacgatggcttccatggctgcccgcccgtgggccttcttagccagcccgattggtaggccgaccacgaagagcatgtcaacttggttaaagacggtccagccaccttgttgaacggtgtcccacagaccgtaccagaaggtattggtgtttgccagtgagccaaagatcaacgggttgttgaacaggctggttaaggcaaccacgataccggcgaaagagaaaagcaggacaggcacgaacatcgccgccccgaatttctgtagtttctgcatcataagcaatcttcctccttgcttctttttatttcaattcattctgactacttcaaatccggccagtaaggcttgttgacgaccatcatgtcgtccaggatcttcttggccacgctagcgtctggaacagtcttgttcaaggcaaaggcctgcagcatcttgatgtaggacttttgctcataagcatcgacaaccagcttttcgcaggttacttgttccatcatcagacccagttggaagcggccggcttcaccgactaccagcggctgcacgccgtttgagccaaagaggcaaggcacttcaacgatagcatcgtctgggaagttgcagatggccccgttgttcggaatattggccaggtacttctcgtgggtgttgaaggcgatcgcgtggcagatgtcaatgatgtagttggagtgcacttcgctttcccaaaggttgcccttggccgtgccttccttgacgatccgggcgcattcaccgaagacgatcttttgccggtattccaggatttcatcggttctggtgtagtgcgggttggcgttttccacttcgtattgcgggaagtagtagtactgcatgtagttgtttggcagagtcgtcgggtccaaagcgtagcagtcagcaaccttcttgaaagttgcgacccagctggcttcggtttccttgtcgaagtctccgcccacgtagtatccgttcttcttgacatgttctttcaaaagcggcattaggtcttccccggtcttcttgttggtaacgctcttccaccagccgaagtgattcaagccgtagtaggtaaagtcgaggtccttgaagctcttgagcccggcaatggccgccattctgcccatgtcatcgattggcatgtcgcagatgttgataaccttggcattcgggcggaagcgccggcaggcttcagaaacaatcgcgatcgtgttggagtagttgaccatccaagcgtttggcgagtacttttccatgaagtcgatgatttcaatgatggctgggattgaccgcaaaccgtaggccatgcctccggggccggtagtttcctggccgttgaccccgtactttaaaggaatcttttcatcctggttgcgcatttcgtacttgccgactctgattgagcccaagacaaagtcaacatcagtgaaggcttcttccgggtcagtcgtatactcaaattcgacttgcggtgccttttccttgacgatgatggcgcaggcgtcaccgatcttcttttgccggtcagcatcaatgtcgtacagcttcagtttccgcaggggaagcttgtcttggttggcacagagactgatgacaaagccaggggtgaaggtgctgccaccgccggcaataactactgaaaatttcttgtctgacataaatcaattgctccttacaaaagacattgtttcatcacatggggcctttcaggcgccccgacctcccgtaagcttgcttacactcttattatggcaccgcttccagatatgtaaagcgtttacgaaagtaaagaaccatatttcaaattgtgaaaagtatttcgcaagggcgaaaaatattttggaaagctgtctagactaattttcgcaaaggaaaaaggcactggtcttgccagtacctcgagattgacttaatttaattaactaaagctgcaggccatttggcagagccaaggcaacagcaaagaccaacagagcagcgccgatcaaccaaaaagcaattttctgcccctttggcagctccttttcaacaccaaaaattaccaagcccaggccgatcagtccggacaaaagcatgatccaaaaacccattgtctatcctctttctattactctgaatgaattttttgcttacacttattctacaactaatgccggcctttgcaagggcttttttggaaagcgtaatatgcagataagtatacgcgaatacaaaaaatccgccggaaggcggattccttaaattctgtattttctgcgcagttcccggtcctggtcgcgcttcttgatcgtttcgcgcttgtcgtattccttcttaccctgcgctacgccaatcaaaaccttggcaaagccgtgcttcaagtagaccttgagcggcacgatggtcatccccttttgggccttcacatcagccagtttggcgatttccttcttgtgcaaaagcagtctgcggcttctcagcgggtcatggttgtagcggttgccttccttatattcatcgatatgaacattttccaggaaggccgacccgttgatgatctgcacgtagccgtcacgcaaggtcacgtgccgggctctgactgacttgatctccgtccccgtcaaagcaattccggcttcataagtatccttgatgaaataatcatgccgggcttgccggttctgcgcgaggacattttcatccttggctttttgtttcataaaaaatcctcccgcttacatattaacggtttggccgccggcggttgcctctttcactttgccccagccgctggccgcggttgttgcggcttggcttgtggcgccggtcaccgctcttgtcgcggccgccgtaattgctccggcccttgaagttccggtccccgcttcttctgcccatcccgcggtcattgtggggccgctttttggcatctggatcgtaaacttcaaagtctagctggtgctgctcaacattcgcattggtcaagacaaccttgatcggcatcccaaccttatacttcttgtgggttgcccggccggtcaatgtcatggtcttttcatcgtatgagtagtagtcgtccttcaagttggagatgtggatcaaaccttccaccgtgttctccaactgcacgaacatcccaaagctggttactgatgaaataaccgcttcaaacttgttgccgacctggtcagccatgtactcggtcatcttcaagtcgttggttgcccgttccgtatcgattgaccgccgctcttgcgttgaagtctgatcagctacttccggcagttcttccttaaagtgctccttgacctcatcccccattccttcttccaggtaggcgtggatcatccggtgggccatggtgtctgaataccggcggattggggaagtaaagtgggtgtagtacttggccgcgatcccgaagtggcccagcggatcttctgagtagtgggcctgcttcaagctccgcaacatcatcatctggagaaccgcttcttccggcgtgcccaaagtcttggtaaccaccttctgcaagtccagcggcttgatgtcgtttggatctgccttgacgttcaagccaaaggcactgcagaattcaaaaaatctggtgatccggtcagcttccggcgtttcgtgcacccggtaaaggaaaggcaccttttttctgtagtaggcttctgccacagtttcattggccaaaagcatgaaggattcgatcatcttttcggccgtcccccggctgtgcaggacgatgtctaccggcttgcccttctcatccacgatgatcttggcttccggttcttcaaagtcgatggccccccgggcgtggcgctggttgtacagggcttcatgcagagctgccatgtccttgagcattggccgcaccttaacatacttgtcttccaagtcgctgtccggcacgtcagcgcgcaaggcctggttgaccttgttgtaggtcaaacggccgtgggaccgcatcacggccgggtagatgtcgtaagatacccgctcaccttccggggtgatttccatgtcacaggacagaaccaaacggtcaacgccttcgttcaaggaacagatcccgttggacagtctgaacggcagcattggaataacccggtcgaccaagtaggtactgttgccccgggcaaaagcttcccggtccaaaggcgttccttctttaacatagtgggccacgtcagcgatgtggacgcccaggtggtagttgccgttgtccagcttccacaaaacgaccgcgtcgtcaaagtccttggagtcatccccgtcgatcgtgacggctggctggtcggtgatgtcccgccggcctgcttcatgcctctcttcttcagttacgtggtccgggatggcattggcctgctctaaggcgtcttctggccattcagtccggatgtcgtgttccgctacgatggacatgatgtccacgcccgggtcgttcttgttaccgataatttcgacaactgccccggtcatctggtctggcaagtcttcggtcgggtaggtcttcagagataccttgaccatgtcccccatttgcgggatcaagccgttttcagatacatagacccggtacttcttgaacttcttgttggtcgaaatcacgtagccggcaaagtggctgatcttgacctgcaggtcttccaaaggggtgtattcgccgacaatgctgctggccccgcgctccaggatttcttcaacctgcccttccggccccttcccattccaagggttgccgccggccgtgatcttgaccttgacccggtccccgtccaaagctagcttggtagcgtcagagttgatgaacacgtcatcggcttcttcatcatctaagcggacaaagccaaagcccttgtcgttggcccggaagaccccttcgacttcagtattttcctgggccagctggtagcggccgttgccgtcagtgatgatctgctttttctgctccaggtaggccagggccttgaccaggtcggtaaagttgcccaagcggtcccggcgggcctgccgctcgatctggtcaacgctgaattgcttttgcgggttgtgccggaagatctccaacacgcccgccaatacagtctcgttttgcgccattattttctccatctgtattttcgttaaaaaaacctcccatcaagcaagtgatcgggaggttaatgattatttagaagacaggattgccaaaataatcgaaaaagcaaagaacaataccagtagaactgacgtcactttttccataaaggcttcaaagccccgcttcttggtctggccgctaaagacggcgccgcctgacaaagcgttcaaggcatcttgctgcttctgtggttgcatcattgtcgcaataatgatcagcactgaaacaatgatcaacagcgtcataataaagttgtacaatgcactgcctccaatttattctacaattaccttactattctatcatagatagacttactttgtcttagtttttttcagttcgggcgcgtcagttttataaagactgcttgcgtccttcttgcccagctggctctttaagctggtcttgctcttaccggcttctgccagcttctttaaagagtcagtcttattgtagtcatagtcactggtcttgaccggagtaaaccaggaggggtggtagaagcggagcaggttcccggtcacgacccggtcagacagggtcagctgggtcaaaacctggttggcgatcaagcggcaggccttcttttccttggcgccggtgaccttcttgcccgtcttggtgtaatagtagctgctccccaccttggtgtaggtcggggtaataaagttcccattccgctgggcaaccacttgcgggttctttttgcttaacaggtcatggccaaacaaaatcaagcccttgctcttgatccccagcaggttgagcagggtcggcatcacgtcgatttccccgccgtaggtatgcttaatgccgccttttaagttgcttgaataaaacatgagcggcactctttgctgctgctggtcgtcaaactccccgtaatttttcttcccggtcagctgggccatggcctcgttgtggttgttggaaataccgtagtggtccccgtagaagaccaggagggtctttttgtccaggccggtcttcttcagccaggtcatgaattcgccgatcgcctggtccaggtagtgggccgtctgcacgtagccgtcaaccgtattgtccccggtcgtggtcttcttgatcgactggttctgcttgtccagggtatatggatagtggttggtgaccgtgatcatcttcaagtaaaaaggctggggcagttcagagatgtacttggccgactgctggaagaagatcttgtcctttaaaccgtagcccaggtaccagctgttttggtactggtagtagttcaaagaagcgaaataatcatagccaaaagacttgtaggcattgttccggttccagaaggaccccgtccccccgtgcataacgacggaagtatagccgcctttttgcttcaaaatagccggcatggattcaaaagtattgctggtcccgtaagtcgacatggctgaccccgactggaccccgaagagggagttttccagcatcagttccgcgtcagaggtcttcccctgccccacctggttgaagaagttgtcaaaagccagagtgtgcttggaatggtagatcttgttcaagttaggcgtgacttccttgcccttccacttgtagccgatcaaaaactgctggaagctttccaggtggataacgatgacgtttttccctttggctacgcccgtataagctgaatttggctggacgtagttggccttgaggtactttttaacagaactcaaatccgacaccttggcattagccatctgggcgttggtctgagccgtctttatcccgtcataaagggcatattcgttgatccctaaatacttgacgatgtagttgttgtcaaaagtccgcgtgagcaggcctgaccggtccttttgggccaagaggaggttgccccccatcaagagcagggccgtcagttcaatggcgaccttccttttccaggactgggcgtagaggtccattttgaaaaacttccccagcaaaagccccagcaggatcaaggggtcagcaaaggctaaaaagtcgctgcccttgaggatgccggcaatgcttttgcccaaattttccgaagcgctgcccgaattctgcagcagagagaaagagaggaagttggagaattcccggtagtaaaggatgttggcgaaaagccaggtagccaggaggaagtccaggacaagcatagtccagtaggacttgcgccccttcatcagcatccccagacccaggatcagcatccccgacggaatagggttgatgagcaagaggaagccctgcatcgggcccgtcgcccccagggtaaacttgctcagatagattaggtaacacttgagccagtagccgaagaccgccagagtaaagaagccgttcttcgacgtccgcagccaggtcccaaaggccttgattttctgcatttctttcacctcaaaaaatcagtcccgcaacttggccggcttgaaggaccagccaaagatgccgagaatcatgccgaagaagtaggtcgcgaaccgccacaagaacatggccaaaacgactacccccggctggctgatgaagctggcaaagagggtctggaagctgaattccgccccgccactggccccaggcaaaggaatcacggccatgaacatgatgatcaagatcgtcatcaaggtcacttgaacatagtcaactggctgacccaaggcccgcaaggtcaggtaaggagccgagtagtagcacaggagctgcccaaccgtcaagagaaccacgccccagagctttttcttctcagccttaagggcctggctttccttgtagaagctttccacttgctccagggtcgacttctcccaagcctgggccctttcctggccaaaagtccgccccaacagcttcatgacctttttaacagccttaaccgtccagttatgggcaaacatggctaacaggagcaggatgatggagaagacgtggagggcaaagcccaggaaaataaagatggctaaagccgagaacttgccggccacaaagtgaaagccgaagataaaggccgtcaaataggcaaataagacaaccagctggtagcagatgaacttcatcatcaaaatcgaagttgcccggccgccggccatgcccatttccaccatggccgccaattgcgacggctgcccgccggtggccatcggggtgatcccattgaaaagggcctggatgagcggaatccgcagataagaccagaagctccgcttggctgtccccggccttttggccaaaagatggaggatcaaggcctcacagacataggacaaggccatggccaaaaagaccaggaccaggcgccagggaataatctgcccggctgccgcctttaaagtcgccattggcgtggcccggaggtcaaagtacaaaacaagggagctgatcaataagacgatcaggactccccacagatttttcttattcatagctgatctgccccaattcccggcccagctggtactgctcctggtagaagtcccgccagatttcagccaggtggtcttcagaatactgctggctggccttgcgggaaagctcctgctggcgggccaggacttccggatgggtagccgcgaagcggagctgttcgttcatttcagcagagtccttgccggccaggtagtaaccgtcaatgatcgcccggtagaggtccaggtctctgagcaagaccggggtcccgcagctgaaggcttccagaactgacatcgggaagagttcgtcaaaggacggcaagaggaagaggtcggccatgttcaagtagtcaaccagcttttcccggtcgatgatgccggtaaaggtcaggttcttgggcgggttctccaccagctgcttgaagtggtcatagccgtccgtgatcttgccgaaagaaaagccgcctgcccagataaactggtagtcggggttggcttccgccaacttggcgaagtcgtcgaccccttttctggcctggacctgcccgtcgccaaagacaacgaacttgtcctgcgggatgcctaattcctgccgggtggcgttctttttggcctgagtctgttcatagaactcactcttggccacgaagttcggaatgtagcggatcttgtttctgtccaggccgtattcagtcagcttgtcgatgaagatcgggttgacgaccacgatctggtccatccgcttgtaaaagtcgatcacgtactggtagaagacctttttagccacccctggcaatttgattgaaccttccagggtatctggcaaaaagtggacatagccgatcttgcggcctctggctggtgaaaagctgttggcgaagtaggtcgggttgatggtgtggtagtgggtcaagtcgcttctgccgtacttgttgatggtcacgtagaaatcatcgaccaggtgggtcctgagaagccgaatcagttccaggtaggctgccccgaccccttggccggcaactgagtccgcctgggaaaacatgttgattctaatcattgctgtcctcttttttcacttgatagttgtcaatcgcgtactggtaaaacttgcagacctcgctggcaaagtggctggcggaaatttcttccagcttttttgccaagagctggggcggaatctcctgccggccctgccgcaagtaagccgcgatttcttccttcatctgccgcaggctttcaaaagtcaagccgtaagccgggtcattgaagacctggtcggtgtagtcggtcttgtaaaccacgcacttgcgtccgctgcccagggcttcgatataagtcagcccctgggtttccgtgtcgctggctgagacgaagaagtcggccatcttatagtagctggcgacctggtcatggggaatattgccggcaaaaatcacatggtcttccaaagtcaggcgctcaacctgctcttttaagacatccgcgtccgggccgtcgccggcgataacaaagaccagcttagggaattcggtcaacaggtctggcatgacccggaggatgcggtcaatcttcttttccgcggctacccggcccagggtgatgatcacctgggcatccggggcaatccccagtttttcccgcagatccgccttttccgggccagtgatggcgtccaggtcaaccccggtaggaatcacccgcatggggatctccaccccgtagcgggccaataaagccgctacccgctggctgggcgcgatgaccccgtccatattcttcaagtagctcttggtgaactgctggacatgaactggccggagcaagtggccgtttaagacatagtgcaggtagtcttcgtacatggtgtggtaggtgtggatagccgggatgcccaattgccgggccacgtacttgccaattaagcccatggaaaattcggtctgggtgtggacgatgtccaggttgacctccttggccaccttgaccgcctcaaacaggccccggaaagcaatccgccgctcagagaagccaatgaagggcacggagctgaagcggaagatgttggcttcaaccgtgtccttgtcgacgttgggatcagttgtcgtgaagatgaagacattgtgaccctgggcctccaaagcttctttaagggttttgatcgacgtcgctaccccgctgttttgcgggaagtaggtgtctgtaaacaaaccgatattcatgtgctttcattacctccatactaaaagacattatagagaatcggcaaaagaggtgcaaatttctttaccaaaatccaaagaataaaagatatttgctgcagggaaaaagataaagataaaagaaaaacgactcccaagaggaagtcgtctcaagcgatagcggtgatcggggtcgaaccgatacgtccgtaatggacaccagattttgagtctgacgcgtctgccaattccgccacaccgccgtgatattaaacttgaatagcggtgatcggggtcgaaccgatacgtccgtaatggacaccagattttgagtctgacgcgtctgccaattccgccacaccgccatgctattctacttggcc

SEQ ID NO: 2182 - DNA, 17564 bp, Unknown
  gut microbiota DNA sequence
attgccgtcttggcaaatcatgagcatcactggcaaagaaagcacattgtccagccttgataaactcccggctgcaatcttcgatttctttaccaaacaatccggtatatgagctagcagtaatctgcaccaaaactcccatttccaagaattcttgcagcttctgcggatttgccagaatttctttattccgttctgggtgaacaacgattggcgtaatccctcttctggtcagttcgtacaccatgttcttggtgtaatgtggcacttcattgcttggtaattccaagagcatatagtgaccatcttcgtcacaaaagaggatgtcatcattgtcaagagcttcagtcaagccacctgataatctgacttcatgtcctggaaagaccgtcagcggaatacccgcttggtcaatccggtcttgaaactcttccgtcaacttgatcacatcttgcttgtggttggtgtagcggccatttaatgtgtgtggagtacacaaggcatgggttacgccatccgcaaccgcggctctggcaagcttaagtgaagcctcccaagactttgaaccatcgtcgatccctggtaagatgtgacagtgtaaatcaactaccggcatgagctacttctttctcccaaagagacccttcttctccttttcttcgccataaccgtagccgtaaccataaccgtatccataaccatatccatagccgtcatccccatcggcatcaacatcgttcataacataacccaagattggtgacttagtcagcttaagcaactcaactgcccgcttaaccgctaacttctgtgaatgtgcctggcgcacaaccaagatcgtcccatccaaagaactggtcagttgctgggtttcggccgcatccaagatcggtgctaagtcaagcacgaccatatcatattcttgctttaaatcttcaatcaaatccaacatatgcttggaagacagaagttctgacgggtttggcggaatcggacctgccgtcaagattgacaggttctctacgccacttttccggatcacgctgtttgcgtccatttccttagaccggctagtcaacaaagtggtcaagccgttgctgttggatacattgaaagtggcgtgcatagttggccggcgcaagtccgcatcgatcaagatcgtcttcttgccggcttgcgccatggtaatggctacattagcactgaccgtcgacttgccggcactggccatggctgaagtaaaggcaatcgtctttacttccttatcaacgttcataaaattgatattggttcggatgtttctgaattgttctgaaataacgctttgcgggttggccaaagtaatcagcttggccccgttcttcatcgtatcgttgtctaaatgcttctttctaccgaatgccatgctaacctcctaaacccgtcttctggaactgccgcgcttttcagccgtcttagccgtaaaggtccagtcctttggcatcgtgatatgtgcgatttcacccaagttggtcaagccaagttcattggtcatgaatgaatcttcacgaactgtcgtatctgacaagtccttgatgataatgatcaacaggctgattaccaaaccagccaagacgccgatagccgtaatcaggcttaccttcgggaaagacttagttcccttaggggcttctgcaacgatggtcacgttgttaacgtccatgatcttaggaatctgttccttaaattccttggcaaccgcgttagcaattgcttgggccttggctggagtttcagctgtagctgacaaggttaagacctgggaagaagtcgtagtggttactgaaaccgcgctagccaattcactggctgagactgagtaactcttgctttcccgcttgtaaaccgctggcttagccttaaccgccttcttgaccaaggttctggtaccatcatcattagtccggtaaacggccttcttagctggagttgccttcttaaccagagttaccgggtttgccaggtacttggatgcaccctttaaaataacgttactagtgataatatccttgtaagtagtaacagcgttaatgtcagcttgctggttggcataagcttggttagcgtctgttgacttacggttgaccaagagttgtgtgctagcagtatacttgggcaccagaacatattctgaaaccccataagcgatcaagcccaggccgatcatccaaatcaaaatgctaataatgtgctttctgattaagatgaagagcctgcgcaggtcaatggttacttcttcattattctgttgttcagcgctcactagttatcctccttataaacgttgacattcttaatttctaaagtttgccggatattgttggaaatccgctgtctttccttagtcgacatgatttcaacttccatgttgccgaatctttgattgttgacgctgctgctcttcccttgagcgtagtctgacttgacattgtcagtcgcaccttggtaattcatggccaacttaatcatgtcgttcaaacttagatcagtctgcatgctgtcacccaaagattgcatgaatgagctgtttaagatggtcttgtatgacacgctcttcttaatcgcagccatcatcaccagacgttcacgctcctggcggccgtagtcttgccgcggatcaccgtggcggagctggacgaaagccaaagccttcttaccagaaatgtggtacatctgccccttcttgaaggagtagcccatattatcaaaggtcaatggagagatgacatccaccccgcccatcttggtgataatcttcatggtacttgcccagttaaccaggacataaccatcaatcggcacgctgtagtacttatccaaagtcttgatcgtctcgctaaccccgcccaaagagtaggcactgttcagcttgatcggtgaaacctccggatagtccggcaggttaaccttggagtcccgggcgatcgtggttacccgtgtctgcttcttgcttgggttgaccgtgacaaacatcatcaagtcagtcaagccgtggtagttctttacgctccgtccttcagccccggtgtcagtccccagaatcaagaggttgactggcttcttggcatccaggatcttgtctaagctggaccggttcttgtttgacttggtagactttgagaccggcgtgtacatcgtcgtcgctgcatccctggcattcttataagcatgaccgattactaataacgctgccaacagcaagaccccaacaattcccgcgatccagcggccgatatggcgcttacggcggcgatgatggtggtggtgatgaacacgactttgatcaggttcattcataattatcttttcttactctccttatattccatactcattttttatctctattcttcctagaacataactgttattgttggataagcattgctactatcacatgcgcaatccatgatattatttcattatacaacatgcgaccttcccaaaaaaggtttaaatcgtttccaatctatttccatggatcaaatctccttaacatttatctgttttagcaatttccacctaaatttaggcaaattcagtgctttttttctccgcttctttacaatagataataaatagatgtacaaattcgttatctagcaatatagaaagaaagttatagatgatcgacaatcaaactcactcagtcaaggcctacttagccggcgtcaatcttgatgatcccaactttgactactccatgaccgaactggccaatttagcagaagccaataatttcaccgttgtcggctccagccagcagaaagcggaaaacatcgttgcctccagctacctgggcaagggtaaggtagctgaaatcaaagacctggcccaaggactcggggcctccgtcctcatcgtcaacgatgaactgaccccagtccaaatccgcaacctggaacacatgaccaaactccgcgtcatcgaccggaccgaactcatcctggaaatcttctcttcccgggcccggaccaagcaagccaagctgcaggtccaattagcgcgcctccagtacgaactgccccgtctgcacccgtctgaaaacaacctcgaccagcagcacggcagcggcggttccaccggcgggggcttcgccaaccgcggggccggggaatccaaactggaaatgaaccggcgaaccatcggcaagcagatctccgctatcaaacatgaattaaaggaaatctcgggtcaggaagaaatgaaggctgcccgccgcaaccagagccagctgcctaaggtcgccctggttggctacaccaacgctggcaagtctaccaccatgaacggcctgcttgaggcctttggggctggcaatgaagataaacaggtcatggccaaagacatgctctttgcaaccctggacacctcagtccgccggatcgacctggatggcttctcctttatcctgtctgataccgttggctttgtttccaagctcccccacaagctggtcgactctttcaaggcgaccctgaaggaagccaaagacgctgacctcttgatcaatgtcgttgacgctgctgacccgaatatgaatcagatgatcaagaccactctggaagtcttggacgaaatcggtgtcaaggacctgccaatgatcacggcctacaacaaggctgacttgacagaccgcaactacccgcagattgaagggggcgaccttctttacagcgcggttgacccagcttccatccaggccctggccaagctgatcacgacccgcctcttcagcaattaccagatcactgacctccgcctgccgctaacagccggcaaagacctggcctacctgcaccagcactcccgggtcttaaaggaagactaccaagctgacggaatcgaagtttccgcccgcctgtcgccccaagaccgggcacgttttagcgcctaccaaatctagaccgcataaaaagccagactctatctctagagcctggctttcctattgctatagaactcttcttgcccgactaggccagaagtaggtggacaggctcgcttgtacgacaccttgctggtctccagcagcggtaacgtacttcccgtcccccacgtaaatggctacattatatggtttattcttggaaccccaaaagagcaggtctccttccgcgaagccagaacttggatcaaccgcgatccccttcttgacctggctcttggtgctggaacctgtattgacgccagctgcctgcttgtagacataggcaaccaaactggcattgtcaaaggcattcgggcccttggagcccttgacataggccttgccgacctgctgcttagccaaagacacgactgccttagcccgggccttagaccccatcggggcaaaccaagaggctgccaaactggcagcactgcgggccttcttaaccgtcttcttagatttagccttggtcttcttggccttcacggccttcttggcagacttgacctggttaaagtacttggccatgacccattccttcttgccgatccggtaccacagattgcccatggagtcagttgccgtttggtagacaaagtgactgctgcccttctttaaatgagtcgcaacatgccgccccttctggtagttggcccagacagtaacatattgcttactgataactttgatccgcttgctagcggcctgggccggctgcttgaccggcttgacccctgtcgctgagatccctaagaaagtcagcgctgcagcagaaaacttgatcatattagacttcttcatgctcatttcctcccttacaccgctaactctattttaacacggaaactagagaatccgccgggccgttgttggccagaagtaactgctgatggttgctaagataaccccttgctgctcatcagcggcggaaacatattgaccattaccaacataaattgcaacgtgatatggcgctgccacatccccccagaagaggaggtcccccggctgcaggctggccgttgataccggcacagctacgccttcctcaacctgggtataggtagtccgggaaacggtttgcccaatcgcggtcttgtaaacccattggactaagccggagcagtcaaagctgcttggaccggtcgcaccccagacataagccttgccgacttgcgccttggctaaggctactacggcattttgccgccaagatgaaccaacgggagcctgggacgaagcagcttgcgtcaattgattggtgtttaagaccgggttggtcggtttcttggctgcagtctgtttggtcgttgttaagacaaccgtgtacttgctggcaatccactttttattcccaatcttcagccaaaccttgtgcttcttgtcagtagctgaggccttgaccttcttgaccgtacccttcttaaggtacttgtgggtcttcttgcccttcttgtagttggtccaaaccggagccttcttgactacctggaccttggaaaggtgacccttgacttgcgcgtttgctggctggccgcctaggaccagtcctccgaaaaagagcgccgccacgcccaagaatttaatccatcttgcattacccatattttttcctccagcggaagcaaaacttatacctaatgttaatgataagcgttcgcccccctggcccgcaagccccctaatgatacaaaaatattacaaaaacggggaaggcgctgtcgccctccccgctggaaatatgcaagtgttgaataatcgctgtagtttgtccctttggaacaaaaaaccgtcgtaacgacggctaattcaaacgtgtaaacttttaattggccgtcaccggctcaagctcattctacttagactagcggaaaaatgtaagataagaacgcggcttaaattactctccgcgcgctggatgggtagaaagcactggagcggttcgtgctgaccttagacttgattaccccaaccgtcgggctggaagcgtggacgaacttgccgccgcccacgtaaatccctacgtggcttggagctgacttagaaccaaagaagagcaggtcccccttgaccagcttcttggttaataccgccttgccgtagcagagctggctgactgagtagtgcggcaatgacaagccagttgccttcttgtacacgtacatggtcaaacctgagcaatcaaaactgtaaggaccagtggcgccccagacataagccttgccgacttgcgcatttgccaaaccaactaccttcttttgcttagccgtcttagcaaccttagccttaattgaagcgtacttcttagtcgtgactgtgttagtccccagaatccacttgttgtccttgatccggtaccaggtccgccccttgtactgggcttgacccgtagccgtgaacttgtagccggacttaacctggccagctaatttcttgccggccccgtaagtggtccaggtgttgaccttgttacccttattgtaggctacccgggtcttcttcacgatcgtaatattgctgtcctggctgtcggttgccgcgtaggccggctgcgccccgcccagccaagctgccagcagtaaaaggactaaactgaatttccgcttcattataactgttttctcctaaattgaatccgctttttctagtgtaagcaagttgtgttacagaaaggttacagaaaaaatacagttgttttttaataacaaaaggcaaaagaaaaaggacgccaactggcgtcctatataaaggatatttctcaattaaatcaagcgcttggcagttgatggccagaagtagtagctcaggctctgcttgatcacgccctggcttggagtagccgcgtgaacaaacttgccgccgcccacgtaaatccccacgtggtacggtgaagacttggaaccccagaaaagcaggtcccccttcttcaaagttgccgtagaaacagcaaccgtcttgccttggtgcacttgcgtgtaagtggtccgggtaatgtacttgcccagggcccggctgtaaacgtagctggtcaagccggagcagtcaaagctgtaaggaccagtagcgccccaaacgtaaggcttgcccacttgggccttagccaaggcaacaaccttgttctgcttggtctgcttgctcttagataccttcttggcttccgcagccttcttagctgccttggcagcggccttcttggctgctgctgccttcttagcccaggctttatgactcaaagtgtaagaagccagaatccattcgttgtcagcgatcttgtaccaggtttgcttcttgtacttaacttcgccgatcaccgtcaaagtagtcccgtgcttgaagctgatgccagtgtcgttggccgcgccaagcttaaccttgtaattcttccaagccttaacgctgtagccagatacgtagttgaccacaacctgcttgttaacagccttaacagtagctgcctgggcggccggagcttgggcgctggcggcaacaggtgcgaccagggccagggccattaaaactttgactaataaactcttgaacttcaaaacttgatacccttttctattctgatgttttacacaggttctataataagttaccgatgttacaagaatgttacaaaaagaatactagattgttaaaattaagtccaatttaaaaaggctagcgctttttgccgcgctgaccttcttttttatcgttattatcgtaattttagcaggtaatgataaattagataacccgcttggcagttgatggccagaagtaggagctcaagtactgcttgcggacaccttggcttggagtagccgcgtgcacgtactggccgccgcccacgtaaatcccaacgtggtacggggaagacttggagccccagaagagcaggtcgcccttcttcaacttggcagttgaaaccctaacggtcttgcccctctttacctgggtgtaggtggtccgggtaatggacttcttgatcgccctcttgaaaacgtactgggtcaaacctgagcagtcaaagctgtaaggaccggtagcgccgtaaacatagcgcttgccaacttgcttcttggccagggagacgaccttgttccgcttagtcgtcacgcttgctgcctgtgcctggtggctgtttgcctgaacggcgattggcacaaccagggccagggctaaggtcaattttactaagatctgcttaaactgcttcattacgttgtaactctctttctcttttctcgatgcttatatcatagccgatgagtgttacaagaactttacagaccgtttgcagtttctttaataagcctttgaagttttttaacatcctgcaatttttccgtaaaaaaaggccctggcaaagagccagaaccttaatttattaagcccgcagcttctcagatgcgaaagtggagctttccggtgcagccacaacttcattgcgggcatcaactgccccctcagtggccatgttatggaaattgttaaatgacaaggagatcatgtcttccagggctggttcagtaaaggagcccatgtgcggagtcaagagaacccgcgggtaaaggtccatcaaggactggacttcctggtccggcacgtcgctttcacagtcaaaattgtggcccatgatcttcttttcgttggaaaccacatcagcgccgtagccagacaggtggttactggagacagcagcggcgatggcagcttcatcagccagttcgccccgggccgtgttgaccaagactgccccttccttcatcttagcgatgaattcagcattcatcagcttgtcgttcttgcctgggaagtatggcacgtgaacagaaacgatgtcacaagttgccagcagttcgtcttctgttacaaaagtgcagtattgcttggcgaagtcagatgggaatgggtcataggcataaacttcggcgcccaaagcctgccacatcttgccttcaactgccccgatcttgccggccccgtagatgccgaccttcaagcggttgaattccgtagcgaagtagtccggatgcatcccaaagtcctgttcatggacatgatgggcagcttcaccaacgtgtcttgacaaagtcaagcccagggtaaaggccaggttggctaccgcgtatggggagtagtttggcacccgggcaacggagattcccaagtccttagcggcttccaggtcgaagtggtccacgccaactgaccgggtgaagacccaggagatcccgtagttcttaaactgttccaggtttgtccggtcacagaggcagttgccccggaccaggacggcgtcgcagtcttctgcttgtactacgttttcccggttcaagtattcagtaatgagcttcaagtcgtagtcatacttgttcagcttttcaaaataacttctttcaagcggcctaacgccgtaacatgcaattctcatcttgaataccttcttttctaggactttactttatttctttcaataattgcccctattctatttaattcctttctcatttacaaccctttccttcaatttcttaactatttaattttctcccgcctttccaggccaggtaagggctgacagactttgctttccgtaaatccttcccttaaaagtccagcttttgcttttaatctacaggccaaaaaggcaaagaaaaaacgcccctgaggcgagtgcctcaaggacgctgatttgatcattttgaagtttgctaattagataatccgcttggcagttgatggccagaagtaggagctcaggtattgcttacggacaccctggcttggcgtagcggcgtgtacgtattggccgcccccaacgtagatgcccacgtggtatggggaaaacttggaaccccagaagaggaggtcacccttcttcaagctggcagttgaaaccttaacagtcttgccttggtaaacttggctgtaagtagtccggctgatgtacttgccgatggcgtggctgtagacgtatgaagtcaagcctgagcagtcaaaggcgttaggaccggttgccccgtaaacgtaacgcttgccgacttgcttcttggccagggagacaaccttgttgcactggctggtcttagaagcagcttggacagtgttgttttgagtgttaacagtatttacggcaacgaaaccggcgaaggccagggatacggctgcgactactttggctaatgacttcttgaacttcaaaacgatttacttccttttcttaacttgatgtttaacattttacaggagaaatatttcaattctgtttcaaaaaggtcacgccttttttacaatctatgagaaaaagcttaattttgtaattttctcaccaaactgtccaagctggcataggtcgcttgcaggtcgtcattgatcaggacatgggcgcaagaagccaaatcttccggcaattcgttcaactcgctgccggccagccgcttcttgatctggtcacttgcatcaccccggtcagccattctttgcgccaaggtatccaggctgcaagtcacataaaggaagtaaacccggtcacctaaagcttccaggtaggaccgggcccccttgatgtccacgatcaagctgaccaggtcgtttttggcccaggctctttccagcccttctttactggacccgtactggtagtctccgtatttgacatgttcaaagaagtgcagctgggcaaaagaatcatcgtcttcaaaataataagctgacccgctttccccaggccgcttcggccgggtggtgtgggtaatcacccgggggatctggtagcggtcggtcaggtattcagatatagtcgtcttgcccgccccgctgggaccggcaatcaagataatttttttagccaaaaaaggatctcctaacttgaaaattttcgctctatactatatcatagcctagttgaaattttaaccatttgcgaattaaggagattgccatgaagaaagccgatgttgaattaggtgccgtcgttaacgccaagtcagaagaagaactgaagaagcagttccaaggcacggtggaaaagatctatgaaaactccgccctcctggccatcacttcctttgacgacgttgatgctgctgccgtcagcgacctcaactacaagctggtcgtcaacttcaagaacatgaagccggcccgggcagccaagaaggccaaggccctctccaccaacaacgtgaccatcgaaaagatggccccgaccatgaaggatgacgacaaggataaggacaagaaggaaaagaaggctccggccaagaagagcaagtaagagaactccgcgtttatcccgcggagttttttgttaagatagtagagaaagcgagttgacaacatcaactacccccgaccgaggtcggaggtttgcaactagctagcgtggtccaagcaaactccccgaggggagttctcccatagccaagcccgaaggcttacgctgtcgcttctcaagcatccttggcgaacctcagatgctcccgcaggctgactactacggcagaacagcacgtttacgcactgctctaatttgtttgtttctttgttttcttgcctttggctttcttagcatctgtcgtatcatgctgactctgatacgacggattaggcacgccgctgacgtacatcgttcccagcatttgaatgttcattgcggctatgcggtcgtcattagagcggtagccgcatctgttacagatatacatgtgcagctcatggtcacgattttctttcaaaatctgcccacacttaggacagcgctgactggtatagtgagcgtctacctcgacaacctcgctgccattctgatgtgccttgtacttgagcttttgttccaggtcatagaaagaccaggaatggtgctcatatctattttccttcttacggctatagaccgtatcaaaagttacgtcagtaagatcctcaagcacaaagagagtatcagctccgtagtggttgacgagtgtcttagacaagcagtgattgtagtcgctcatccagcggttctctcgttgaccaatcttgcgaatgcgtctctttgagtttctggtatttgtcatctgcagatgacgtctcagctctttatagtgctgacgctttctggcaatcgtcttcccgttgtggaagaaagttttgcctttttcgtcatagcaggtaacgatctggcgaaggcctctgtcaaccccaactacatgacgagtctgctcaatctcgtaatctggaaaagacttggttgcgctgatatgcataaaccagtgcttgccagatctaaggattttggcagtgccaaaagtccattcgtcatccagatatttttcaaagcctggcatggcaatttcgcattcaatccgcccgttaagggtattgacagacacgatcttgccattctgcttgaaggaataatcccgatctcttacttcatccaattgcggacgcttgaaaaatatcggctcccaaagccagtcaagatcacgttggacagtgtagtagcccttgtctttcggcgcattgatgtcgtgaaatttataaggcttctgaccaagctgcgttttaacagacttgtatctggcgataacggtcttcaagacagactgagccatttgtgatctgaggttgaatttttgtcgtaagtcagagtagacagctttgttcagctttgcttggccgagttcaaagtcatgctcaaaaatgtattcagatgcaaaattacaaccttgtctataagcttccatgctgtctatcagtgatttagcattttcggaactggcaactttgatgtgagctttaatagtcaaagaaatatccacgatttgcctcccttcactaaaaatagtataccacaaaaactagtgatataggaggctagactaccgaatatctaacaatcagaaaggagaaaggcgtgctcctccctcgattgaaatcgaaggtttccgcacgctacattttaatgaaagaaaaaactaaaagcctgctctactggttcatcctcctccagcccttcctggatttggacttcttctaccgggggaagctggccaccatcctgcccttcaccatcccgaccatcatccggatcgctggtgtcatcgtcttggtgggcctgcttgtctgggggcaaaagcagctgcctccggcctggctctgggcctacctggccctcttgaccctctacgggatcttccacctctggcacatgcagaacttcaagagcctcagcccgaacgattatggctactcgaatttcggggagattttttacctcttcagaatgctcctgcccctggccttgatctgggtgaccaagaaactggaaatcagccaggacttcttgttaaaagccttcgcctgggtcagcggcctcttcaccggcacgatcgtcttgagcaacctcttcgtggtctctttgaagtcctacgaaactggggtaatctccggcaacatcttcacctggttcatggggccgctttacggctactcccacagcgcctccaagggtttcttctactttaccaacaccttgagcgccatcctcttgatgctggccccggtcgtcttctacctgcttcttgagcgcttctcttggcagaccggccttttggccctcagccagactttggctatgctagaagtcggcactaaggtcgccctctacggcttagccggaaccctggccgtcagcttgattgcctggctggtccacctgtttttcttaaaaaacgtcaagttttctaaaggcggcctggtcacccttttggccttagccgggatcaccggggtctgctggcaggtctccccggctgtccagcgctacaagtacgagatctactgggcaaacagccacgactctaagatcgaccaggaaaacgcgctcttaaaggcgggcctggccaagtacaagaatgacccggacaagctgaaagagtttgagaaggactttttggccaaatattaccagaagtacgccttaaacaagcgcttcattaccaagtcctacccatataagtacgacccgcagttctggatcgacctgcttaaagagccggccagcgtccgtttagccaaccgcaaggtcgaagaggccatgcttaagcaagtggtcaagtatgacaatgatcctttggacaagtggctggggatcggttatatgcggcagaccaacatcttcaacctggagcgggacttcacggcccagtactactctctggggctagtcggcgccttcctttacctggccttttacccggccatcctcctctatggggcctttgagtggctgaaggaaaaagcctgccggaccttttacttaaccagcctcttgatcgctagtgccctgctactgggggccagctacatgtcgggcaatgtcctggacttcccgacctctaatctgcttttagccttcctcgacggcggcctcctggcttacatcaaggaagaaaaaggccgaagcagaggactacgaatcgtcagatttgaaaaaaagtaagaaaaaatcgtcttctttaattagaaggcgatttttactttgtttaattcttacttgctttccttgtcaataaaggaactgtccggcacccggatcaggtagaagcgcttggcctggtggccaacatggaggccgatcccgttagccgcggtgttcttgtacttggccgtgtagatagccacgtaggcctgctggtagcgggaatcttccttcttcagctccttgcggctgaatggcagagccgaggccgtcacgttgatcggatccttttcataagagaccgtagccaggtagctgggcacggtatactttttccccttcaggtaaaaaatatactgctggctcaaatcccggttcttggtggacttgacctggacatagtagctctggctggcgctaggctgcaggaccaggggcttgtaggtcacggatgaagtaatccgggaagtatccgtcaagttcgggtcgtcaaagaggctgacggctaagagccagccggccaaaaggcagaagctggcgacttccagcaggctgatcagggagttgccccattcaaatttatgctggcgctggatgatcatcttcagccgccggcgccggatattttgcacgataaagaccaggtaaacgatggctcccacccagagggccacccccagtacgttccagctccacataattatgcctctttcttcgtcttggccttggcttctttggcagcttccttggcggctgcttcgccttccttgacctgcttgatcttctcgctcatggcgtcagccaggcggtcggctgccccttcaacatcggctactaattcgtcgccatccatgaagaggtcgatccggaagtgggaagcgttcaggtattcgctggccgtttcaaagtaaaccttgaccggctgtgcttcttcttcgtcaaagaagttgatcagcttcttgtagttggccaggggcaggttgatgatgttggtttccagggcaaaagtgatagggttcttcccttccaaaaccagctggacctgcatgagccggtctttattcaaggccgtggccacttcctggaccatggtcaaggcgtgttcacgcagcttcttcttgctccgggagacttcggaatacttgatggtctccatgtcagacaggtaggtctgttcttcgattgctttagttaagtctttcaggttgatctgcattttttgtcaccgtccaattatgtctgtatctacattaactaaaaaagtccccgggtgcaagcgaaaaaaagaaccggccaggggggccggttctcattaggattaataggaaatgtaggttgtcaccagcactcgactgatttataacctccggggcggcgataacatggggaaaacaccgccgctccgggaaatagagcctgccgcgcggcaagttctctattactctgctattttaccatgtaagagaaaattcggtcaaattgtgtcatttgacataatttagccaagtgtctgttttaacagccttaatatctagaccaacctttttcatgcaatgcttgagcattacaaatgctcccttgatctatgttaggtcagatcaagcaaactagaggacaactttacagtccgtcaaccgaagctctatacacagacacaaatattactcgtttgccaagtggctcctcaaatgagaggagaccatttggctggatgcaacacagcatccactatcccgttcgcaaatgagacgttcgggaatacttttcttactatttgcattgcaccgttgatgtccgcattgaccaacaaacccttgttggttctaaacatgccgcggtgaatgcgccgattggctgggctcagcccttgctttttcctgctcttattgccattgttccagcatggcttttcgccgtcaagagcactagtctgacttgtatacgattcatttgtgcagataaccgtgataccgaccatattggccttgtagcggatcatattgatcatctgctggtgaggcaagccaataaagttctgattgtttttcttgcccatatttactgaccgtttccatgtcttgttcttgccaatcacaatagtatttgctccacagcttagcgcgtaatctacta

SEQ ID NO: 2183 - DNA, 51638 bp, Unknown
  gut microbiota DNA sequence
gctaccagggcaaccattggggtcttgtcgtacttagcgtcatacaagccgttcatcaagtggatggcaccagggccagctgaacccatgcagacaccaagcttgccggtcagcttgtattctgctgaggcagccaaggcaccggcttcttcgtgacgaacttcgatgaacttgatcttgtcttgcatttcgtagatcgcgttcatggttgagtcaaaagaaccacctgggaaaccgtagaggtggtcaatgccccacttgtacataacatctaaaacagcgtttgcgcccttaatttttgccataagtgaatctccttaaaaattattacttacagccctttattaaaccacattttttcacttttgcaagtgctatcaaaagccgctatatcaaggatagtcgcattttaagctagttaattcacaaacttgctttttctggataaaaattttgtgctatcttccctttctttattgtgaaaaagtagctaacttctggagaatatttttcggtgaagtttttattaatttttgaaaaagtataaaagctatcgattatttaaaaagcaggccaggatctctggtctgccttctaaaattattgctctttacttctgaaccttggcgtatttgccattttgtatgtagacgctcaagatggccaagtcagccgggttgaccccggagattctttccgcctgagccagggtttccggccggatcttggcgaacttctcccgggcttctgtagccaggccctcgatctggtcatagtcgatgtccttcgggatcttcttggcttcctgccggcgcaggcgggccacttgaatctcctgcttcttgatgtagccggcatacttgatgtcgatttccacctgttccttgacatagcggtctccggccagcttctgcccagtcagacgttcaacgtcttcaaccgtcaccattggtcgtctgaggaagacgtctgccttgaccccgccgtttaagtcagtttggcctaaacctgccaggtattcgttgacggcaatggtcgggtgaacggtgatttcggccagccggtccaggtcttcctggatcagttccttcttagccaaaaattcagcatagcgatcatcgtcaatcaagcccaggtcatgccccttttccgtcaagcggaggtcggcattgtcgtggcggagaagcaggcggtattcagcccggctggtcaagagccggtaaggttcttccgtccccttagttaccaggtcatcgatcaaaaccccgatgtaagcttcgtcccggcccagggtgaaggctggcttgccttccgcgctcaaggccgcgttgatcccggcaatcaggccctggccggcggcttcttcatagccggaagtcccgttcatctgccctgccatatacaggtgcttgatccgcttggtttccagggtgtgggttaactgccaggggtcaaccacgtcgtattcaatggcgtagcccggccgcatcatttcagccttttccaggccagcgaccgtgtgcagcatttccagctgcacttcttccggcatggaggttgaaaagtccccgacatagatttcttccgtcttccgcccttccggttctaggaagatctggtgccggtccttgtccgcgaaacggacgaccttggtttcaattgacgggcagtagcgcggtcctaccccgacgatgtcaccggagaacattggtgaccggtccaggttttcattgatgatttcgtgggtcttcgggttggtgtaggtcatccagcaggaagtctggtcggttaggtagtcttcatccctgctggtaaaggagaagtggcggggctccttgtcgcccggctcttcttcggtcttggaatagtcgatggtgtgccggttgacccggggcggcgtcccggtcttaaagcggcgcagcttgaagcccagtctctctaggctttcagacagcttaatggctggaatcgtgttgttcggacctgatgagtagttcagttccccgataaaaatccgccctctggccgcggtccccgtcgtcaagaccacgctcttggcccggtagcgggccccggtgttggtcactacgccccggcattccccgtcttcaacgatcaagtcgtcaacgaccgcctggcgcagggtcagattaggggtgttttcgatggtccgcttcatctcttcgtggtagtcccacttgtcagcctgggctcttaatgcccggacagccggccccttgcccgtgttcagcatccgcatctggatgtaggtcttgtcgatgttcttgcccatttccccgcctaaagcgtcgatttctctgaccacggtccccttggccgggccgccgactgaggggttgcagggcataaaggccaccatgtccaggccgatggtgagcagcagggtcttctcccccatccgggcactggccagggctgcttcacagccggcatggccggcgccgactacgatcacgtcatattcgtttgaaacataagtcttcatttttttcgtcttccttgccttccttgctatttccctaagcagaactgactaaagaggtcattgatcaattcatccggggcgctgtcaccagtgatttcccccaggctttcccaggccccggtaaagtctatctgaaccaggtcaaccggcatccctgcctcaagcccgctggccacgtcggccaattgctgcttggccttggccaaaaggcccgcctgccgctggttggtcaccaggacctggtcgttggagttttcgatccccttgaagaaaagcttcttgatcaaggcttccaattcgtccaggttttccttcatcatgatcgaggtgctgatcacttcactgccgctttctttagcaatctcagccgccgtcagcttctggcccaggtccgttttgttcagcacgatgatccgctttttgccggcggtcaattccaaaagctgccggtcttcttccgtcaattcctggctgccgtccagcaaaagcaggatcaagtccgcctgggcaatggccttcttcgaccgctcgaccccgattttttccacctggtcctcggtatggtgaatcccagccgtgtcaatcaactccaagggcacccccttgacagacacgaactcttccagggtgtcccgggtggtcccggccacgtccgtcacgatcgctttgtcgctttgggtcaggtagttcaaaagagaggacttgcccacgttaggccggccaacaatcgctgtcttcaagccgtttctgaggatctgcccctcctgggctgtctccagcaggcggtcaatcttgccgctgacggcttccgcgcaagccagcatcttctgggccgtcacttcttcttcatcgtattccgggtagtcgatgttgacttcgacattagccaaaacatccaggatttcctggcgcagggcccggatttccgtcaaaagcccgccggaaagctgcttgaccgccacctgccgggccttgtcagtcttggcccggatgatgtccatcacgctttcagcctgggttaggtcgatccgcccgttgacgaaggcccgcttggtaaattcgcccgggtcagccattctggccccgttggccaagagcagctgcaggatgtcattggtgaccacgatccccccgtggcagttgatttccacgatgtcttccttggtaaaagtcttcggcgccagcatgacggaggccatgacctcgtcgatcacctgcccggtcgccgggtccacgatgtggccgtagttgatcgtgtggctgggaaccttttccaggtccttgcccttaaacaagcggttgacaatggcgaccgcatcttccccggagacgcggacgatggagattccgccttctcccagcggcgttgagatcgccgcgatcgtatcaaattccgttaaacgttgaaccatctcgttacctcgttttttccaataaaaaaagcgcaatttccaccatgaaaaatgatggataaagcactttcactactttatctaaaaaactttagatgaatattcaattatttccgcttgatccgcttgtaagcctgccgcatcttgcgctggcgctcgcgttcagcttcttccttggcttcctgctccttgcggtacttgaatgggttctgcaggaccagggtctggccaacctggaagaggttggagatcacccagtaaagggagatcgcggactggaagacgatggcccagatcccgatcatgatggccatgacatagctcatcatcttagtcatcgtggtctgggaagacttaggcaccgacaaagtcgcgatgtatgaggacaggaaggtaaataccgttgccaaaatcggcaggatgtagtatgggtctggcttgcccaggtccatccacaagaatttaccattctgcatctctggcgtccgccagatggcctggtacagggcccacataaccggcaactggatcaccatcggcaggcagccggcgtaaggattgacgcccgcttccttgtaaagcttctgcgtttcttcgttcagcttgttccgggtctccaggtccttgctggaatacttctcctgcaaggccttcagttccggctggatctcctgcatctttctggtgctgttgatctgcaccgcgttcaaaggcaggaggatcacccggatgataaccgtaaagatgatgatggcccagccgtagctgcccccgcagactttggcaatccaaagcacgaactgggagaggtagtaaactacccaggcatcccaccagttgctggaattatgggagatcggcgttggcttctgggtggtctgcgtggcgcagccgctcagaacaagggcaaaaaccgtcaccagtgccagagcggccagaaggcgcttggtactcttcttcgataaaatgtccttcactatttttcctctttatttggcatttcttcaatgacgtgggccaggttcagcgcgtgaagcaggttttcccgcgtcttttcccaatcgaaatcgcgagcgtagggcctagcaatcaccaagaagtccaagtccggcgcaatccggtcccggttctcggtcaacaccgccctgatgtagcgcttgagacggttgcgcacgacggccgtgtgaccgaccttcttgccgacagagatgccgacgcgaaaatgcttattctgctttctaggcaggacgtagatcacaaaagcccggttggcaactgattcgccattttcaaagacggtctgaaaatcctgttcagatttaactcgatatgactttctcaaagctctttacactcttgcaaattaaaaaaaccactgggattcagtggcttaagcagataatacgtttctaccctttgcacggcgtctagccaaaaccttacggccgttgcttgtagccatacgcttcatgaagccgtgaacgcgtgaacggtgacgcttcttaggttggtaagttctcttagttgacatatatttgcacctccattttttagtgctacgtgcacaatttcttatctagaatagcacggaaatcgaaaaaaaccaagctttttcttgcaaacttgcccgagtttttccttagactgcctgagcctgatctcccgcctgtggacagaaagcagaccgcgaaaaaattttttcccggcaatcaacaggcttttttgcagacttatccacagtccacaccctgtcaaaaactttttcaacaccctgtggatatgtctggtcaaaaccaggctctacttttgccgctctaggaaaagttgtccacaagagttatccacttttgaccaattttgataaaattatcagcagagttaacaggcctctttttatttattgtccacagcctgtggattctggatttatttcttccacctgtggaaaacctggtcagtaaatgctaaaataattttgctaaacgattttttggagggaatgttttttgttcgatttagaaaaattctgggatagcttcaacgctgaaatgcggtccgaatttaacgaagtatcctataatgcctggttcaaaaacaccaagcccgtctccttcaacaaggacacccatgaattggtaatctccgtccaaacccccgtggcaaaggggtattgggagcaaaacatctccgctaacctgatccagtcggcttatgcctacgcgggaatcgatatctacccggttttcgtcgttaaaaacggcccggcgtccagcagcgaaagaatgctggagccccagccgcaggccaagcccgagaaagcccggccgcaaggccgcgaattcaccaaggacctgcgcttaaacgagaagtacaccttcgagaacttcattcaaggcgagggcaacaaactggctgccggggccgctttggcggttgccgacaacccggggaccttctacaaccccttgttcatcttcgggggcgtgggccttggtaaaacccacttgatgcaggcgatcggccaccagatgctggcggaaagaccagatgccaaggttgtctacattcaaagtgagacttttgtcaacgacttcatcaattccatcaagaacaagacccaggacaagttccgggagaaataccggacagctgacctgctcttagtcgacgacatccagttcttcgccaagaaggaagggattcaggaagaattcttccatacttttgagactctctataatgatcaaaagcagatcgtcatgaccagtgaccggctgccaacggaaattcccgacctgtccgagcggctggtctcgcgttttgcctggggactgcaagttgaaatcaccccgccagacctggaaacccggatcgccatcctgcgcaagaaggctgaatccgaaggcctggagatcgatgaaagcaccctggactatgtggccagccaggtcgatactaatatccgggagctggaaggggccctggtcaaagtccaggcccaggccaccattcaaaagcaggacatcaacattggcttagcccggtcggctttagccgacctcaagctggtccagaagagcaggggactgcagatttccaagatccaggaggtcgtggccaactacttccagacctcagtgccggaccttaaaggaaagaagcgggtaaggcagatcgtcatcccgcgtcagattgccatgtacctgtcccgcgagctcaccgatgccagcctgccaaaaatcggccaggaattcgggggcaaggaccacacgaccgtgatgcatgcctgcgacaaaatcgcccggcagatcaaaacggacactgaaatcaagtccgctgtttccgacctgcggcagatgctggaaagataggtccgttgataacttgtggacaagtccgtgatttatccacagtttttcaactggcaaaagtccgggttaccgggcttccggttagttatcaacagaattcacaggacctactactactacaactatctatatataaataaataattaaataaagagagcagcaaactaaccaaggaggaccagatgaaatttactgtacagcgcaatctttttatcaatgacttgaattccgttttaaaggcagtttcttcaagagcccagattccgattttgagcgggatcaagctggacctgacggaaactgaactgatcatgactggcagcaatgccgatatttccattgaactgagccaaccggtttctgatgatttacgggttgaatcaactggctccattgtcgtgaccgcccacttgttcagcgaaatcgtccgcaaattgccaggcagggaattcacttttgaagtcaaggaaggcaaccagatccagatcacctctgacaaggcggactacgtaatcaacggcctggacgccagtgcctacccgcgcctgccggaaattgccggaacttccttcagcctgccgcctaagaccctgcgggaactgatcacccagactgttttcgccgtatccaccgaagaaagccggccaactctgaccggggtcaacttcagcttcaagaacgggcagatcaaggccgtggctactgactcccaccgcctgtcccaaagaatcgtcgacatcgcagccggtccaagcgaagacctgtccctgattatcccgggcaagaacctgcaggaactagcccagatcatcggcgacgctgaccaggacatcaaggtttaccttggcgacagccagatccgctttgaatttgaaaacctgtccttctacacccgtcttttggaaggggcctacccagacgttgaccgccttttgccaactgagtcaacgaccagcgtgcagttcgccgtttctgacttgatgcagacattgagccgggccagcctcttgacccacgccaaccggaccaacgccgtccaaatgactttgaacgtggctgaccaaaccgtcctggtttccggtaattccccggaagtcggaaagattgaggaagaagtcggcttcagcagcttaactggccgggacctgaccatttccttcaacccggactacatggccgctgccctgcgggcctcagtaactgactccgtcatcatcaacttcacggaaagcctgcggccattcacggtcgtgccaaatgaccagtcagttgaattcgtgcagctgatcaccccaatccgaactttctaaaacagactgccaataattcacaaaagccactctccggagtggctttttttcgactattttttcatacaagcgtttttttacggctttaagcccaaaatacctgctttatgtaccacgatactaaatgggtaaataagcgctctgaggccctaaaaaaggccttcttgattgagtttccctggaaaaaagactataatttataagtggaatactagttttacattggtgaaggtgaagactatcgaaacttttgcgattaatggtgaattcatcaccctcggacaatttttgaaagatgaatgtatcgtttcctcgggcgggcaggccaagtggtacctcaaggacagtccagttctggtcaatggggacaaggaagaccgccggggcaggaagctctatcctggtgaccgtttgagcgttgccggcaaggaatatgagctggttcagggactttaatgtacctgggccggtttaagcagagcggtttccgcaacctggctctccttgacctggaatttgacccacacgtgaacgtttttctgggtgaaaatgcccagggcaagaccaacctgctggaagcaatctactttctggcccttagccggtcccaccggaccagcaatgaccgggagatgattgccttcggccaggactttgccagcctggctggccgggtgcacaagcgccagctggaccttgacctgcgcatcgtcatcagcaagaagggcaagagcgcctgggtcaaccgggtcgagcaggcccggctgtccaagtatgtgggccaccttaacgccatcctcttttctccggaagatctggaattggtgaagggggccccttctttgcgccggcgcttcatggacctggaattcggccagatcaatccggaatatctctatttcgccagccagtaccggcagctgctccagcagagaaacaactatctcaagcagctggcccgccggcaggccagtgaccaggtcctgctcggggtcttaactgagcaggtggccacggcggccagtgaactgatctggcggcgctaccgctatttggctgacctcaaccgctacgcggccgaggcctatcgggccatcagcgggcaaagagaagagctgcgggtcctttaccggccttcagccaaggagattacggctgcagaccagccggcccagatcaagcagaagctgctggaccgctttgcggagatcgctgacgatgagctcagacgggccacgacccagctgggtccccaccgcgacgacctggaattccagctggacggcaaaaatgcccacctgtttgcctcccaagggcagcagcggaccattgccctcagcctgaaactggcggaaatccagctgatcaagcagctgacgggagaagagccgatcctgcttttggacgacgtgatgagcgaactggaccagaaccgccaggcagccctgctcaatttcatccatggtcaaacccagacttttattacgacaaccgatctggatggtatttcccaggaaatagtcaaacagccgcgaattttttacatccattccggccaaattatagaaaaagaggaaggattaaatggcagacgaagataacaaattgaagaaggccaagcagtttgaacgagaagctgacaagtacaatgccagccagattcaagtccttggcggcctggaagccgtacgcaagcgcccggggatgtacattggctcaactagctcccagggcttgcaccacctggtctgggaaattatcgacaacgggatcgacgaagccctggctggtttcgcgaccaagatcgaagtcaccgtcaacgaagacaacagcgtgactgtccaagacgacgggcgggggatcccggtcgacatcgaaaagaagaccggccggccagccgttgaaactgtttatacggttctgcacgccggtggtaagttcggcggtggcggatacaaggtttccggcggtctgcacggggtcggggcttccgttgtcaacgccctgtccaccaagctgaacgtcactgtcatgcgggatggcaagaagtaccacatcgcctttgaccacggccgggtcgttgaagagctgaaggaagtcggcacagtgcctttgactgaacacgggactatcgtccacttctggccggacccgaacatcttcacggaaaccacggtttttgacgacaagatcttgaagaaccggatccgggaactggccttcttgaacaaggggctgaagctgaccttcactgacaagcggaaggacacggcggaaaccgatgtctaccacttcgaaggcgggatcaaggaatacgtctccttcctcaaccggggccaggaggtactttttgacgagccaatctacgtggaaggcaagtacgagggcatcgacgttgaagtatctttgcagtacacgaccggctacaagacaaccttgatgacttttgccaacaacatccacacttatgaaggcgggatgcacgaggcgggcttcaagacggccttgacccgggtggtcaacgactacgcccacaaggccaagatcttgaaggaaaacgacgacaacctgtccggggaagacatccgggaagggatgacggccgtgatttccgtcaagcacccgaacccgcagtttgaagggcaaaccaagaccaagctgggcaactccgacgccagaactgccgttgaccgcgccttctcagaaaccttctccactttcttgatggaaaacccgcaggtggcccacaagatcgtggaaaaagggcaactggctgaaagagccagagttgccgccaagcgcgcccgggaagttacccggaagaagtccggcctggaaatcgccaacctgccaggcaaattggccgacaacacttcaaatgacccgaacatctcagaactcttcatcgtcgaaggggactccgccggcggcagcgccaagcaagggcggagccggctgacccaggccatcctgcccatccgggggaagatcctgaacgtggaaaaggcctcaatggaccggatcctggccaaccaggaaatccggactctgtttacggccctggggaccggctttggggcagactttgacgtctccaaggcccgctatcacaagctgatcatcatgactgacgccgacgtcgacggggcccacatccggaccctgctcttgaccctcttctaccgctacatgcggccgatgatcgacaagggctatgtttacatcgcccgtccgcctctgtaccaagtgcgccagggcaagctgatcaagtacctggacactgatgaagaactccacgactacctggggtcattgcaaccaagcccgaagccaatcgtgcagcgctacaaggggctgggggaaatggacgctgagcaattgtgggagacgaccatggaccctgaaaatcgccgcctggaccgggtggacccgggatacgccaaggacgcggatgaagtctttgaaatgctgatgggcaacgaagttggcccgcggcgcaagttcatcgaagacaatgcccaatatgttgaaaacttggatgcttaatgggaggtaggaatggataacgaaaatcaaggacaagaccggcggatcagaaatgtcgatctgacgcaaacgatgcggagctccttcttggactacgccatgtccgtcatcgtggcccgggctttgccagatgtccgcgacggcttgaagccggttcagcggcggatcctgtacgggatgaacgagctggccgtgactccggacaagccttacaagaagagtgccagaatcgtcggggacgtcatgggtaagtaccacccgcacggcgactcctccatctacctggccatggcccacatggcccaggactttgcctaccgctacatgctggtagacgggcacggtaacttcggttccgtcgacggcgaccggccggccgccatgcgttatactgaagccagaatgagcaagattgccgtggaaatgctccgcgacatcaacaagaatacggttgactggcagagaaactacgacgacacggaaaatgaaccgaccgtcctgccagcaagaattcctaacctcctggttaacggttccagtggtatcgcggttgggatgactaccaacattccgccgcacaacctgtctgaagtcatttccggcattcacatgctgatgaagaacccggacgtgacgaccaaggaactgatgaaggccatcccagggccggacttcccaaccggcgggatcttgatgggccggggcggggtcctgcacgcttatgaaagcggcaagggcaacatcgtcgtccgggccaagaccgaaatcgaaactgaaaagagcgggcgggaaagaatcatcgtcagcgagattccttacctggtcaacaaggccgaactggtccagaagatcgctgaactggcccgcgacaaggtgatcgacggcattaccggggtgcgggatgaatccgaccagagcgggatgcggatcacgattgacgtgcgccgggatgccagcgccagcgtggttttgaataacctcttcaaggaaactcagatgcagtccaacttcgccatgaacatggtggcgatcgtggacggggcaccgaagttcctgaccttgaagcagatgctgcagtactacctggcccaccaggaagacgtcatcacccgccggaccaagtttgacttggaaaaggctgaagccagagcccacatcctggaaggtttgcgggtagcgctggatcatatcgacgaaatcgtcagcttgatccggaactctgaatcaagcgacatcgccaaggcgggcttgatcagccgctttgacctggacgaccgccaggcccaggctatcctggacatgcgtctggtccgcctgaccggtttggaaagagacaaggtcgaaggcgaataccaggagcttttggtcaagattgccgactacaaggacattctggccaagcctgaaagaatcgaccagattatctacgacgagctgctggacatccagaagcgcttcggtgacaagcgccggacccagattacggccagcgaagtggtcacgatcgaagacgaagacttgatcgaagaacaagacgtcctgttgactttgagccaccagggctatgtcaagcggatgctgatcgacgacttcaagacccaaaaccgcggcggcagggggatcaaggggatgggcgtccaaaagggcgacttcatcgagcacctgctctactcaagtacccacgactacctcttcttctacaccaacaagggcaaggtctacatgaagaaggcctacgaaatcccagaatacggcagaagcgccaaggggctgccaatcgtcaacctcctgcagctggacaagggcgagcacatccagaccgtggtcaacctgccgcaagggcatgacgacgactacgccttcttcatcaccaagctggggacggtcaagcgaaccaagatccgagaatttgaaaatatccggaccaacggtttgatcgccttgaccttgaaggatggcgacgaactatccaacgtcctgaccactgacggccagcagaacatcttgatcgctacccaccagggctacgccgtgaccttcaatgaagatgacgtccgggccatggggagaagcgcggccggcgtccgggggatcaacctccgcgaaggcgactacgtggttggctccgggatcttgaagccggaagacgaagttctgactatctcggaaaagggctacggcaagcggaccgcggctagcgaatacccggtcaagggccggggcggcaaggggatccagaccgccaagatcggcgaaaagaacggtcctctggctggcgtggccgtggttgacgggcaaagcgacatcatgctgatcaccactgacgggatcatgatccgcttcaagaccagcgatgtctcccagactggccggtcaactatgggcgtccgcctgatcaaggtggctgacggcaatgccgtggcaagcatggcagtcgtgccggctgaagctgaaggcgaaagcgagccggaaacggaagtttagcggcaaagaagcagaaaaaagtaagataaaataaaaaattaccagcatttttggcgtaatagttagtgggaagaaaatcccggatcacgtgtaaaaaatgtttggtaatttttttattttgtgctaaaattaggcattgcgagtaattagatcaattactccttgttcttgattttagcaagaaccatttagtccaaaaggaggtgcaatagtctatgacaaccaagtacgaaattacttacatcatcaagccagacgttgacgatgaagcaaagaaggccattattgacaagtacactaaggtgatcgctgacaatggtggtgaaatggttgaagctaaggactggggcaagcgtcgtttcgcatacgaaatcgaaaagtatcgtgaaggtagttactacatcatgaccttcactgctgaagacgctgcagctgtcaacgaatttgcccgtttgagcaagattgacgactcagttctgcgttcaatgactgtcaagttagataagtaattgtagtttcccgtaatacaggaataggaaggaaataagtatgatcaataacgttgtacttgttggccgtttaacacgtgatcctgaattacgtactactgggagcggcatctcggttgctacgttcactttagccgttgaccggcagtttaccaatgcatcaggccagagagaagcggacttcatcagctgcgtgatttggcgcaaggctgcggagaacttctgcaacttcaccagcaagggcagtttggtgggcatccagggccgaatccagaccagaaactatgataacaaggacggccagcgagtttacgtgacagaagtcctcgtggacaacttctcactgctcgaatcacgccgcgatcgtgaaagccgtcagcaaaacggcggatttggcggccaaggtcaaagccaaaacaccggcttcaacaccagatttggcggcgacagcggctacgccaacaacaacgccaacgccttcggcagcccggcccagtcaaacgggccagctaatgccggattcaatgaagataacaagaaagatgccggcggagacacgaacaccaacccgttcgacagctctgacgatgcaatcaacgtctcaaatgacgatcttccattttaaaattacacaagaaaggatctgaagacatgcctcaacaaagaagaggtggtcgtcgtcgccgcaaggttgacttcatcgcagccaaccacatcgactacgtagactacaaggatgttgatctgttgaaacgttttatctcagaaagaggtaaaatcttgccacgtcgtgtcactggtactagcgctaagaaccaacgcaaggttgctaacgctatcaagagagcccggattatgggcctcttgccattcgtagctgaagactaagcagcaggatcaataagcaaataaagagaccgaaaggagctggactcctcccggtctctttttcttttctgttttgtggcgggcggcaataggttataatgggagtagtttaatctgctttaaagatgtggaagaattttatgaaaaactttttacgcaaacttgaattgccagaattcgtccgggattccagattaatcattgccttctccagcatcgccttcttgacggtgctgagcacggttgtggctttcttcatcaaccggatcttcggggtggcgcttttgctggtcctgatcgtggatgtcttttgggtcgttttcggcgtttacattctcgcgaaaaataccaacaattacgcggccaacctttcctaccggattaaacggggggagcaggaggccatgatcaagatgccgctggggatcctcctttacgacgagtcccggcacatccaatgggtcaacccttacttgcagctctatctgggcgacaaggacgccatcggcaagacgattacggcggtcgaccgaaaactgggcaagctggttgaagaagcccttgaggcccagacttcggaaagcaaggtggtcaagtggggggatcaccaatttgaaatggttgtccaagacagcatcggggtcatctacctgctcgacattacccgttatgccgacctggccgacaagtaccgggctgagcgcctggctatcgggcagatttttgtcgacaactacgacgagctcagcgagcggatgcacgaccaggaactggctagaaccagcacctacctgcagacgaccttgaacgactatgccaagaagttcaaggcctacttgaagcggattgatgaggaccactttttgcttctggcccacttgcaggacctggaagccatggaagaagataagttctcagttttggacaagatccgcctggaaaccagccggaacaacactcctttgaccttgtcggtcgggattgcctacgggggcgagtcgctgagaaagatcgccaaccaggcccaggccaacttggacctggcccttggccggggtggggaccaggtggtccttagggaactgggccaggtagcccgcttctacgggggcaagtccaacccaatggagaagcgtacccgggtccgggccagaatggtttcccaggccttgggcgagctcttcaaggatgttgaccaggtcttcgtccaggggcaccagcggcccgatatggactctgtcggcagcgggatcggggttgtcaagatcgcccgcctgcacggggccaaggcccactttttgctagacacagcccactgcaactatgacgttgaccgcctggtcaagaagatgcaagcggcagacccccagctggacctttttgttagtccggatgaggccaacgcggtcgcgacggacaactcccttttggtcatggtggaccactccaagtactccatcacttatgaccagcgcctctatgaccgcttgaggaaccggatcgtggtgatcgaccaccaccggcggggggaagaattcccggagaacccgatgctgacttatgtggagccatatgcttcctcagccagcgaactggtgacggaaatggtcgaataccagcagccggctgaagacaaccgggttttgaccaacctggaagccacggccatgctggccgggatcacggtcgataccaaggaattctccttgcgcacggggacgagaacctttgacgcggccagctacctgcggtcgatcggggcggactcctcggtggtcagtgagcttttgaaggaagacatttccagcttcctggtcaagagccacctggtggccagcctgcagatgctgcggccgaagatggcggtcatgcaggggccggaggacaaggtgatcgacccgatcttgacggcccaggcagccgatatggcgcttgatttggaaggggtgtcggcatcttttgccatcaccagaagaagcggggacaaggtcgggatttcagcccggtcgatgggcaacattaacgtccaggtgattatggaaaagctgggcgggggcggccacttgtccaacgcggcgacccagatcaaggatattacggtcaaagaagccagtcagcgcttgctggcggcaattgacgaatatctggaagaaagcagttaaagaagaaaaggagcaatgaacgatgaaagttatttttatgcaagacgttaagggcagaggcaagcggggccaggtcaaggacgtgccggacggctacgcccaaaactacctgatcaagcggggcctggccaaggaagccaacaagggcaacctgaacaccctgaagcgggtggaagccaatgaaaaggctgaatacgaagctcaaaaggcagctgcccaagagatcaagaagcagctggaagctgacgaaactgtggttgaactgaagtccaaggccggcagcgactcccgcctcttcggttcaatctccagcaagaagatcatcgaaggcctggacgagcagttcggcatcaagctggacaagcacaagctggaactgcgggaaccaatcaaggttctgggctacactaatgtgccagtcaagctcttcaagggcgttgaatcaaaggtccgggtccacgttacccaagaaaattaggaagctgaaagaagccgtgattgatggataatcttgtcacgcagcagatcccgcatgattctgctgctgaaaaagccgttttaggggcgattttcattgatcccgaagtcatcaacgaagtcagctcggtcttagagccggctgacttttatgaacatgccaaccgcctggtctatagcgcccttttggccctctatgacgagagcaggtcaatcgacctggttaccttgcaagaggagctcaagcggcggggacaattggaagaactgggcgacatggcctacgtgtcagagcttttgctggcaacgccaactgcctttcacgccaaggactatgcccgcatcgtccaccagaaggcccagctgcgcaacttgatcaatgccagccagaagatcatctccagtgccattcaagggtccgacagcgtggatgagatcctcagcaacgctgaaaatgagatcatgaacgtctccaatgaaaaggggagcgggggatttcataagattgaggacctggttgccggagcctttgagcagatttcaaataatgcccagaaccaggacgcggtcacgggtttacggacgggttttgcctatctggacgagatgacgacggggctgcatgatgacgaattgatcattttggcggcccggccgggtgtcgggaagacctcttttgccatgaacatcgccaagaatgtgggcattactgagaaaaagccggtagcggtcttctccctggaaatgtctggtgagcagctggtccagcggatgctggcgtcaacgggcttgatcgactcccagcacctcagaacggggatcctggacagggatgagtggaaccagctggacatggcagcgagtgtcttgcggcaggctccgatctatatcgatgacacgccagggatcaagatcagcgaaatccgggccgagtgcctggccctgcaaaaggagctgggcgacctgggcttggtcgtgatcgactacctgcagctgattgaagggccaaagactgagtcccgccagcaggaagtttccgcgatctcccgccagctcaagaagatggccaaggaattgcacgtgccggtaatctccctgtcgcaattgtcgcggtcagttgagcagcggcaggacaagcggccaattttgtcagacttgcgggaatccgggtcaatcgaacaggacgccgacatcgttggcttcctctaccgggacgactactaccgggatgaggatgctgacggcgaggaaccgaaggaagatccggaaaatgttgaagttgaagttattattgaaaagaaccggtcaggccggcggggatcagccaagctgatgttctccaagccttacaaccgcttctccaacctggacccaggccatgaggcccaggggtaggggaaagacagcaaaaaagcgcgaatcgttgctgattcgcgctttttgttattcttgcttgatgtcgtaggcatcaaagaagattggccctttctttgagtcattgaaattcggccggttcttgtaaggatcctcgctcctgttgaatggcagggtaaggctctgccgggccgtttcaatgatgttgttaaaaatctgcctgaagatagcccgcatttccggatccatggcaaagtatgcccggccaaagcggtaggtgccggtaaaaccactgatctgtttgatcttagtgatgtccaggctgccaaaagcctcaaaaagggcggaccacatctgctctcttttttccgcgggaatctggtggttgaaggcgatcagggagtggcggatcacccgggctgtagccgtgaggccctcttgcgccaaaacatagctgtcccggccaacgctccaggttcttgggtcgtgctggctgagggctggctgggtgcatttgacgaccaggacgcgctcagtatggtccagcatgcagccgacaatggagctttccgggatgtaggtcttcatctttttgatattgtcctggaagccgctagtcccgtaaatctggtgccggtagccaggcccgtcaaagctgtaggacttgatgacccgggcttgaatctgcggatcagcaaaggccaaagcgtagtgggcgtagttgccccccttggagtggccggtgatatagatccggtcatttgggtaggcctggccgatctggttgagatacttagcggccagcctctgtccggtaatttccggtgtataattcatgaccatatcctcgctccagccgatcatggactggtcggtgccccggtaggcgaccaggatggtccggtcgttcaagcggaaggcgccagcgttgaactggatgggttcaggctcaatctccatcttgttgacccagtccaggacggtcaagtccgccaggcggggagacttgggcaagagcaggagctcgactttttctagattttgccagcggtcaggctcacgttggtagatggactggcagacctcgcctaggctgtggccaaccgtactgccgtcaaagggaaggtaggctagggatgccattaaggaagcatccaggctgttgaaagggcaagcttgaaaaggcagatcgcctcgccagcgcagatagtctaatgttgatgccatcacaaaaacctgctgcaaaaaacgtgtgcaatgtagccaaatagtaatctttgactatgtattgtccgaagacatgaatacagacatttttcttattgccgtcatcaccggtattccgatatcccaacaagggggtaaccgcattgaccagcgcaggtaccgaagcaccactcttgcaacttcatggaaaggctttcgccaatcctcgggtacagcccaacccgcatgactaaggccagggccttagccattaattctcctttctttaatatttatagtgcatgatttaattctgggtactcagtcagcgctaaaagactaagcatcgcattcttatctcgatctacgaccttattgtagttcgggcatttttcgttgtagcagacgtactcattgtgtttagtaccatgcttcttgtttccataaagggtgatcttgtcatcaccttttttgacattgccacaggccgcgcaacgctgagtagacggataaagcttatttgccaggataagttccttaccataccaatcgcacttgtaggtcaagatctgcttaaacttgccaaacatcgaccgatgaacaccctttgaagccacgtggctcatcagcatgcccttaaccgacagattttcgatcacgatcttgtcgtagtcattaaccagttcggtcgtaaatttgtgcatcaagtcgttttggatattgcttgccttgcgatagcacgcttgaagcttggctttcgtcttcaagtagttcttactttcgcaagcagcttctccattttggactcgctttttggcaagctgcctttgatagtgcttgattttttataaattctatcaagcttcttagacagtacgttcacccggccacccgtgtaatcaaagtgaccaacattgatgtcaaccgcggtagctttacctgttttgtctggcagcttaacatcttcagccttgatcttatacgggatagcaacgtaataacggcctttttctttgaagtagctgacaacaccaaattcatctgacaaaggcttttcgctcagcttaaagccacgccattgatctttcggaactctgcttcctcttgcccgttccaaataaagaattccatctttgatcttgcttcggtcgcttttgaaaccttgtctggcttcccgtttcgaccgaaattttggtttgccccagcctggttgggccttatcaaagaaattgttccaagccttgcccaggtcggaaattgccagttgcagaatccgggctgactgtgtatactgccagtcttttttatcggcaactaacatattacgaactcttcgctcactcggcgacggcttttctttaagcaacactttctgctcttcagtcagctttttggagtcggaggccaaagaagatttaagtgcttgtcttgccttgtacatttcattccacaaggcaaggccttggttccagcaatagcggcgatagtcacaagcttcatccagaactcttctcatagtctcgttgggacgtagttcatagactcttgtctgaattaattccgccggtacttcttctatctgttccgtcatttaatttcaccgccttttagaaccatatcattctcaatctttgtttcgaggaatattttagcacgtattcctgtatctttccaaacatatgtttctaaaatacaggtgaaagctgtgctctatcttaaagcaaagtcctagatttctctacgttaattctgcttagtacctatctgttaactcttatatataatcaaacatatcaaatacgtttttcgccactagtattaagctccttagctaacattgtacattattgcgcaaaaagcggggcggggaaggctttatgttgattgaatgtaattctttatttacaaaaaaactttaaaggtatatgattatggcataaaaatgaaaggagatgagatgaatgaaagttgtaacagttaagtcaatctggctgaccctgctcacggtcttgagctttgtcctgccattttggggctggctgccactggtgtacttgtacagccaacggcaggatccggccatgcaggggatggaaaagacacttaagctcgcggctggcgtgcaagtagcgtacttggtgattttggtggtaatcttctacttctttgccccgattcacggttaaaaacagataatttcaatttttttagtacaagatcttgtgaatgcctccttgtcagctaagtctttatagagaaatattttatcactctgtcagttttttcacgtgagggctacttgctgccgggcgagtaagtgatacgcttgatatccgggtatttgcgcaggttcatgatgatctggttttcatcgatccggctggcgatttcgccatcgcagctgaaaaggacatggtcgtcagagacgctgatgatcttgatgctgagctggtggacctcgtttttttccagttcgctttgaatggtttccaggatatggggcgtgttgctggcttcgatcaagaggctgatgctgaccttgcggagcaggttgaggaccgtttcttcccgcaaaaagcgctgcacgagcaggagcaggacggcggccacgattccaacccagtaaaggccgaccccaatcgcgattccgatggctgaagtggcccagagtcccgcggcggtcgtcaatccggaaatctgctctttatggaccatgatggtcccggcaccgataaaggagattcccgtgaccgtcaaagaggcgattcgcgatggatcgtaagaaacgttgctgaaagtgagcatgtcgtagaacccatacttggagacgatagaaaacagggtggaggcaatggctaccacgacgtgagtatgcaggcccgcgctctttctctgggttgcccgctcaaagccaatcaggccgccgcaaaaggcggacagcaggatccgcagaagccagaccagttgaaagctgacaggtatgccggtaaatttttccatatttttcctccttgctgattttagttctttcggcgcaaataagccgaaaaaataaaaaaattccaaaaagacttgcaaaagtctgcaattaatgattaaattaataactgtgttaaggcacaagagttgctgacttagctcagttggcagagcacttcactagtaatgaaggggtcggaggttcgaatcctctagtcagcattatacagattcttgtttacgattaaactttatttatcagcgttttgcaaagataaataaagtttttttgtaatatcgatctattaacagtttatcagaatgataagtcagcagcagaaaatatggaatcgtttaataaagggactgttaactagctagctaacagtcctttttttgacgaaagggaagatttgatgaaaattggcgaagcactgcgtaaaaaaagattggaactagggttgacccagcaagaaatgtgcgaaggcatccttagccgacctttttatgcaaaggttgaaagtggaaaaaatcgaattaacgcggaaagcttgttcaaaatattattcgcgcggcaaatcgaccttgtcgaatttggcaagctggttcaaggaacgtacgattcggcagaaaataaggctgagaagcggtatcaaagccagatgaacgtggcagtaagtaccaaagatcttaaattaatggaaaaatactgtcaggacataattgagtcgtcgaatgatgaaatcttacaattgcgtgctttggtagctttggcttactttaaaggtgaattgggaggccttagcaaggaaattcgcgtgaaaataaaagaaaaattcgatgaggggcgcaattggaccaaacggccagaattgctgggattgcttgcgaataccatgcttttatgggaccaagatgacttgaactattggattggcgatctgcttaagaaagccaaaaaagaagcagtttcagatttaatactcgaaagatatctcagactgtttgaaaattatttggttatttgctatgaacggaaagcagatggaaaagagtatcaaaaaaatcgcgttgatgaagtgatcaaatacatcattagcgttacggcgccctttcagctgatgatatataggattacggcactttacttgcatgctttgctcacagatcaaaaaggcaaggcccaaaaaatcaaaaaagatatggaagcttatggctatggaaacgcaattgccagttggcctgaatagcttgtaacaaatatgatacaaactggatcccgaacaagtgactaatgttagaatcaatgaataaaatcgttagagtaaaagaacgattattataggattccaatccctaaactttcagattatccaacttgtggcaaaacagtatgattacagtaaataaagagaaattaattgaacgagctgctttggtggcttctggcgtagctgcattaggtacagggtcttttgttagtatttctactattttctttttgacaaatagtcatgtcactgcgacggttattggtataggactgacattgtctgcaatatctggcatgatcgcttctgtaccaattgcatactttgctgatcgattaggaaaattaaggacattttcaatatcttacatattaagagcaataggaatgttgttgtggctgatagtaagaggaaacatcggtttcttaatttttatgactttgtttggaataattgataggtcagctgcttctttaactagaagcttaatagttatgccactgagtaaagaaaaagcttcaattttaatgggggacatggctttaccaaccaatctgggatatggtatcggtgcaggaataagtggaataataagttttttttcatttcatagaactttgctaaatgtctatattccattattagttgcaaaaaagattcctaacttgacatggatagctccaactgcatttgtatgtaacacaattgtgattgctctttttcaagggactacaaataagtttgctgttcaaaagaaagcatatgatcttttttggattatttctggattttgtttagtaatgtcatttttaggaatagttgtttccggtatctttaacgcaaacaatacttatttgatattactagtatttctaattgttatgcaaatagtagctgagttatttagctccgcagcactagctgtttatatggttgaatttagtagatctcaatatttaacattagatttaagcgcaataaacttaggggggcaattacagaacattgtaggaccaatgatatttggagaatctgccgcatctaattcgttggctcctttgagtatgtgtgttttgactttaagttttacggtgattgagttaagaagaatacttagtttatgcagaaaaaaatagcacaatgaatgtcgtcatgacaccatattgaatgcacgcgagttaggttaaatacaaaaaaagagctaatcacggctctttttttgtggcattcaattttagcatgattgaccgccgccggacggctacggaatggacaacgccttgatcaaaataggcgatgccctttttttcgtcgtaattttgcactgcatcagctttgccggtcagcagggaccaagcttggataccttttttcataatccttgagggtgcccaggcaatcgaagaccttatttttggcgtaaacccgcaaggtcttgaaaggctgattccatatttggaaaacgggaacttcggcttggcctttagtcagaagcatggacaatgtaattttggattttgaaaaaatggttgaaagaaaagctaagcgactgtcctgtaaagagatcacgccggcaagcagtctcagcagtctttgcacggggcatgaaatcagcaattttgggatcggcgagctcctttttaagctggttcagtttcagtagtggatgaaacaagattatttttttattaaaaagtgtttactttctcatttttaggtactagaataccggtataaacaacagtgatagaatcggttggcgtaagggctgtggtacaagagctgaatgaaaaagtcattaaatacttaaacggggaactggacagaaaagacttgaagatttcagatcaagaattgatcaatataattgagaaatttcggtttttaggcttagttactactaattcgtatagcggtaactcaaaatattccagaaatattagtttctttgaatggatggatacgtctgacaatgttgatccaaatatataccaagaaaaattgcagaaagcaaaagtagctgtgtttggagttggcgggattgggtctgcaatggctgaatacctggttagagcaggagtaaagaatatcaaactggttgattttgatacagtggaagaatcaaatctcacgagacaaacggcttatgtggaaagcgacataaataaagctaagatacaggcgtgttcagattacttaaaaaagatagacagcactgttagtgtggagactgtacattgtaagttacagggccagctgatattgaagcgaatattgatgctgaaaccgatctgattgtaaattcgatggatcaaccagcagagttagacagctggtttgatgaagtttctaataagactaaaaaagctgtgatttttagcagctacgcttcaactgcaacaaatgtgtatcctaaaattccaggtgtaacaagagattacagtgaatttttaggtaaggaacagattacaaaagactgcataattgacaacagttttccgatggcggcaatctcgtctgtaacagcaatggcagcgggcatggctagttactacgcaattatgtttctaactggaatttgaattccgaaagatgctattcagatagattttgatggatggacaatcttgaagattaatgtttctgtagcgggataaggaggagtaaattgttaaaattgtggctgaaagctaatcggccgcgggcggccgtattgctggcgctgagcgtcttgtttcaagctgtgtcagcctacagtctgtacttaatcagtccgcagctgaacagcttgattggtggaaaatttacctggcttttcgccctggccctacttaaattggctttggatttgtttggcaacctgcttttggcggtaaacaactacttgttcagccagcagagtcaagcagcaatcgacagctaccggcaaaatttgctgcaggcctactatgacagcaatgatcagtggccaacagctgatctgcagaatgacttggtcaataatttgcaggtgattaaccaagattattggcaaagcatctattatttcgtcaacaatgtgctctacgccttttttgtcagtgtggcaattctttcctttaattggcaactggttctttgtgcttgggcaatcgctattgtggctctttttgtgccgaagctctttgaagaaaaaagcagcgcggcaactgaagccgtggttaaccgcaaccaaaagtacttgcaggcactggaccagtggttggcagcgattgaggaactgcggcgtttttctttaaaaaaggtattgtgccggcagcttggtgaggaaagccaaaaattggaggacgcccggatcaagcggcaagcttgcctgtcagtcgcggaattcacgcaagaaatagtcgacaatatcgggattgtgggagtcccttttctggcgggaatactgtacttcaggggccaggtggctttcggggcaatcatcgctgctggctatttagccaatggcgttttcagttccctgcaagaggctttttcggcttacatttcggcaaaatcaacgactaagttgaacgaaaccatgctccagcatttgcaagttcaagcggccgcgaagacggaagatccccaaacgattatcggcagggggatagaagtgaacttgggcgggcaagtgattaaatatccagattttacgatcaaggcaggagagaaggtcttacttaccgggccaagtggctgcgggaaaagcagcttgcttaaacttctgcttggccaaattgagccgagcaaaggccagctgacatatttggattctgaagggaaggaaatcccaaatccggcccggtcctttgaatatctgccgcaggctggctggattttccccggaacagtcgctgacaatatcaccatgtatgatgccaaaaagcagaccaaattggcggaggtactgaaaaaggttggcttagaccgggacttctctaaggcagttgacctcgaccgtgaggtcagtccccagcaggcagacctgtctggcgggcagaagcagaagattttcctggcccgcggcctcctgcgtcataaaaagttctccttgatggatgaaccgctgagcgcgcttgaccaggccagccggcagaaaattttgccacttctgctggggcggaaacagactttgatttttgttgggcataatttaccgctcgaagagcgggagcgatttgatcaagtgatcaatttgaaagaaggggaaaattttgcaaattaaggatttgtttcggctaaaccctggccgctttctggcattactgctggcccgggcattgacggctctgctgacggcgtgggcagcttttgccttgacctgggagttcagcgcgataaaagaccgacattttcagcaatttctgctgtttgcggttctgcagcttttcttgctcttgcttggcagcctgctggatcaagtgaccgattatttttgggaactgcaccttgaaaagtattttcaccagatccggcaggaggttcttgcccacgcttatgctgaagcggctgggacaaaggaaaatcttcaaagtgaattgaccaatgacctggaaatgctgaaggaccagtatgctgattctattggcggcatcgtgcactcggccgtcctgctggccttggttgccggttctctggcgtctttccgctggagcctgctcttactggttattgccgtaagcgtcttgcagatgtacttgccacgcgtacttgatgagccactgcaaaaagctactgacaaaatttcggccagcaaccggaaatatctgcagactctggccgactggctcaatggcattgatactttgcgccgctatgcggtcggggaaaaattcttaagcattattcacgctgatgcccgtgagttagagtctgcttatgtaaagcagcagaaagctgaccaggaactggactacctcaatcaagctatttattctttggggaacacgctgattttcctgctgactgcttatttggtagcgcgcgggcagctcgaattcggcttgattgcctcggtaaatgacttcagcttgtacttgtttggctctctgatgaacattgccaattaccgggggcagctggttgccagccgcggcttgcgggaaaagattctggacttgcggcagccactggctcaagcggaagaaggggggacaacgccagctgccttctctgtaaaggatctgcggctgacttttgccaatggacacgaaatcaagtatccagatatccaagtcaagccgggggaaaaagtactcttgaccggggccaacgggactggcaagtcgactctgtttaagctcctggtaggggaaacagcggccagcggaggacagatcagcttttttgaccaagctggaaaaaaggtgaagcctgatcggactaaaatcggctacctgcctcagcaggcggtcttattgccaagcagcgtcatgaacaatatcaccatgtttgatccagaacttgagtcaaaggcgaaggccagcgcggccgacgcccagctgactgaggcagttgatagttggcctcaaggcctggaaacgccggttgacttggcaggggacaatttgtctggcgggcagaagcagaaagtagtgttggcccgtgcggaagttcgtgacagccagcttctcttggttgatgaagggaccagcgcgatcgaccaagcagctggccggaaaatcctggacaaactgctccagtctaaacagacggtggttttgatcgcgcacaatctgactaaagaagagcgggacctgtttgaccgggaattagccttgcgagcatagatcagcatacataaagaaaatgaccttgtttaagcaaggtcattttttgttgcattcagtttcaacatgacagaccgccggcgacggacggcaacggaatgggcaatgccttgatcaaaataggcgatgccctttttttcgtcgtaattttgcactgcatccaggtttatcaagctttgccggtcagcagggaccaagcttggataccttttttcataatccttgagggtgcccaggcaatcgaagaccttgtttttggcgtaaacgcgtaaagtcttgtacttcttcggctgaatgctgatgtaatagaggtcagcaagtggaatcttctcaacaaaattgcggatcttgctgtaggtaaaatagcttgtctgctttgccgaagtcatggtcagccggtagcgcttatacgcggtatcaactgtttcatagattctgtgctggatttctaagggagccgcgtctttggtgatatagtccaatggctcaacgtgccgctcaatggttagccgtaaggccgtcgcgtcggcggtgacaaagacaatttggctcaaaatgccgatgtttttgatccggctggcgacttcaatgccgtccagactggtcttcaggtcaatatccaaaaaagccaggtagttcaaatcttgatgctccgcgatataagccaatacgctgtgaggatcgccggtactcaagacgacacgggcatcataagcagcaggcgtctcgttgatctgaattctgttttcaatcatttgctgaatgatttcacgttcagcagtattgtcttccaaaatgatgatggctagcattttttctatcccttctgaataactaattcaaatgaaatttcgctaacgctttgctcaatttccaaggacaaatatgggtcgctgttaacgatttcgttgacgttatcaagccccagtccatcatgattctgcttgctcgttacccttggcttcagaacttgggcaagattgactggctgggaaatcgtattttgcacgatcagggaatagttattgcccgagtatttggtcagcagaacgctgatctgcccatctgcctgtgactggcaggcttcaatcgcgttgtccaaaaaaatgccaacgcagcggatgatgcttacgatatttacgggcagagtagcaattggcttgttgatctcaaccttggtcttgatgccttggtcttgggcctgctgcagcttgtcgatgatcaagtacttcagttctttgatctgcaaattggccagttccaaagtcattgagttggccgcttcttgcaggcggttgctgtcagcgaccagttcttcaaggtacttgctggccccggcgacatcggcggtcagcaggtagccgtttagcgccaggaggctgtttttgtaatcatgccgcgccttgcgcagggagatatttgcctcttccaagcgggaggaatactcctggatctgctggatttccgctttttgaatccgtgtggccataatttcctggttttcttgaatcgcctggtagagattgaaaaagaggaccgtgatcagcaaaagcacgatagtcatcaagcccagttccaccaagggggcgatgctgaagacctcgatcatggaccaaatcacgtgggtgaccagcaggaaggaccaaacgatccaaaccagcaagtttaaaaactgggggttgcccttgacgtcagcggcaattttttccagatttatggcaaagtgctttttcaaaaagcaaaagagcaggcagatcaagatttccggaaggaaacaaactaaattaatggccacgtgatcaagcaggtggtgagtaaaaaagtagaagagcagctggacgatccagccgaagagctcacccaggatagggtaaaggatcaagactaaatagtagaaaaagagcctgcttaagctttttgcctgcccgcgcgcgaaaagctgggagattaattgcaaagcgatgatggccgccaggacatattggtagccaaagagtaccgggagcaacaagagaggatagaggagcaggtcagaccgttttacaccggcaagggtaaaggccaggaggaccgagaaaaggtaagggttgaaagctagattgttgaacaggctgttgatcatttttttatttccttgaaaatacacgtgctacagaatagtcgttatttatgttaaagcagtgtccggcaaagtgcaacgccagcaacgctcaaggccagaaattcaacgttcaaaaattattttttcgcgggaggctggaaaggcatataacaggaagcatagatcttaagggaggaaataactatgaatacagatactcaaaattttcaaacagaaaataatccagcattcaacttacaaggaattgctacaagtctccgggctaaaaagcatagaagaaaaacgagagtaagcaacagcaatatcagcattctgtgcaatcacatcaactttaacattttgggctaattctttaagggaggcaatctcatgggaaattacattttgatgattgaaaaagaactgagccaagccttcaaggaattggagcagccaagaagcaagcattggaattggcgaaatgcccatagccatatcagcatcatgtgcccaaacagcgacagccacttttcgattaaaatccgttaagccatgaagctgctaaagatcacgccccgcttgctgtgggggatcctgctgagcatgattgccagtttgctgaacttgtatttgcccctgctggttcgccattttatcaaccttaagcagttcgcctggtccggcctttctaaaaaagtcttgctgctgggcgggctgatcctgatcggcaacctcctggtcagcagcctaagcgactacttgatcagcagtgaaggcgaccgccaagtccgccagctgcgcctgcgtcttcaaaagcaggtcctgcgcctgccgcagaaatattttgaccagcagatcagcggcaatttgactagccggatcatcaatgatgtcaacgtgctgagaagctttttgaccgaaacgatcccggcggtggttaccggcagcttgactatcttgggcacgatgcttatcaccttctctttggactggaagctgactctgctcatgctgctggtctttcccattgacggactagtgaccgttcctttaggaaaaatcagcgaagtgatcgctgaccaaacccaaagcagcttggctgctctgaccggggtcaccagtgagagcatcaagcagatcaagactgttaaattgaataaggcggaagaggacgtttttgccaaaaatgccagggagatcaacaagctctaccgcctgtccctgaaaggtgaccggatcgcggcgatgattgggcccttgcagtcaatgctgtctttttgtctgattatggccgtcgttctttatgggacactgagggtaaaaagcggctctctatcgactggaaccctgggggcctttatgatgtacttctttcaaattattggcccaatcaacaatgtcgcgcttttttattctgacagaaagcaaatgctgggtgccacgcgcaagatcagcgaaatcattaacgaaaccgctgaagaaacggctggcaaggagcagctggccgtcgcgccaggcagcagtctgctgaggcttgaccaggtcagttttgcctaccaggatctgccagtcttggaaaaggtcgatttggaagccaggagtggtgaaaaaatcgccctggttggggcgacgggggctgggaagaccaccttggccaacgtcatcacccgcttgtatccagttgccgcgggccggatcagtttaaacggccaggccagcacggatttttccctagagcaatggcggggctttttcagcgtcgtgctgcaggaaaacacgattatctcggggagcattcgtgataatttgaccctgggcttaaacagaaaagtgacagaccaggagctttgggatgctttggctctggtgcgtttggaggaatacgcgaaaaaattgccgaaagggttagacagtctgctgggagagagcggaaagcagctgtcaggcgggcaaaggcagaggatgcagattgcccgggcctgcctgcgcgactttaaatttttgcttttagatgaagcaacgtcaaatttagacgcggatactgaaaaaatcatcatgaccgccttggaccggttgaagcggaccaagaactgcggccagatcacgatcgcgcaccggctggccacgatcgccaacagcgaccggatctatttcatcaagaataaaacagttgttgccagcggcagtcatgaggaactgctggaaaaagttcccgactatcgccgctatgttcatgaacagcagctcaaggaaaagaggtaggcaggcatgctggaggagcagataaagtatttggaggcggccaggaacagcggcagcctcttttacacccggcaaaaaggagaggaagagcacttttttacgcttaaagaccggccggatgcggcctggctggagaaaaagactgctaattggcattacgtcctgtatgagccagatgaattgccggtccagggctggaagattcacttgagtgccacggttaagcaggcccaggggatgctggatgcggtggcaccgtgcctgatcaagcagaaagtttctttcaagtttcaaagcagcctggagcaatacgttgaatcgaattccaagtacgctgaccgcggcgaaagcgggaagtttatcacggtttacccacgcggcgaggaggaatttgcttgcctgctggcagaattgcaaaagctaacggaaacttttgctctgggaccgtatattttgagcgaccaaaattggcaggaaagcaacgtttatttccgttacggcggttttaagccgctttatctggtcaacgcggctggcgagcgggttccggcaatatatgacccggctggaaacaaagtagcagaccagcggctgccttattaccagcaagccgattttgtcaaagacctgccaatttttggtaaaaacacttttccaaagcaggaggctttcgctcctttagaggagtatcaagtcaaagaagccctgcacttcagcaatgctggcggggtgtatttggccttgcatgaggggaaaaaagtagttttaaaggaaggacgccagcaggcaggactggatgccaatctgaaggacggctttgccagagttgaaaatgaagcggaaatcttgcggcagttggcggacctgacaggcgtggtgaattatctggacgattttacctcatggcggcaccactttttggtagaggaatatattgctggacaaagcctggaagagcttctggccacggaatttccctttgtcgttggggatcttgaaaaaaaggcccgctataaggccaaggcgatcaaaattttagagcagctgaaggagctgctaaagcagattcacgcccgcggtctcgccgttggcgacctgtccttaagcaatatcctggttacagaagacggggatgtccgtttgattgaccttgaaaacgcgggcaaggctacggagaagtatgtcccgggtttgacgacggttggctttgtttcgcgggcggccaagacttacgcggaagctgacgattttgccttggcgcggattgcctactatcttttcctgccggtcattccagtcgctgatttggcgccggatataattgccaagcaggaaaaatggattgggggctattttggccaggacctggtccagtttttacggaaaattgcaggaaacatgcaggcgtccgaaccgatttttctgaaaaagcccctggctatccccgagaaagatctgagccggcagaccgtggacttttttacagatggcttaactagggggatcttgcggcattcgcgctttgaccaggtaggattagtgccaaatttgcatgagaaaaatgctgatcctatggaactgctgaacttagctcgcggtgccgcgggcattttatgggcagttggccagaacgcggacttgcaggcctgggtagcaagaaatcaagggaagataatcaagattgcggaagagtctgaggcaaccggcttgttcaacggtctggctggactggcaagtgtcttggaaaagcgggattttccggccttggccaagcaacttcggcaaattctgcggcaaaaagttgatctgaatatggcggacaattcgctggccacgggtttgactgggattgccctggccttgcgggaagagaagccggaagtaagcgaaaaaatcgcggaagagctggccggcagatggaaacaggtggattttgccaatttcgcggatgaggatgttggcctgctgacaggatggggcggcgtgagctggcttttttggcaattagggcaaaaagaagtggcggaagaaatcgtttcgcggattttgcgggaccatgctgaagaagcagagactttgaccattagcgatcaatcgcgcggctttgaaaggctgcttccatatttggaaaacgggaacttcggcctggccctgctgatgcataaattcatgagggaggacccggcctttaagcagagatatcagctcccgttcgataagctgaaaaagtcctgtttgacttattgcacttacatggagacgctggtatcgggctacagcggggtacttccgctggctaagagtctggctggtgatggtgactatgcgctgctagattacgctttagctgctttgaaccagtatttggtcgctaacaatgacgaaattttggcgcctggaaaatacggctacaagctgagcttggacttttcaaccgggagcgcgggattgttgaccctgctgaaagacctgcggcagcgcgatgagttcagctggctgccgctttgacaggcaaggagggagaagcatgaacaatgtaattttagattttgaaaaaatggttgaaagaaaggctgagcaattgtcccgtaaggagattacgccggccagcagtctcagcattctttgcacggggcatgacgtcagcagttttgggatcggcagtctgcttttcaaactgtttaagtagttgtccgcctaaaaaaatcaacttttttcgcgaaagctcttgtcaaggacacgtttttatggtttaattagtaactgtgttaaggcacaagagtcgctgacttagctcagttggcagagcacttcactagtaatgaaggggtcggaggttcgaatcctctagtcagcatattttaaccgtcacctgcagggtggcggttttttcttgcctaaaatccttcaagcttttataaaaattgcttcatcctttttggactataatgtaactgcagtataaaaattacagaaatcaggaggaagaaaatggcactcattgaactcaagcaggtgtcctaccgggcaggtgaccaggaaatcctgcaagacgtctcctttgccgtggaggaaggggactacctcaccttgaccggaccgtcgggcagcgggaaaagcacgactttgaagctgatcgcgggcttgatctcacctaataagggggagattttttacaaggggcaaaatcttgatagcctggatctggtccagtaccgccggcaggtgtcctactgctttcaacagccaaccttgttcgacgaaacggttaaggacaacctggccctgccttttgccatccgcaagcaggactttgctgaaaagcaggtccaggaagctttgaagcaggtagatttgccagctgactatttggataaaaagattaccaccctgtctggcggggagaagcagcgggtggctttgatccgtaatctgcttttccggccggaggtcctcctgttggacgaagtgacgaccgggctggatgaagagagcaagcaaatcgtccatcagctgatcgcccgggtgcaccaggagggaaccacgatcgtgcaggtgacccacgaccaagaggagctggccgcttccaagcagctcctgcacatggaaaaaggaggagttttgaaatgaaagcaatagctgtcagcgatctgtcattaatcttgtcttttgccctggtcctggtatccgtgacgatttcctggaaggaaaagttgggcttgaccagggacattttttacagcgtgggccgggctatcgtccagctggtcattgtcggctacgtcttgaagttcatcatgcaggtcaacaatgcccttttgaccctcttgatgaccttatttattatttttaacgcggcctggaacgccaataagcgggatcccaacccgaaccgccagctctggcagtcaatcatggcccttttgatcgggacttacatcaccttgggcgtattgctgctgactcagacggtgaagctgaagccgatgcagatcattccgattacggggatgatcgccggcaatgagatggtggctatgggtctgtgctataaggttttagccacgggtttccatgaccagcgccagcaggttttggaaaaaatcgccctcggggctgacgtgaagacggccagcatgacaatcctgcggcggagcatcaagactgccatgcagccgacgatcgactcagctaagacggtggggctggtcaacctgccggggatgatgtccgggttgatttttgccggcgtggatccagtttatgcaatcaagtaccagatcatggtcactttcatgcttttgtcagcgactggcctgggcgccgtgatcgcgggctacctgtcctaccgcaactacttcaacaagcggagccagctgcgggaagagcagtagcgatgttagaaaaatattttacctggctggcagaagtactgttaatcatagtagtaggcttggtcttcataactctccattctctctactatagttatggcatgatgatttttggtgagcattccgcggcagcaattgaaatgtttgggaaagcgaaaagctttggagtagcatttacactgtcgcggtgatagtcattgctgtaagcacgcaaatcgtcagatcttttaaaaggagtataagaagtaactggaggatgcctaagttatgagcagcgatgagtgcatggcttgatgcaatcgaagcaatgcgattgtcgaattattcatccttttgctgaccaagtattaccgctaattttttataaaaaaagctctaactgcctctgtggcaattagagctttgtttgtttctaaaattaattcgcgatccggcttacttaacgttgcctgccttgatgtaacggccgacattgatccggtagtaagtcttcttaccgatcttccgcttgccgccgtaagtgaagacctgcttgcccttctttaaggtagcaactgacttcacccgcttgcccttgctattgtaagtccaagcattgtgaaccagcttgcgggcagtaccatcaacgttgttgatcttgatgtactggttggtcccgatcttgtagtagttgttgctgccgatcttgacgatcccgccgatcacgtaaacgtaagtgtacgcgctcttgtaagcaccggttctcttgccggcggaagtgtagacgtaagacttagacatgatcttcttcttagtcttgcttacaggtgcttgactggctggcgtcttagatgggcttgatgaagaactggatgatgagctggagctgattgacagaggcagaactgagatgttcccgtcaacattcagccccttccagttttcagtgaactgccagatgatgaccccgtttattgacgggaagtatgaaaagtctggcgcgtcgatccggcctgagctggtgtagtaggctacccacaatgagttagggtaggttgacgtaaccgtgctcatgttgatcgcgttgttcaaaaggtaagaaccagagtagagcaatggctggtagccagctgccttaaccttcttcatgaaggccataatggcgctggtattagcacttctgctcccgctggttgagttgccgctgctggtttcccagtcgatagccaggtatgagcctactggcagcttgactgccttggcgctggcgatagcgtagtccgcttcactcttagctctggatgagctggaaccgaaattggcgaagtggtaggccattggcaacagtttgttggccttggcgctggctacttgtgccttggcgtttggattccggtagctggtgccttcgctgaccttgacaatgacgaactgagcgcccgccttgctgtacttggtcgtgctggttggctggtagcttgacacgtcaaccccataagaacggctgctggcgctggtcgtgctggcctgtgccaggccggcgaagcttatgcttacagctgccgttaatgtggagactaacgcaagtagtttaaggtgtttaaacttcatgtatctggtactcccattaaaaaagtgtgtgattgaaaatgctcaaaataagtggtttgttttgcaacaatcctcattatataactgcaatgttacaaaaccttgacacaaccttttctaattcttaaataatattacagtttttagcactgaaaaggcttcactttaagcagatcgtttgagcttgcctgccgacttatgtaaaataccctttgtcgttgtcattgaaccagtaatatagataagggagcgaataggaaatgcagattagaaaagcagaattgaaagattttgaccaggtgatggcgatcctgcaggacgggcgcaaccagctggcagaaagcgggattgaccagtggcagggggactacccgaaccctgaccacgtccgccaggacatcgagaatggctatgcctacctggccaaggccgacgacggggaaacagtcgggaccttgaccattattcccgcgccggaccacgcttatgatcaattggacgggcactggcaaatcgacacgaatgactacgttaccatccaccgggtggctatccactctgaccacactggtcacggctatgcttctcaactctaccaggcagtgatcaactacttcgccagcggcttcaatgacatcaagtccgtcagagtcgacacccatgaggataacctgcccatgcagcacttgatcgaaaagagcggctttaagcgggtcggcaccctgcatggggtctaccgggaaaacgagaccagctacgtttacgaacttctgactgtttaaattatgcttactaagtaataagtaagtcgcataagtaaacagtttaaaaataatagctgttttgaaattcgtaaggaaaagatcatattttcatcacaactatcttgtatattagattcgtagcttgaggttgtggagagccgcaagttgcaacatccaaatttcttttatttttctttcctcaatgtaacattgcattgaattttatacatacacaacacattcctaaccaaagtcagttgttcttctaagcaactggcttttcttgtgctctgaaaatgaaaatacccgtgttatactagttattaccagattagaaaaaagtttcgcaataattactttcatattttttaagcaagcatataatagagctactgagcaataaggaggagccaaagtgaaatcagtcttgatcagtcaagatctatcctgtgttggtcaagtctcgctggcggtcgccttgcccgtgttaggggccagcggcctgcagaccgcggctttgccaacggcaattttgtcaacgcatacgggcgggttcggggagaacaccttcctggacctgtcggccagtctgccggatatttgggcgcactgggacaaggaaaagatctcttttgacgccatctatttgggctacctgggccaggcggccagccgggtctgggagaaggggctggaagaatacagccggcaggggaaactcatcctgctggacccggctatggctgaccacggccatctctaccgcggctttgatgacagctatgttgtccagatgcagcgcttggcacggcaggcaacaattttgacgcccaacttgaccgaagccctgctgctcttgaatgagccggtggactttactgaggttgacagccaccgggcctgcgtgatcacccagcgcctggcccagaagtttgccctgtcccaggtggttttgaccggggtgcccctggccgacaaccggatcggggtttacgggctcagccggggcggccgggtttgggaaaggacccaggaccggattccgcacagctattttggcacgggggacctttttgccagcagcctcttggccggcctgcttcacgggctggacttggaacaggcagctggcgtggccggggacttcgtggccaaggcaatcctggcaactgatttggaccaggaccagcgctttggccctaattacgcggcggccctgccttggcttttgcagcaattgcaaaattagtgcattgatcatctattttaaggagggggaaataattgcgcgatgaacagaattctttaagagcagtcgtgttgaccggcttgttcgcggccatgatttatatcggcatctgggtcctgcggatcccgctgccggcggttgttggccggcctttcatccacttcggcaacaccttgacggccgtggccattctctacctgggcttccgtaacggggccctggcggggatcatcggcctgggcggctttgacatcctcaacggctacgcggctaccagctggctgactatgctggaagtcgtagtcgtggctgccattttgtccgcggtctacaagggcatgaagtacaacgacagcaagaagaacatcattattttggcggtcatcgccggggtaaccaagatttttacctcttacgcgacgatggtcgtggctgccttgatggccgggacggcattgcagccagccctggtcgcggccttcctgagcctgctggccacggtgatcaactcctgttcaaccgcggtctgcacgccgatcctctactttgccttgaaagatattaccgtccgcgtcatgaagcgggcacactaaaaggcttcccggctgggaagccttttttaattgctgaaaagctggtcggcgattttggctggcaggggatcaggcagaaccaaatccaggccgaccgcgctcttgcccttgagatttacctcgcggaccgtggcagggtcgattttcgctgagcccaggtagtaaaactttgggccgtaggcatccgcccgcttgacgaagaccggaatccgggtgacttgctggccagattccgtcccccgcaaaagctgctggacttccggggaagacaggtggcggggagttctggtataccaggccaggcgctggccgcgtgcctggttgtcatagcgggcatttctttgctcctggtcagttttttgatatgtgataaaaacggggcagacattgccactcagccggtagccatacatgggccggctgacgtctagtggccagttgagcaggcggcagacctccttgcggtcgtaagccgcgtagagggtgaagtcttgagtcgggtctttttctttggcgaggaagaggccagtttcgaccgcgtctttaaacagacggaggaagtcgggactagcttggacgatctgaggatttaaggaccagcagccgtcctttaagcaggcgacaggctcgccgccgtacttggccttttggctagttgatccgcttttgacatcatagaagtccaaggagaggatggcttccagagatttttccaaggcgggtgagtcgtaggccccgtaattttttaacagagcttggaagtctgtctgactgatttggccttttggcaaaagagcctgcaaaagcaaaagttcatgtggccgctggcctggggccagttccttagtaacgaaggagaggacctggctttcgtaagaggacagctggcagggctggcccattttttccaggaaggctccgtagtggggcagggacttgttgtccagccagaggcggggtgagacctggccttttttggcgaaatccagcaaaaggggcgcccggcccagctgctgggccaggtccgcgtaggcttcccgcagctgcttgagcgagtccagcttgaccttgtccagggaggccaggatctcctggctggcgatccggctgaagttgatggtggacaggccggcaaagctgacggtttgtagctggtacttcagctggtcgcgggagagctttttcccggctaaggccagggggatcaggtagttgttctggtagttgccgatgaagtccaggacggtgacgaagtcctggcccgggtagaggcgcaggccccggcccagctgctggataaagaccgtggctgactgggtggcccggagcatgacgatctggttgagggcgggaatgtccacgccttcgttgaaaaggtcgaccgtcaccaggtagtggaggcggccgctttccagatccttgaccgcctgccggcggacagctggggaatcctggttggtcaaggcctgggccggctggccctgttgagtaaaagcttccgccaattgccgggcttcttcctgccggctgcagaagaccaggccgcaggggcggggaccgctgtagccgtaataatccagttctttaaggaggtagctgacccgctttttcgcgcccagccagcggaggtcgctgaagtcatcagaagtctggccgtcaatttcatagtcgcggataccgatatagtggaagggcgtgagcattttgctttccagggcatcggccaggcggatctcgtaggctaaattgtagtcaaagagggcaaaaatatcctgctggtccatccgctctggcgtggctgtcagacccaggcaaaaggccgggctgaagtggctgaggactttttgatagctgggcgcggcggaccggtgggcttcgtcaatcaagatgtagtcataaaaatcagctgcctggctggccaggaactggtcctgggaaacggtctggatggtcgcgaaggtgtagcgggcctgctggtggctgttcccggtcaaaagggcgaagtcgctgtccttgccgccgatgacctttttgaaggtctcaagggccttgcgggcgatctcttcccggtggaccaggtagaggaagcggcgggggataaagtctttgaccgccaaagccgccaggtaggttttccccgtcccggtagcagaaacgacaagggcccggcgggcgccgcttttgactaaggcttggagattttccagggcggctgcctgcatctggttgggaacgatcttttcttgtttcacgtgtaacacaggcttggctggcggctgccagcttttttcatagtcagccagccaggtgtaagtcaggggctggcttttgcccgtcaagtccgctaaagccgcggctagttgccggggcaaggccgaatcggtttgggaatcgacctcgaggcaccattcctggttggccaggagggcggaccgggtgaagttggcgctgccgatgacggcggtctgccagtccccatggtcaaaaagatagcccttggcatggaagggaccgtccacgatccggacggtaagattggaaatttttaagagctcggcgaaaacccggggctggttgaaggccaggtaggtcccggtgatgatggtcccgcggactccgctggcttgcaggtcttccatgaccagcttgaaagggggcagcatgtcggcggtgatgaaggccacggcccaggtgaaggactggcaggttagcagctgccggcgcagggtttgccagatgttttcttgctggttgctgatgagccggggcgggctcaagggggaaagttccatggatttgacctcactgtggaaagattttttaccatcataacacaagagagcagcggggaagatagtaaaagaattatgttacatgtgaaacaatcagtgctataataatgataaaaataataaaagcttttttacagaggagagaacaatgaaagcgaaggaaatccgggccctggcccgggaaaacctgaagcagatcccgaagaagatctacatgccgatgggcctgcttctggttgtggcaaatatcataccgaatgtctttgaccaggccactgatttcaagtcgggggttggagctaatatcatcttctttctcttggtaatcgcggccgcgcttttgacggctaacggctacatcttctttgatcgctggcggaataagatccaaaagggcggggaagagccaaatgcctggtgcggtctgagcgggcagcacctggcccggctggcggtctacggggttatcgaagccttaattatcgtttccgtgacgctggcgattgtcgcggtgatcgttgggttagtgatttcgcaagtaccggtagcggtaagcatcattcttttgatcttgctggtcgttttgctggtctggattgagctgcggctgacctatgtcgtttacgtgatcgacgatgacgtgcggaccgggcagaagcggtcagtctgggcagaaatcggggctggctggaagctgaccaagggccgggtctggaagctgctttgccttaatttatccttcttgggctggtacattttgaccgcctttaccctgggaattttgggtatctggctgataccatactacaatttggcaattgccgaaacttatgagcagagcaaggaaaacaagtattagtattattagacgcgcgatggcgcgtctttttttacgggcagggaagaatagcttataatttttaatagaaaggatgtcaggcagatggcacaagccttatatatcagcgagattcacatggacttgaacgagtacaccaggatggccatgaaggtgacggaaaagagccggcggcggatcattatgatcgcggaagcaatctggatcgcgaccggagcggtggctttcgccttgaagcagtatgacttcacggtcatgtttgccctggtgattgctttttacccggcggcactcgtctacctctacaagcggcggctgaagaagatttacgcgggcatgccagccatcaaggatgactacgtgcgctacgaattctacccggaccacttcctggttttgaccaaccggggggacggggaataccgctatgaccagatcacccgctatgttgaaactgacgaggaaatcatcatgatgccggctccggaccagggcatgctgcttctgaagaaaaactgcagcccggacttgatcaagtttttacgggagaaatgccagcggtagtttcacgtggaacacagcggaagtggcaaattgccggaaaagctgttaagattaaggaaacaggcttttttaaaaaggagctggtaaaaaatgaaattttcccataaattgagtgacgcggtccacctgctggtctacatcgagatttttcccgatgatgacctgtccagccgggcgatcgcgcgtagcatcgtgaccaatcccagcatggtgcgtagtctgatgatggatctgcgcaaggcagggcttttgaagaccaagcaggggagcgctgagccggaactggccaagaagccggaagagatcagcctctacgatatcttcgcggcagtcggtatggaccaccacttgctgcacgtcgatgaaaacacggagcaaaagtgtccggttggcggcaacattcaagggccgctggccaaggcctacgcggaagtggaagaggcggcttttgccaagatgcgggagatcagcctgcgggaaattgtcgaccagataaaagaagaggggcagcttgcctaattacgtcagcgaaagctggcgttttttttatggaaatagatgttgactttaaaaatacacgtgctagaattactgtagatttaaaaataacaagtaaacgaaatagaaactaacggaggcaattatgaagtacgctatttcagcggctactggcaacttcggccagaccgcggtcaagaatttggttgatgcagttggggaagaaaatgtagtggcgatcgtccgcaacgaagaaaaggggaagcagcttttgccagctggaattgaaatccgccaagcagactacggcgatgaagcagctgtagaaaaggccctggctggcgtggacaagttgctctttatttcctctcagccaggcggggcagtaactagagctgaccagcacaagaatgtggttgaagctgctaagaatgccggcgttggctacgtggcttacaccagtttcccgaaggccagtgaaagcgacaactggctggcagctgaccacaagctgacggaaaagctgcttaaggagagcggcctcaagcactccttcctgcgcaacaactggtacctagaaaacgaaatgactttccttgctccaggtccggcaaaccggctttactgggctaacaactttgccggctgggcaccggaaagtgaatatgccgcggcagcggttaaggttttgaccagtgatgatccaaaggaagtttacgaatttgccggcccgaagcggagctaccaggatctggcagcggccttgaacgtggcaactggtgaagaagcagcagccaagcaggtcagccaggacgaatacgtgaaggccttggaaggcctgggcttggatcatgatacggcggcaatgtacgctgccttccaacagccaattgatgatggttcattgacggaagaaagcagcgacctggaagaagttctgggcggcttgactccgctggaccaggcaatcaaggaacttttggcaaagtagctttggcagatacttttttctaaaaaagcaggtataatgtaggaaaagttacttgtttttgaaaaaaggagcaaaacaatgccatttgtacacattgaactcttggctggccggacgccagaacaactggaaaagatgatgaaggacgtgacccgggtgatctcagaagacactggcgcaccaaaggaacacatctccgtgatcattaatgaacttggcaagcagcagctggctcaaggcggcgaatggagagaaccacaagcttaaagattttgactcacccaaggcgggtgggtctttttttcgggaaaataacaggtgggaaataatgtgcaaagtgaatcaaaagggaaggagggctagagaagcaaaggatgagggtcatttcttaagagaaaaaatcttagcaaaattaatataatagttggctaaacttggtataaattttatgataagataataggtgaaaagtgagtagaacaaagcgactgaggcgaaagcggaagataaaacgcaacaacacagcactagaaagccagcactgacaaggaagagtcagggctggcttttgttttcggaaagaaaagggggctgggggctgctgcgctgccgttttttcattatgaataaatcgtaataaagtcgaaatcgcgccagaccaggcttttaccgctgccggctgcaaaaaaagttcctggcacagataatgtgtcacgaacggaggtagtaaaaatgattaccagtatcaaacttttggaagctaatcagatcctggcccaggtcttggacagcgagaggggcagtgagatcaacgtcaagaagttctgcaagctagctgcctgctcacggccaaccttttacgcccactatggcagcatgcggcagctcagtgcagaattactattaaagaagctagaccagcacttgtactttgccaccagtgattatggcaatggccttaagaggctattgacttatatggaaaaagaccgctgtttcattttgaacctgctggccttgattgatgtagagaaggggaaaatcaagggcaaggagtttgcagcccgttttccgcagaaggttgaatggctgctgcgaaagaagacagtttgctatgttgatgctcattccttaagcggggattattcgattaagaccttgaacaatgctgcccacatcatctacgcgatcctgtacgagtggctggctgaaggcctgcagctaagtgcgcgggatgtttatgaccgctgccaattggcgattgatattgtcgaggagcaaacaagtaagaaagcgcttttgtaattcaaaaagaaaaaagcaaaaaacttttagaaaaaatatcagtcaaaaatccatcgtttccgaacaaagaaagcagaaataaagtgaaaatgactactagtcttgatattcccgaacgagaccaggccccgccttatcacaactctaccgggtgttcagaatgtaaagcgaatgaaaaggctgatttgacctttcaaaaataacgagtatactaatatttgttgtcgcggcgaagaaggaattcgccggagacacgaaaaagaaaatatcaaaaaacttgttgacaagaatcaaacaagcgagtaagatataaaacgttgcgtcactaagacgcaagttggtactttgaaaactgaacaaagtttcg

SEQ ID NO: 2184 - DNA, 9988 bp, Unknown
  gut microbiota DNA sequence
acagcatcttgtggaccttttccatgtcatgctgggcaaaggcattggccacgtgcggcagcatgactgtccccgtcgccgtgacaaaggccagaatcaatttgaccaagttgtcggaatattggtaaaagccagatgccttctggtcgaccatcaggcccagcatggtccggttcagttgaacatagagctgggtcgcgatttgtgggataaacatagcaattgttggcttaaaatgccttaggggctttaagctggccaggttgacaccaggcaacatcttaaatgtatgtggccatagggtcaggttgcctagaaaagttgaaattgctaagattgcaatgtataaggcaacatcacttgaactcttaataaaaacaaaaatagcgaccatcgaaacgattttaacaaaggtatttctcaaaaccgttcgccggaaatcctcaattccttcatataaccaagaaatgtcaaaagcaaccgcgatcaagttgatcgactgggcccacatatatagctggtttccttggtaaaagaacataaaagtaataaaagccagatatgacaaaatcgtcatgatggttttaacaatttggatctcccaaaaagttttcgccatagcttgacgattttctctaacatatgcaatttcccggttcccgtagtagccgatcccgatgttggccagcagcatgaagtactggatgatggaattggtaaaggcattggctccaacgccatctggacttaaaacccggctgacatagtatgaggtgatcagcgggacaatgatcgctaagacctggtagccgacattgtagaggtaatttttaacaacacgcacgattacttaccgaattcatcattaacagcttccaaagcagccgcgatgacctggtccatgttgtagtacttgtactgacccaggcggccgccgaagatgaccttggcatcttctttgtcagccatttccttgtactgagcgtacaggtcgttgtttctgtcattgttgaccgggtagtaaggttcatcgcccttgtgccagtcagctggatattcccgggtaatgatggtcttgtccggatcccccttgccaaattcgaagtgcttgtgttcaatgacgcgggtataaggcgtttctgcgtcggtgtagttgatcaccgcattgccttggtagttacccacgtccttttcttcagtttcaaaacggagggaccggtattccagttcacccagcttgtagtcaaagaattcatcgatcgggccagtgtaaactaccttgtcaaacttttgcaagtactcgttcttcttggcaaaaaagtcagtatccagttcaaccgtgatcttgtcatgcttaagcatgttttccaccagcttggtgtaaccgcccttaggaatcccttggtagtcatcgttgaaatagttgttgtcataaatcaaacgaactgggacacgcttgatgataaaggccggcagttcagttgcctttctgccccactgcttttccgtgtagcccttgatcagcttttcataaatgtcgcggccgatcaaagaaatagcttgttcttccaggttttgcggggtcttgcccgccatttcagcccgctgctcgttgatcttgtccatggcttcttgcggcgtccggacgccccacatttgggtaaaggtgttcatgttgaaaggcaggttgtacatcttgcccttgtagttggctaccgggctgttggtgtagcggttgaattccgcgaactgctggacatattcccagacttccttgtttgaggtgtggaaaatgtgggctccatactggtggacctggatgccgtcaatttccttggtgtagatattgccggcgacgtggtcacgcttttcaatcaccgtaacttcgtggccccgcttggctgcttcgcgcgcaaagacagcaccgaaaagacctgcaccaactactaaatacttgctcatacttgttttgctccttttatttaaaagtgggtctgcttcttgccgataccaagcttgcgcttgatcaagttgtagcccttcttgattaccgcttcaccgccgatttgcccccaaggaatttcaacgaagtcctgcttggtcgtgtagagccaaacatccagcagtctttcggaaatgtagccatagacccgctggtcctggacagagtagccggaaatatcgatttgcccttccagcttgctcaaaacgccaaaaacaaactcacaataagactcaaaggctggccgtttcatgacaaacatattgaacatgtgggcactgcgccgcttcatcatcatgtcaaaagccggcagatagtctggataggcatccgcgataatgtcacgggtcttgtccagaggctctgccggatgggcatgaatgtagtggtcatagttgctttcgatgtaataattccgcttcttcggcacgatcacgtcgtggtcagccaaaaaatgctcgtagtcggctcctttagccacgtggtccaggtcatgaggcttggatacgtaaaaatagcggcggtaatgcaccagaccaattgcgtcaacgtctttcaagttcttccaggcccagtaaactccggttagttcagagtaataaggattcttggcagagatgttgtctccttcgtcatcgcgttggtaggcaatgcctgctttgtagttctttaccgccccgaccaaaaccggcatgtagaccgggtcagccggcatggggaactgcttgtgggctgccactaaaactttaactttcactagtttccacccctgctttaataagccccttcttttttgaagatgctgaagattgtttggaagaaaatttttacgtcataggtaaaagagatattgtcgatgtattccagctcaacgtcgcagcgctccgggtagctgatattgctccggcccgttgcctgccaaagtcccatggccccaggtctgactgaaaggaacttatccttgcggttgccatattcagccaattctttttcaaccaccgggcgggggccgatgatgctcatgtcgcccttgagaatattgagaaactgcggcaattcatcaactgaggtccgccgcatccagcggccgatcggcgtgatccgcggatcttcatcagccagcagcttgtagtcattgtcaacatacttttggtagagttttggattgcttttgagaatttcttcagcgtccatcttcattgacctgaatttgtacattttaaaaggcttgccgcctttgccaatccgttcttgagcaaagaaggcggatccgccatcccggctcttgatcagcagtgacaaaactaagaagactggtgaaaagacgattaaggccagcaaactgccgacaatgtctaaaaatcttttcacatacttgtaagcgcctatctttttttcgtaattagacgatatttcttttttaatcatttattacccgtacaactaaaaacaacttgcctaagtaatctttggctaacaaaatatatctatgacgaaagcacaactcgccgcagtatactcaagtataacatcttttacttgtattgtgcactatcaataatggaaggacgattgtaaacaaaaatgctggatggttgcatccagcatttttaactgttttaaattaccgaaccgtctttgtcttaagacccatggcctttctgatcaagtcactgattctctgccgttccgtcgtagacacttgctggtaggacacgccatcttgcataaagccagtgccgtgggtgtagtcagttacgacattcttcgtggctggcaggtatgaagatgccatagaagtcaagtcgctgaaggtcaagtcagtttgaacctgcttggacaatgatgaaataaagctagtgttcagcagcgtctgggctgattcggccttcttgaccagggcctgcagcacttgccgctgccgcttttgccggccgtagtcaccttctggatcatcatatcgcatccggctgtaagccagagccttagccccgtccatgtgggtcttctggcccttggtgaaggtgtagccttcgtagctgaagctcagaaccggcgcgatgtcaaccccgccaaccttgtcgacgatggtcttaagcccgcccatgttaaccaaaacgtaggcattaatcgggatgttgaagtacttcttcagcaccttagcaagttcaccagcattaccgtatgcgtaagccgcgttcaacttagacggtgagtgttccggatagtccggcaagttgacttgaatgtcacgttcgaagctgaccagggtggtcttcttggtctttgggttcaagaccgcgaccatgatggagtcggtccggcctttgtatgttctgcccaaagccccggtgtcagtccccatcaagaggactgccatcggcttcttgttactgatgacgtcgttcttgctcccgttttccgcgctgctgatcccgcctgaacggtaagcagtattggccgcgttcttaactgaactgtattcataccaggcaaatccagccaggccaaccacgaataccccaacgacaatccagaagatccgccaaaacttattgcgtttcttccgcttctcagttcttgtatttaactttttctcattcacagcttttcaccatatgtccaatctttagaatagatgcaatagtttcattatatataaaaactccgggtctgcaccagacaaatccactttcctctgtttttttaaaaaaacttagacaaatgcctggctaacacttcaattttagcagatctccccgccatttaaactctattgattgaaagccgcatacaaaaagaggagtcaaggctcacctttaactcctctgcaactttttatgattagtagccggtaccagtgttttgaccgtacatattttggctgctgtcctgcgtgccatagccggaattataagtggaattagaattagacccgtaattggaattatagttggaaccagtattagtatcagagccaggagcagtcgttgaaccgctagcattgctgccaggggtatttccggcagagctgcttgagccgctggaactagttgagccagttgagctgctagtagaagtatcgattaagtccgtacttacctttttagtcttaagacccaaggcttttctgatcaagttactgattctctgccgctcagaaacagaaatcttctggtaggaaaccccgttttgcatatagccagtaccgtgggtgtaatcagttttcaagttctttgtagctgccagataatttttagccaaagaggtcaaatcagcaaaggttaagtcagtctgcacctgcttggacagggaggaaataaagctggaattaagcagagtcgtcgcgctttccgccttcttcaagagagctgaaaggacttgccgctgccgcttttgccggccatagtcaccttgcgggtcatcatagcgcatccgtgaatatgccaaggctttggccccattcatgtgggtcgttttacccttagtaaaggtgtagccttcatagctgaaagacagcaccggagcaatatcgatcccgccgaccttgttgacgatggtcttaaggtcacccatgttaatcaagacgtaggcattgattggaatattgtagtacttcttcaagaccttggccaattctttagcattgccgtaagcataggccgcgttcaacttagaaggcgacttgtccgggtagtcaggcaagttgacctgctggtctctttcgaagctgaccagagtcgtcttcttggtctttggattcaagaccgcgaccatgatcgagtcggtccggcccttgtaagttctccccaaagccccggtgtctgtccccatcaaaaggattgcgatcggcttggagctgctgatgacggaattcttgctcccattttcagcactgctgatcccgccagacttgtaagctgaatctgccgcgttcttgactgtatggtactcgtagtaagcaaagccggcaatcccaaccaaaagagcggccagaataccccagaagatacgcttggttttgccccgctttttccgtttgccaactctggtatttacatcgttatcatttttcaaagtcttcaccagtatcctattcttttgaaataaaagtcattatctccattatagttaaactggtatcagatggacgctggcagacagatttttatcttttttgaagagtattttcacatcttggtcaaagaaaaaaatcccgctgacgcggaatttttctgcttacttgattttagaagtttgcggacttgatgtacttgccgctggctactgcgtagaacttcttaccttggaagatcacaacagaaccgtaagtgtacttagtgctgcccttcttttgcacgcccttaagtgcctttaccttcttgcccttcttgacatagatgtaggcattcttcttaagagtacgcttcttgccgacagtaatgttgccagccttgatgtacttaccattgctgagcttgtagtaaaccttgcccttgataatccggataccaacagacttggtgtacagacccttcttgtaactcttagccttagtcttcttgcccttagctgagtaaagagcggcgttgtgcttcagacggatgtaagtaccaaccgtttggtagctgatcttggcgcctgatcgcttgtcaaacatgtaccacttgccgttaatcttttgcaggccgtacagcatttggccagtcttagggctgtagtagacagtcttcttttggctggcaatgtactggaagccagtttgcattacgccagtcttcttgtcaaacatgtaccacttgccgttgatcttaatttggccagtaactctcgcgcctgaacctggagcaaagtagtaagtcttgccattgatcttttgcagaccatacagcatgtggccatttgctgggtcatagtaaaccgtcttcttttggctagtaatgtattggaaaccagtttgcattacgccatctttatcgctaaagaggtaccagtagccgctaagcttgatttgaccgctaaatcttgcgcctgaatctggagcaaagtagtaagtcttgccattgatcttttgcaggccgtagagcatgtggccagtagctgggtcgtagtaaaccgtcttgttttggccagccaggtattggaaaccagtttgcatcttaattgagccgtcatcggttgaatcgttgtacaggtaccagtagccgtccttgttaacttggaagctgtaactgtcagttgaccgtttggcttcctttaaggatgcagctgccagttcaggcttaggactattttcgttccagtcccaaacgccttggtcagtagttgagttggccaagacagtcgtcttgtcaccatcgaccaaaaccaggaagcttggcccaagagttgaattaagccccttgccggcaatttcaccccgattacccatgtaggagttaatcaaaacaacgtggttaacgaagtagtccttgtcgtaagttacgccgttaaccgtaatcttgtcgctcttcaagttggcagggttgatcttgactacgtaatatgagtaggtagcagtacgccaagttgatggtacagacgcgccaagtaccagaccgtcaccgttcagaggaatgtagtcgccgtctaccttgtcagaaacaaagcccagcatggtaacgttgtccccaaccgcaatgttagtctgaacagcaaagtcagtgtcactggcatggttgacccgggcatcaacgaagaggtagtacttaccattcaacttgattaagtctggccgttcgatttcgtcaccggacagaacagtcttaacaagcggcttgtacagaacttgcttgccattttcgtcagtagctaccttaggattcttagggtcactcatgtcaagcttgagcaaaccgatagcactgttgcttactgctgctctggtgttcatgtcggtgctgttgagaaacttgaacaattcacttacgttgtaagccgcgttgccgccgtatctgctccagtcatacaagttatcagcaccttctgggtcgtcaccgagatcaccagtagcagtttcaaaggccaggtagtaagtaccgtcactgtccttgaagacgtggccgtcacgcatttgcgggttgttggccccacggttttcgctgtttttccactgttcatagttttggtaaacagtaccatcaccgataaagagaatgtggtcgttttcagtgttcttaatgtaaacaccgtcagcgttctcgccaatgttgaccgtgatagtggcaattctttggttgctgctttcttgggcgagaacgttagcatagaacaattggattgagccgtcagcgttaagcatagctgaaccggaccattggccagttttcgggtcattgttgtagccaaagattgaaccggcaaccttccagttagcaaagttgttgtcaccatacttgttgtaaagcaggtacaagtggctgtcgctcttgtgcgggatacccatcatggccacagccagctggtagccgttccagttttgcacgtagccagtttctgggtcttggactggccaggagtcccagatgtccatggttgcttcttcaccggtttccgcgtccttgaccttgtccaaaccaggcatgttgacgatcttttctcccttgaagagcggaatttgggagctgctgtcgcgttcaacgatcttcttggtaattgagtcgtagtccttcaaagtatactggttgtcttcagtcttgtttagaaccatcttgttcaaagcatcgatctgtgtgtcagtcagcttgtccaggtccaaggtgctgccttctctcaaagcagcagccacgatcttcttaccagtgttattcagtttggcgtagttgtccttggcagcttgcgtggtcaaatagctgttgataactgagccttcgccaatgttttcgtttgaaacatcttcactgacgttttgcttcccaagttctgaagtttcatcactggaggtattgccagtagatgagcctgggtgagtctgggtgttgtcgctggctgaacccgggttgtcggtcgtgttaccagtactcttagtatcagtcttagtgccggtgttggtaccagttgaacctgggttggttggatccggagtaccagtggtcgtgccggttgaacctgggttagttgggtccggagtgccagtggtcgtgccagtagtagcttggttggtgttgccagttgcagtgttggcagtcccgttatttgcggtattggtgttgttagtgccggctgcggtattgttattagttgcagtcgtggtatcagctgtagtagttgctgcagtagtgttagtcggagcagccgtagtgttggcggtagtcgtggttgcagtagttgctgccttgacttcagtcgttgccttttcaacagtatcagccttagtatcagccttaacagtttgtgccttacccgcgccagcaagcaaaccaatggtcattgccgagagcatcaagtaatctttgccgaacaggccgcgtttcttttcttcctttttcataaccttaagtttttcctccaaaaaacaatctgtctattacttaaaaatatagaatatttacacattttactcagccagctaacaagcacactaagcaatatcttcattctacaacatttctttcacattttttgtagcatttgtatcggcttatctatttaaaggtaatccgctttaaaatcccactaattctctaagctcacttaagaaaataaagtaatattttttgtaatatattctccgccattttccgcctattccttctttatgtaatcatgttagaatgtcaaagttgtttgttctaacactaaagtgattttgtaaagaagaggaatttccgtgaagaaagcaatgcaaaaattaacggccctcctgctggcctcagccagcttcctcgtggccagccccgccaaggccagcagcctggctgaccgcaactaccaggggcaaaaagttgt

SEQ ID NO: 2185 - DNA, 5298 bp, Unknown
  gut microbiota DNA sequence
gacgcaaaagaaatttttgaacaatggaaacaagccgccctgccggaagacctggctgaacaaatggctgaattaggcggcgacgaaaagtggatcgaagacgcatttggccaggacatcaactttgggactgccgggatgcggggactcctggaaccagggaccaaccggatcaacgtcttcacggtcggccgggtaactgaaggtttggcccgcttgatcgacgaaaacggcgaagaagccaagaagcggggcgtggtaatttcctttgactcccgctacaactcacgcgaactggctactcatgctgcccgcgttttgggggctcacggcattcacgtctacctctttgacgacctgcgtccaacgccggaactgtccttcgctgtccgctatctacacacctttgccgggatcaacatcactgcttcccacaacgccaagcagtacaacggctacaaggcttacggcgaagacggtgcccaaatggggccggaaaacgctgaccgcctctttgtctacgcgcaaaaggttgaagatatcttcagcgttaaggcagctccagtcaagaagctgcgcgctgaaggcactttgcagctgatcggcgaagatgtcgacgaagcctacctggccaagctggaaacggtcaacgtcaacaaggacatgatcaaggaaaacgccgacaagctgaagattgtttacactccgctgcacgggacgggtaagatgctttacgaccgcgccttcagacggggcggcttcagcaacgttgttccagtgccaagccaggcgattgtggacccggaattcccgacttgcaagaagcctaacccggaattccgtgacgtcttcaacccaggcgtggaactggccaacgaaatcggcgctgacatgatcgtggctaccgacccggacgctgaccggatgggagcctgcgtaagaactgacaagggcgacttccaagttttgactgggaaccaaatcgctaccttgatgtcttactacttgctgcaaaacttgaagggctcaggcaagctgactccggactacgaaatcgttacttcaatcgtatccagtgccttgccattcaagattgccaaggacttcggcatcaagaccaagtcagttttgactggcttcaagtacatcggtgaagaagtcgaccggatgaacagggagggggacggcaagttcctgatgggctttgaagaaagctacggctacctcttccaagccttcgcccgcgacaaggacgccatgcaaggggccttgatgttcgccgaagttgccagctactacgcttccaagggcatgactgtctttgacggcctgcaggaaatttggaagaagtacggcgttgcctacgaaatcacccgggctatcgaaatgccagggatcggcgggcaaaagaagatggctgaattgatgagcaagctgagagaagaacacctcagtgaaatcaacggggccaaggtcttgaagatcgaagactaccaagaacaagttactgtcgaaaacggcgaagaaaccccattgactggcttcccgaagtcaaacgtcttgaagtacttcctggatgacgaaacttgggtagctctgcggccatctggtactgaaccagtaatcaaggcttatgtcggcgttaacaaggctgacatcgcaactgctgaaaaggcagctgaaagctaccaagacgctatcagcgaattgctgaagtaattttaaaacaacaaagaaagaagcaccgcgaacgcgatgcttcttttttgtgcttgtgtgctgttaagaattataggctcttacttgtccccgaaggtgacgcccatgaggcgggcgttgcttacggtcttgccgttcgggtcaacgtacttgagcttgccggccgtgtcttccagggcgatagagtcgacttcaccttgcttcaagacaaccaggcggccgaaggaccggttcatgatcaggcgggcgccttcaatcccgaagcgggttgagatttgccggtcgtaggcatctggccggccgccccgttgagcgtggccgatgaccgccgttctgatttcagcgtctggcaaaacttcctgcaattgggcagcgatttcgttaaccacgctggcgccgtttctagcggcaaccttagccttgtacttcttcttggacagggtggcgtcttccttggaaattgccccttcagcggcggcaatgaccgtgaagcccttgccagacttttgtctttccttgaccttcttggccacgacattgatgtcataagggatttccggcaaaaggataatgtcgctgccggcagccaggccagcagccagggtgatgtggccgaccttgtggcccatgacttcgacgacgaagacccgggagtggctttgagcagtagtgtggatgtcatccaggtatctggtggcaatatcaatggcgctttggaaaccgaaggtgtagtcagtcccccaagtgtcgttgtcgatggtctttggcaggccgatcacgttcaatccctcttgggccagcatgttggctgacttaagtgacccgttgccgcccaaaaccgccaaagcatccaggttgagcttcttgtaggtcttcttcatggcggctaccttgtcaaagccgtcaacgatgacccgcatttccttgaatggctggcgggaagtgcccagaatcgtcccgccttcgttgatgatgccggagaagtcccgcggcttcatcttgacgtagtcttcatgcatcaagccgtagtagccccgcttgaaaccgatgatttccacgtcatcgacacagttgtaaagggtcttggccagcccccgcatggtcgcgttgagcgcctggcagtcgccgccgctcgtcaaaataccaactcgtaaagtcatgcttaaattcctccctgtgctaaacagttctctaaaattcggcttaacttaaatcttagtcatgtacctgccaagatgcaagcagattttttaatctaattgaaaaaatcatgaatatattgtcaaatgaaaattagtaaaagaaaagcagcccgggcagggctgcttcatggtagtagtagttttgattagtgagcagttaaagaaatcaagttgtcgccgtgcttaacgtcagttgcttcaacccgggccacttcattgtatgaaggggtgttggtgatgacaaccatgacagtggtgtcgtagccggcagccttgacggcatccaggtcgacttcaccgattttgtcgcccttttcaatgtgctggccttgagtgaccagggacttgaagtgctggccgttcaagttgaccgtgtccagaccgatgtggatcaggacttcggcaccgtcgtcagacttaagcccgtaagcgtggccagtcttgtaagcaacggaaacagtaccggtaacaggagcgtagacattgccgtcgctaggaacgatggctgccccgttacccatgagcttctgggagaagacttcgtcatttacggctgacaggtcttcagaaacgccgtctacaggtgccagaactacttcgtcttccaaaccagcagtcttggcagcttcaacttgttgttcagctggaacttcagttgaagcgctgacgccagtttcgccttcaacgctggcaacttcttccttcaagtggcccttgccccagaagaaagtcaaggcgaaggcaatagcgaaggaaacaagttcacagacaaggtacattgggatggtcttcgggtagatggacaggaagcccaggaaaccggcagaaccaagggatgcggcttcaacgtgcaggagacctgcaagggctgaagcaacaccggacccgatcagggcgcagaagaatgggaagcggtacttcaagttaaccccgaagagggctggttcggtgatccccaggagggcagaaacaccggctgatgaagacagacccttcatcttttcgttcttagtcaagaaccagatagcgaaggttgcggcaccttgagcaacgttggccatggaagcaacaacgaagataaagtcgcccgcacccttgccggcagcgaaggcagccagcaattgggtttcgatggccgggaagctttggtgcaaaccagtcataacgatggctgagtagcaaagaccgaacagacccatgccgatgaagccagcagtgtcgtacagccatacgaagccgttggtgatccagtcagaaacggtctgcatcactggcccgacgatggtgaaagtcaggaagctggtgatcatgattgacagaagcggggtgaaagtaaagtcaaccgcgcttggcagggccttgtgcagcttcttttccaagaaggctaagatccagatagctgccaggactggaataacttggtattggtagttggtttgcgctacgtgcaagccgaagatgttccagtagtgagttgcaccagccagctgcggggtggtcatgatcaagcccattgcagccccgaggaattggttggcgccgaaccgcttagcggcggaaataccgaccagaaccggcaggaacatgaatggggcagctgacatcagttggatcatgtcagacaggcccttgatggctgggttgatttggaccagggacttaggcccgaacaggccaggactggtaaagaagttgttcaaggccatcagcaaaccacccgcaaccagggctgggatgattggcacgaagatgtcactcaaaagcttgatgaaggccatgacagggttgaccttcttgccgctggcggcgatcttcttcaagtcgtcggtagaaacttcggacaggccggtttgcttgatcaattcgttgtagacgttgtcaacgtcaccaggcccgatgataacttggtattggccgtcagtcttgaaggtacccttaacgtcgggatccttgtccaaggctgcttggtcgatcttggtatcgtcttttaagactaaacgcagacgagtcgcacagtgggcagcggctaccaggttgtcttcacctacggcagcgatcacccgcttggcaactgcattgtaattcattgccacgagaaacactctccttattctctgaaaacgcttttctttaattcacttaacaataatagcggtttctgacaaatatgtcaatcgtttgacagagaatattttataaaagttctgttaactcaaaaagagcctgttaaccgtttgacatgttagcgcttcaaccctaaaatagaagatgataaaagcttaattatccagatgattttttgcctgggaacaatctggcaaataaagataaaaggttactaaagaagagattagtgattaagcggaggttgcttaat

SEQ ID NO: 2186 - DNA, 13486 bp, Unknown
  gut microbiota DNA sequence
gacaagcatcagtaagatttgacaaagagccagtagatatgtagaaaaaggctgctcagagagcagcctttttgattgtcttttgaacgattttttactagaatcagagggaattatggacaagaaagggaaggttgaggatgatgtttatccatgaggaaacaggatacgatctttggtcagatcctgcatatgactatttggactatgaggaattactgactgaagaatataaggatctaggatataatcctagaaatgtaaaagcggttggtaaggaaatagagcttgattgattttcgcgcgcgtgtaaatcaatcgtaaaattttgcacgtcatttacggttcaattttacgcgtatttacgaccgaatttcacgcgtaaagcaatctggaggcgacaaagtcatgtttgaaaaatatcttgattgcgaaagtttgctagctgagaatcaagacttgacctttgactacttcgaaaagtgggctaagcgggagattgggctggaaaattttagccaggatatcttaagaatcttgaatttatatgatgacgaccttggctataatcaagtggctgagcttttatctgatcaaaactcatttccgggcattgaacttatccactttggtgacagcattaatgtaatcaccaagcgagcaacgtttgaccatgaatcggttctcaaagagctagatgatactgtgaacgtctttttggactactatagctacgaagaaatttccgggatgactagaaaaaaggtctttcggatccccgaagaagccttcagagaaactgtagccaacgccttgatgcaccggacttgggatattccggcacaaattcgagtgatgatgtttgatgaccggattgaagtcacgtcaccaggtgtcttgccagcgggactctcagaagaggagtactcgcgtggcaatatttcgattcttagaaacccgatcttggggaatattttttaccgtctacacatcgttgaaacactgggcacaggaatcttgcggattcaggaggcatataaagatagcgagcgaaagccgatttttgaggcttttgctaattcggtcaaggtaacgttgccggtacagggacaggttgaaatgacgtcggttgaaggattggcatatgatactttgagtaaaaatatcttgaaaccaatagtcgaaattacagatgcgttgccttatagccgctccaaagtctctagaattttgaaggatttgattgctaaaaatcttgtcgtcaaggttggcaacggccgcggaaccaggtacaaaaagcggacataagcaacaaagtgtatataatactaagaatttagttttaaaagagcccaaccaaatagtagatcattatataggttaggtataccaaggacttttgcagattctagaaatcttttaatcggttcagaattaccgtcttctctatagtgaataagtagttcgagaaaattgacttttactgtaatgcttaagtaaggctccgtataggaaagctctttaattctggctagaagaagttttgattttttgaaatctgttttaactaaaatcaacgagttgttgattatcgtattccaagcctctagataaaattcaaaatttatgttttctaagtagactatgtcttcaattaaactgttaattaattggaaaacagtgttatttggaagaataaaaccagaattaccaaaagcttgaatggtcgataggttccaatggttgttttgagttagaaatagttttaagtcctgttgatcttgaggagttagatagtttttattttttatgtcgaaaagaacatttgcggcagcacttgcgtgaaacagataatccacgttattcgtatgatggtaagccgcaatattttttagaaaaattcgatatatacttatagaatctttctcactataaagtaaagaaagattttttagaaaattgttagtctcattatttttaggaattgtcattgctataaattcttgtggtgagacatttattcgattcaaaagaataattaatttattgagagatatatcacttaaaccattttcccaacgtgaaagttgagatgttgaaattacatctttagatatagcttccaatgtaatatgtttactcttccttaattttttgaaaacttcgccaaacatatttttaacgttccaaacaatactgtactttttaacaagtctattgtagccaatatagaatatctaaatcaaataaaaagcaaaaaggattttattttttgcaaatatgcaaatttgattgaaaaaagcttaaaatgataatactattagcgcaacaataaaaaattaattttattgttgtgtcagatctagttctttgaaaagagatgagcgtaatgagcaagttcgtagaagttaagagaaacttggacaacgataagtacactgtttggactgtattttagcagtaagaaactgcagtaattaaagctgcagtttttgttttatggaggacgagatatgtataaaagaccacgaattaaggagatatatccggtatatcgcttagaccaagagcactttagaatcggtgcacaaattggaattactaaagaattttatgatcctacagaacaattatggaatctagccactatattagatggtcgttctttgaaggatgtattggatgaagagagaagacggtttcctgacttagaattgtcagatgactacatacttgatgggattaatctgctagatcaagaaggctttttggaagaaactgatttaaaggaagaagaatgccttaacgcacggtatatgccaaatgttagatattttagtcattatatcaactctactaatgatagattccatgttcagaaaaaaatacaggaatctacgattttgttgctcggacttggtggaggtggtacaaatatattaacgttgctagctggattaggtcctagaaaaattaaaattattgattatgatatggttgaagaagaaaatctaggtaggcaattcctttatagtgaagcagatattggtttgatgaagacagatgtagcacgaagggcaatcaatcagattaattctcaaattgaagttgaggtacataatcttaagataaaagagccggaagatttacagaaatatttagagtctgtagatatggtaattagtgctattgatgagcctcagttcgagatagttagagttgttaacgaggcaattgttaaagctaatataccttgtgttttcgcaggtacccaagtgaaccatgggcgtgtatttactattattccaggaattacaggatgctttgactgccttaatattcactatactttgacggataaacaatttttgaaacaatttattggatcggctaaaagcggctttagaccaaagtcaattgcttacgggccagcaatataccaattaacatccgttgttgtagatgaagctgttagagtattgacgggatatgctaaaccaaggagcctatctacacaattagaaattgactatgaaaacttcagttcctttgcgcataagccatggcctagatatcctgataagtgtcctacatgtgggaatggaaaagttgaggattgggaagtctttaaatattatggattattcaagtaaagggatgaatacgaatgaaagtgtatctgaaaaactcagggtatcgagccttaattaactcaacagttttaagcggaattggagatagtctgtataatattgtttttatcatttatgcggcaagtgtccccaataaatcactagcagtatcgttagcttcgtttgcgaccttactgccgtctcttttatctgtagtaactggcagcctggctgatcagacccatcataaagctaaaagcgtaattatcgttagaatgattcaagcagctctctttgtgctgttagctggtttaattaagctaccacagtcattccctttatttctattcttactattaattaatatcgtgtcagatacaattggcagttacgctaacggtttaactttgccctttttgccaagactgctgcctgaggatgagttaaatgctgcttttggcttagaaactgcagccacgaccacggtgcagattatctttcaaggtcttggtgctgcgctgattgttgccatggcttacaattactctgcctttgcttggattaatgcggctactttttgcttagcaattttacccttaaaattaacctggccaaggttaattaaagctgaaaaagagattccattatcacaaaagccagatcaatctttattgagcaatattgctgatgcctggcttgaattgaaaaaacatagttttattttgttgactattgccttagcagtaataatcaatttcctcggtgcctcaatgaatgggctgattaatgtcgccttgttaggtgaacgcactatgtggcttggcaattatgggaatacagtagccttattagacattattttgtcagttggaatcattttgggaagtcttttaatgaatgatttcttgaaaaatagtcgtttactaacgttgcttttattggctggagcttcgttagcagctttaggagtgtcgtttatctggcaccaagctttaatcttagctgcagtaagcctttttgcagcgggctacatagctggtaaagtcaacccccgaatcagtgccttaatggttagagaaattcctaacgagaaaattgctgccgtttctggatttatgcagatgtcggtcttgataggagcccctgtgggtcaggcactctttcttagtattgcaaatatgcaaacgcctcaagtaagttggatactgtttaccatcttagcaacgctttttatcgtgctctgtgcattgctgactcaaaacaaaaaattagttatgaacgagagataaagagaatacttctatgcaaaaaagcatctagcatgagctcgatgcttttttactatctagtttaattaaacgttcaagatcaagaagtagatgatgaagatcacgcataagatccacatcattggtgaaacttccttaccgcgcttagcagcagccatggtgattgggtaagtgatcaagcccaaagccatcccgtcagcgatagagtaggtcaaaggcatgccaaccatgatcaggaaggcaggaacggcgatttccagcttgttccaggaaatcttggccaggttggatgccatcagcacgccaacgatgatcagggctggagcagttacggtcgtggttaccacgctcaaaagcgggctaaagaacattgagagcaggaagaagataccaacccaaacggcagtcaaaccagaccggccgccggcagcgatcccggatgaagattcaacgtaggcgccaactggtgaagtaccgatgatggaaccagccatcatggccgttgagtcagccgccatggccttgccgattcttggcatcttgccgtccttgtcaaccaggccagcctggtgagccagaccgatcaaggtaccagtggtgtcaaagaaggccaccaagaggaaggttaaaacgaccgtccacgtctgcaccgtgttgatgtcgcccaggtggaagatggcttggccgaagcttggcttcaagcttggcgccaaagaaacgactgaagtcggcatcttgctttggccaaccaggatgctgaagattgatgacaggacgatcccgatgaagatcgcgcctggcacctgccggatcatcaagaagatggttaccagcagaccaaagatggttacccaggcagccgggtccttgaaggaaccgatagttaccaaagtagaaccgctgttgacaaccagcttgccgttttgcaggcccaggaaggcgatgaagatcccgatcccggcggagatggcaaatttcaagtcgttagggatgctgtcaacgatcagttcccgcagcttgaagaccgtaatcaaaatgaagatgattgaggccaggaaaacagcggccagggcagtctgccacttcaccttcatgccgatgcagacagtgtaagcgaagaaggcgttaagacccaaagacggggcagtagcgatcgggtagttggcaaaaatacccatgataagacagccgagcgcgctggccagggcagttgccgtgaagaccgcgcccttgtccatcccgctggcgcccaagacgctagggttgacgaaaaggatgtagcacatcgcgaagaaggtcgtcagaccagcgatgaactcccgcttagggtttgaaccgagcttgtcgagctcgaaatacttgttaataaattccatttgatcctccagtaggtaatgttcggaatttcctccaatagaaggggatgtttctaccttaacatggaattaaccggatgtaaatacgaattataattttgctagtgatcataaagtgtgtttccattatttttagccgctaaaaagcgcttgagcatggcaactcaagcgctttccttttaatttttcacttgttttaaaagaatctaaactcagcttagatattcaaaaccttgttcaagaagttcttggtttcttcttcctgcgggtggtcgaagatttcttccggcgtccccagttccttgatcacgccgccgtagaagaaggcaaccttgtcagccacctgcttggcgaagcccatttcgtgggttaccacgatcatggtcatcccttcctgggccagtttcttcataacgttcaaaacgtcgccgaccatttccgggtccagggcactggtcggttcgtcaaagagcatgacatccggcttcatggccagggcccgggcgatggctacccgctgctgctggccgccggacagggtggtcggcttgacgtcggccttgtcatccatgttgaccatctgcaggtacttgtgggcttccttgatggccgtttccttgtcttccttgcccagttcgaccggagccagggtgatgttttccaggacggtcatgttcgggaagaggttgaagtgctggaagaccatgccgatcttttcccgcatcttgttgatgtcgacctttgggtcagccaggtcaacgccatccaagtagatgtggccgtcttggaagtcttccagcttgttgatgcagcgcaggaaggtactcttgcctgaaccagacggaccgatgatgcagacgacttcgcttggcgcgacgtccaggctggcgcccttgatgacttcatgaacaccgtcatagctcttgtgcaggtcagttacctgaaccttgtatttttcttccatggaaaaagcctccttttaactaatgttgcatcttcttttgaatgtagttggacagccaggtaagcagggtgatgatgatcaggtacattatggcgatgatcagccacatcttgaagccctggaagttctgggcgatcaagttggtaccagtttgcgtcaagtccatgaccccgatggcggaaaggatggaagtgtccttaagagtgatgatgaactggttgaccagggatggaatcatcagcttgaagccttgcggggcaacaaccttccacagggctttgtagtaaggcagacccagggaccgggccgcttcccactgacccacgtcaactgattcgaagcccccgcggacgatagccccgatgtaggccccttcgtccagcatcagggtcaagaccccggcagtgaagaggggaatcttgtggccgataacagttggcatgccgatgtaaataaagaaggccaaaaccatcattggaataccacggaagatgtagatgattacgttggccaggccatgccagaacttgtgctcagcgatccccatgatcccgaggattaaaccgaagaccagggcggccaggatgccgacgattgagagttcgatggtcatccacaggccttgcagaagagcgccggcgttgtccttgattaagcccaaaattgaagtatcagctacgacttggctcttaacagccttcttgctggtgtacttgttgacgatcttctttaagcggccagtcttcttcagccaggccagaccgtcgttgaacatcttgaggagttcctggttttcccccttcttaactgcaaaagccagaggggcgttggaaacctgcttgccgacgatgcgcaggccggtcccgttggcaatcccgtagcgcagggacggaccatcgtcgaagcaggcgtcagcgttgccggacttgacgtcagcccaggaagtgttggagttggtgtagtacttcagcttgaagccgtacttcttttggatggacttggcatagatagcagaagtagtcccggtcttgacgttaaccgtcttgcccttgaggtccttcatgctggtgatcttgctgtccttggccacggccaggcagaccccgtcagtgtagtaggagttgctgaagtcgatggtcttctttctttcttcagtcacgctcatgccggcgatcatcccgtcgatctggccagactgcagggcctggacgtcggcgttgaaggacatgatcttcagctcgtacttgaagttttcgtgcttggcgatttcccggaggatttcgatgtcaatccccgggttcttgccattgtaggtaccatccttgtcttggatttcaaagggcttgaaagtctggtcggtgccgatgatgtaagtcttcttgctagcagcctgggccttgggcgccgttaagaacagcgcggcgatgagcaggctgactggcagcaggagaagtttgcgaagtttctttaaatgcatgttatcttttcaccctttttcataaatagtttcttccgctagaaaagcagatcgtcaatattgtatcacgttttttagaaacggtttattttatacagcttatctttggataaaagcaaccggtaccaattttctttttaaagtgaaaccccataaagaattaaaaaaatcgttctacaaggctgaaagctaactaaacaaagaatttagcctaaataaaagagcccccgtcaggggagcttcttaagatgaaaattcgattgattcggtggcaatttcaccggcctgccagttctttggcagcttgcccacttgcttgagcttctgggtgatctggtccaggacttcagtccggtcgctttcgctggccatgaagtcgtagtggtcgccatcgatcatcatctttggtgagtagtcgtagtcgtcgtaccacttctcatagtagcggagcatccgcttgtagtagtcttccagggtcgggtcgaagctgagctgctcgtaagaccggccccgcttctggatccgtctgatcattgtttcataggaaacattgatgtgaaccaggaggtcaggatggcgcttaggcatccgctccagttccttcatcatgctttccagcagctcgtcgtaggtctggacttccaggtcattggcccggccgatgtcggcattcatatggaagaaaagagaatcttcatagatggaccggtccaggacgttgttgtcgtcgctgagggcttttttaatgctgtggaagcgcgtgttcaagaagaagagctgcagcaggtaggtgtacttgagggggtccttgtagaaaagcgggaggacagggttgtcatcaacgctttcgtagaaaggcttggtccccagatatttggaaagaattgcggttaggctggatttaccggctccaacgggcccacttaatacaataacggtcatcacgttccttctaacaactaactataaattaccgatttcgcgcagcttgttgtcgatgatgtccagaaccaggtcctggtcatcgatgttgtcgacaaagtcgtacttgtcaccatcgatcatcatctttggcgaaacgtcatattgttcataccagggctcgtagtagcgcaggaggttctggtagtattccttcaggcccgggtcggagtcgagctgttcgaactcccggccccgcttgccgatccgcttgagcatggtgtcaagggagacgtggatgtagatcaggaggtccggcttcttgcgcgggttgcctggcacgtcttccatcatgttgtccatcaaatcgtggtagatttggtattcagtcgggtcggccacacccctgtcgacgttcatgttgaagaagagcaggtcttcatagatggaccggtctaaaacgtcgttgtggttgccggcagcggcgttgatttcagccagccgcttgttcaagaagtaggtgttcaaaaggaaggtgtaccgcttcatatctttgtagtacaaaggcagaaccggattgttgttgacctcttcgtaatatgctgttgagccaaggtgcttggcgaggatactggttaaactggattttccggctccaattgggccacttaagacaataacggtgatcacactctttctattcatactatactagatctacgttgctctaatagtttattgcaagatatagtgccttagcaagctttttgtccaaaaagattttttatatgatagaggaataatttgcctggaggggggatggtgtttcacgtggaacaataacgtgaaagaaccctaccagattaggaatccagtcatctatctggcggttccagaaaacatgacctatgttgagatcggggggatttttgccagcgggatgaatggctatttgaaatttgctgaccaaaaaacgcgggagagatacacgaacaaggccctgttgccccgcttcaatctgagcgataacaagcccaattttgtcagtgtttcttcctatatagacgggctgcagaagagcctgtggcagacggttatcatgtttggcgcggctttggcaattctgctggtccttttgcttctgctcgtgttgatcttggttatgatttataaacagctcaaccgggaggaaatagccgtgaagaagtttctcggcttcagcccgcgccagctgtatgccttgccacttggagtgatctttttgacgggagctgggcagctttttgccgcgggattattgagaagcaaggttggcctatttgttcttccgctgatctgcctgctgcagctgagcctcttctatctgtatgtgatcaaggattctttcaatgacgtcgttgaattgtttaagggagagtagtatgacaaaagttattgaggtcagttatttaggtaaaaagtacgggcagcggactatttttaaggatgtaagttttgcggttgaacgcggcgaattcgtagcgatcgtgggcccgtcgggttcaggcaagtcgaccctgctcaacatgctgggtttgcttgaagcagttgaccagggggagatcaagcttttgggcaagctgatgcctaaggtcaacagccggcaggcaaccaaattgcggcgtcagctatctttttcaatcttttgctttgattcaaaccaagacagtagaggaaaacttgctcttggccatggcttttgtcaagaaaagcaagagggaaaagcagaaagagattgaccaggtcctggcaagcctggatttaagcaaagtcaagcagagcaaggtgcagaccttgtcaggtggtgagcagcagcgctgtgccttggcccgggcaattttgaagcctggggagatcgttctagcggatgaaccgacgggagcactggaagccaagcgggctcaagctgcttttaaccaattgctggatttgagaagccagcagggtaagacaatcgtgctggttacccacaatctcgcggaagctgcccaggctgaccgggtgattgatctggaaaagtttgtctgatggactacaattaaagggaaagtttagatgaaaaaggcaggcgatatcaatatgcgtagacagtttcttgatgagcaaagctaccattggatcggtcgctttttgcctttctggctgctgactctgcttgttactccattttttcatcaagcccggctatattatgctctagaagatattggcgatcttttactgctgttttggctgattgcgtggtctacctttcttcttggtaatgacagtatacccgttttctttgaaagagcgaagccaatttgcaagaattccatgattcgtgagccctaagtctaaggaaacctgcctaagtgcttcaccacctagcagaaccctatcaatagccgcaagcttaaaatcacaagtatatttctgttgagggcgatccaggataccttctccatgcctttgaagtaaggccaccatatatgcaatttctcctggcctcatcccatatttccggctaaggtaggcacctcttctgtcatcgtctatccattcgtggtagatagcaagtttgatttctttagtgtatttagtcatgaaaataacccccgaaattagtgtcctaattttaggggtcatatcaatccccgggttaaatcagggtgttttaaatacttaaaaagtgttgcagatcccactgttttaagccaaatttttttatcgttctgtactcggacaaaaaagatcagcttcctttaaaatggtgtttaccacaaacccatcttttaggagctgatcttttgtctagtataatctattccgaacgaattaaaatcgaaaccttttgtgaactagggctgtccaatattcaaatgggcgttcggattaattttacaatctaccataagcctaccgattttttaatattattttattcatcaatttccggcgccgacccaagctctgcctgaatcatccagattttcttctcaattgcggttttgagaccaatgaaaatatcttgggtactgaagtctttttcaacatcggatacttcaatgccgtgttggtaaaggtcttccaagtaacgatagccatcaactaagtgtgcgaggcgttctggggttgttttgtcccattcaccaggccagtcttgaatcttagtgttttcggccatttcttttaaggtcgagtaaggattgccatcaagcgcaatcagccgttcagaaatgacatcgagttggctatcaatttcttccatgaacttatccatcaaggggtgcaacttcaaaaagttgggtccacgcatgtaccaatgcgtctgatggataatcattgacatctggctcaaatcggcaacgagttgatttaatactgctttagttttcgtatatttcattagattgatctccttttgatatggttattataacacaaaaccgaagaaaatgtcagaggcgcacttatacgtcatcaaagattacgctgtgctaaacccattaaaacctgtatcagatttcgctttgctcaaacaaaactgacttgcgtcagttggaatcttcaaagccaataaagtccgaaagagttggcgactggactttattggctttaaatgcccctaatttgctctctaagccattttagctgttaaccgtataattttactgtccgtcaacggtaaatcgacgtagaacggctttaaggagttgatggactcactaggccaagacacttttgcgcatgtaaagaaaagcacacctgctttttttctactctaagtcaagtgttatcaacgattt

SEQ ID NO: 2187 - DNA, 1486 bp, Unknown
  gut microbiota DNA sequence
cttaccttgtcaacaataaatggttgcagggcttctgccagtgaatgcaggttacgagtttggatgatgaccttgccatcccccgtaaagtggttgaccaggccctcacctgaagtaaaaccaaacatccctgacgctactttaatgtcgtagtcaaggtttgcatcccaggcaatgacgtgttcgttgtcgattgagatcggcttatcactggtcacggtcagttcaaccaagtcaccaaaggcgttaactagcatatcgccttcaccttcagtctgcattacgtagaaaccaccggttcccccaaaggctgccttgctaaaactctgactcttcatcttgtagctgacgctgtcgtcacttgccaggaaggccccagtgtttaagcaatactgctgtttgccaacggaaagctttacaatcttgccaggaattgcgggtgcaaccccaatttgtccgccgtccgcatcaccggttgcttgagtgataaacatgctttcaccactggtcaagctccggccaatcgcgccgagcaaaccgcccaggcccttcttgctggagttcatcttcccggcgatggtgacgtctttcatgtacaccatggcgccgttttcgactttaatgctttcacccttatcaagggttacagtagctaatgggcaggtattcccgccgcttaattcgtacttcatgatgtccctctgcttttctattgccttagtaaaatctgatatttatgccaaaaattcttttcttgtctatattatattaagaaagggctttttccgcaaaaaatcattgttaaaaaatttagaaaaacagagaatttatctttacttttctaactcgttgaaatctggttcaaagtagtccagcaaggtaaactgcccgtcttcatacttgagtctgaggatagtgcagttcttcatcccgtgcggcaaaggctgcttgtaatagcgcaagaagcaagccatggcgccgccgtgcgatactgctaaaacagaatggtggtcttcttgctccatcacttggctcaaggttttggccattctttccccaacttcttcttggtcttctccgccgtatttagcgaaaaaatcattgtaaggcagcggcgggttcaagaattcatccatcccttcaaaacggccaaaattccattccttgatccccttgagccgggtataaggcagcttgccgccagtaactatctccagggtgtcacaagcccgttcacttgtgcttgcgtagcagtgatccagcttaatttggttatctgtaaaatagcggccagcgatcttggcctgattgattcccaattcagttaaaggtgagtcgcaccagccctggatcttgtgttcaaggttgaataaggtttgcccgtgccgcataagatacagtatcttttccatctatatttgctccttttcacattcctatagcgctttcattagaaactatagcatttttttaaagttaatggaaa

SEQ ID NO: 2188 - DNA, 25525 bp, Unknown
  gut microbiota DNA sequence
tttgcttttggactggctggctggcaaaaaggcccacgaaggctgccaaggcaactacgactgctaaaatcttctttttcatcttttgtttctcccgttttttattttagttttttcttatgtcttttatcgctattttgcctgccttacttaattgggcaagcgccgccttcacagtcggtctggtcgaccagttccaggtccttgacgtcgctgttcagctggctgaagacttcttccacgctgccggtaatttcctggctgcgcttttcgtaagtctccttatcgatcggttcctttggcgcttgctgcagggaacctccaaagtatggcagaagcgaggttgacttggtgataaagcggtactggcggagcaagggttcaatctggtcactttcggaatcctggaaagtaatcgtgcaggaaactgcgttgtccgaccagtaagtctgcaagaaggcctgggtggcaaactgttccgcgattgaaaccgtgccagctgaggcaaagttagggttgtccgcccctaccgccttgatcgggaattccacgcaggtcgtgttttccgtgtagatgtcggcttccgtccggtagccgcaggccttcaaggctggcaaaagcgggtcagaatcctggaaacggatccgctggatcaagtaagccccgtagtggaagtgcatgccttcactggcaccggccagcttggccaccgtgcctgatggcttaaccgtggtgtgcttgattgattcattgcagcccaaagtcttactgtaggcctggtcagccttgaccacggccttgtaaagctggtcaaccatcttaatggcccgcttgtcgtagactggcaccttgatagcttcatgggtttccgggtcaaagtcatccttgaagccggtaaccacccggttgcccagtctggtcaaaagccagtcctggatcccggacatggagatcccgatccggcggttcttttgaattattttccgggaaatttcccagtcataaggactgaaggttacccgcttggcgtagcgggccgctaaggcaaaaacttcctgcaaatcccagccctgttcttccgcgatcagcgggaagacttcaaagaggttgcaaggttccccgttggccagggagatctccccacaagggttggtcccttccacgtccccgtcaattccagcctggtagccatcaacaatccggccatagttcttggataggtccaggttcacgatccctggctccccgttttcccggatcccggcagcgatcggctggtagccgctgaaggctgaatcaaccgccacgctgttgttggatgcccagcggtggtgcatcagcttctcttggtcctgcttcatggaaatgaagccctggtcatcatttgagcccagggccagttccgctgaccggcggacattgccggccacgactgccttgccgatcaagttgcagatgtcggcggcatcgacagccgtaagacggccaccagccttattattcaagacttcgttaacgtccagcagcatggagatcaagggcattgggccggaagccgtgccgccgaagccatggatttctgccccgtaaggacggatgtcggacaagtccaggatcagcttttgcttacggtccgggttggtctgggcaaagtgtaggtcaatcaagagggcattggccaaaacccatccctcccgggtgtccggcaggcggtagtagatgctgtcagcatcttgaactaattcattcttgccgacggccccgaccttgacggaagcgtcgtaggattcactggtctcatcgaccaccagctgcaggtcgatggcaaagtcgacccggggaatctggctgatgttggatctggcaactgagaagccaaccccgccccccttcatcagttcgtcaaagaggaaggagaaaggcatggaaacggccttttcctgcttgccaaggtagctgggcacgatcttgctgtccccgtacttttgcggacggatggccacaaaccagcaattgttcaaggaatccccggtccgtctctggtagtcagtcccggaaatccacaagttccggccagatggcgtcgcgcccaggccgtagatcagcttgtagagccgctctgcttcttcagtcaagctctgcttcagttccagacttggggagtcttgaaggcggggatccaggttgatgttgccttcaaccacccgcttgacggtttcatcccagttttcactccgtcccttttccggaagccagcgggcgtaggtccgcttgtaggtgacccagcccagcttgccccagtgaggttttacactcgctttcacccggtcgataaattcctccgagagagatatttcttcactcatcttctcaggtcctttctgcttgtctcattattttttaaacgctccatatattagcactcttcctgtgaaacacaagatgtagtattgtgtaactaggcgaacacgagaaactgtatgttggctcaattcaagccccgtaagccttcacccgctgtcaaatttttttgaaaaaatttttagcaatttttgttcggcttttccggatatatgcaaaaagactatataaccaccaattcgtttttcggcatattatatagtctttcttataattttttacttctttttgcttttgtctttaaaattctgcttggtccggatccaggactggctggccgatcccttgcaggccatccaacttggccatgtcatctgcagtaagcgcaaagtcaaagacctcagcgttggccttgatgtagtccgggtgaactgacttcggtagtggtaaaaagttatgctgcagggaccagcggatcaaaacctgggcgctggacttgccgtacttggccccaactgccttgatggtctcattgcccaaaagaccgcccgtgcccaaaggactgtaagcctcgctcaaaaggccgtattccttgttagcggccgttacttccgcctgcaagtcatttgggttgaggcagatctggttgaccacaggcttgatttctgccgtttttaagagggcttccaggtggtggcggcggaagttggagaccccgattgcccggatcttgccagcttgaacggcttcttccatggcccgccaggcttccgcgttgccttctgcccagtggtcccggatggcaactggatttggccagtgaatcaagtacaggtccaggtagtccgtgtccagcttgagcaggctgtcgtcaatagccgccttggccccttcatagctatgggacccgttccaaagcttgctggtcacgaacaagtcgctccgcttgacaccgctgcgcttgatggcccggcccacgctggcttcattgccataagctgcggccgtgtcgatgtgccggtagccggcattcaaggctgtctcaactgcttcttgggctacgtcgccgtctggcgtctgccaggtcccgaaaccgattaccgggatcttgaccccattggctaattcgtaagtatcttccaaaccgtgcaaagtcattttttgcctcctgtcattttccttactttttgtaattaggctcattataacaaaaatcctcccgcccgggaggattttcttacgctaaaattcttttgacttgtcagaatcgttttaattattccaagctggccaggctgtccttcagcttcttagcggaagcttccagcttggcttgttcgtcagctggcaagtccagaactggcacttcttctaccccatgcttgccaacgattgacgggtagccgatgtaggtccccagagattcaacgtagcagctggtcgggccgtagaacttggcgtcagagaagacggctctggccaaacggaccgcgcaggtagcgacagcgtagcaggtgtagcccttgcccttgccgaccatgaaggcattgtccttgctcaagcggtccatttcttctttctctgcttcattgaagaggtccttggctggccggttgttgacccaaacagttgaccaggccgtgaactggctggacccgtgctcgcccaggttgaagccggacacgtttctcgggtcctggcccagcttttccccgacaacccgctgcattctggaagtgtccaggaaggtcccggtcccgaagacctggctctttggcaggcctgtcaccttttgcaagatggaggttaccacgtcacaagggttggagatgttgatgatgacgcccttgaagccgctgtccttgatcttctggccaacttcaaccgcattcttggtgttgatcgggaattccgcgaaccggtcacctgtcgtgattgaggccgccacgtcaccaaaagcggtgatgatcaagtcagcgtccgccagctctttccagtcgccccacttgacattgacgtagaagtcgtttctgcccagggtgtcgcgcaagtcgccccattcagcccggcacttggtctcattcttgtccaacaagaccaattcgtccgctaccccgtgggtaaaaagaataaaggccgccgtggccccaacgtggcccatgccgatcactgctacttttctcattaaagattcctccttattttttaatatgtcatcaatcgttttctcataataaacaataaaacaattttgtccaaagtgcaagccttacttaattaaaaaagtttcaagccggttaaaaattcagaaaacaaggcaaaagtaacaagaaagaaaaaaggactgccgcttaaagcgaaagtccttctgcttaatctttaaaactgaattccagcggatcctggtcggcactcaaactagccgggctcggttcgttccgcttcaaattacctaaaggatagaacccccggctgtagttcttgtcactggcaaaaatcaagaccttgtcgctgtccgggtcatagccgatttcaccaaccgtggcatgagtcaattcctgccccttaggggtcggcagcttaactgtgtgcttgctgatcagcacgctatccttcttgctggccgtaaaatccaggtcaacctccttgctctcccactgcttgagcaggctgacagaagtcggcgtcttgggcaggatgccagtaatcttgctcttcttgccggacaattccaccttcatgttcttgaagtggtggttgtcggttgacttgactgccttccggtactctgaagtatcgaaggcgtctgaactgctttctgctttctggccaccgctcgagacggccataatcaccgtgccggcaaaaatgaccaggatcaagccgatgacccctttttctaatctcttcatatacacatacgcctcatacactaaaaattaactaaaacttctttatttcttcaacctctaacttctaattgtaaccgaatcacagcttaatttccaataaaattggacaatgatccgctctttctccagtctcgatcatttccgacttctccacctggtcagccaggcggttggaaaccagccagtagtcgattctccagccggaattattagccttggccgtccgcacccgctgggcccaccaggagtagacgccctccacctggccgtggatctggcggaaggtatccgtgaagcccgccgccaaaagctggccaaagcccgctctttcttcatccgtaaagccggcggaatggtggttgttttccgggtgcttcaagtcgatttcctggtaggcggcgttgaagtccccgctggccaggactggcttcttcttgtccaattcttccaggtaggcccggtagcacttgtcccattcctgccggtcacccaagcggaccagaccgttgccggcatttggcgtgtagacctgggtcacgtaaaagtccgggaattccagagtcaaaatccgcccttcaaagtccatcggctccgggacaccgatttccggccgggtcactaccggatccaggcccttcttatacaaaaacatcgtgcccgcgtaacccttccgggctggctccatgctggaccgccaaacgaaatcgtattccggaaaaaggtcagccagagccgcctgatgctttttgcttggcccgctggccggcagcttagtttcctgcagggccaggacatctgggtccaggtcatgcaagtttttcaagaccccccgggtcatttccgcccgcggggaagtccccgtcaaggccgcgttcaatgagtcaatgttccaagaaatcagtcgcattttatcttcactttctgtttttctttactctctgtcgtttttactctttgcttttttctagatcgccaaaatttccaggggatagtcgaccgtgtagtcagccttttccttcttcaggctagccgggtcaaaggcgccccaagtgcaggcacaggtcgcgcagatgtggcgcgattcgcagatcgtgctgtcgaaatcaaaaaagcaattttccattttccccaaatccttcttaatagtctctttgctttaagtatagcggaaactaacgcagagcggtcggggcgaagtcttttttcaagatccgctggaactgggcatagttgtccacctcaaagagggggtggactggcagggtcttctgccggtggcggtggttgaaccagatgctggcaaagccgtagttttccgctcccatgatgtcagaggacaggccatcgccgaagaagacggtttggttggggccgtagccgtttctggcgaaaaagtagtcaaaaatttccgcgtttggcttctgcaccccggcttcctggctggtcacaaccaggtcaaagtagtgtcttatcccggctaattccagccggtgctcctggccaaattgctccccgttgctcaaaaccgccaggctgtagcccagtcttttggcatagcggagggtgtccttgaccccgggcaggagcttgtggccggtgtggaagtagctgtggaattcgtcagccgtctccatcccgtcgacttcgaccccgcagtattttttgataatatccgggaacatgatctcgtagagctggttcaaggtcagctcacccttttccagccgccgccagagcccctggttgtaggcatggaattctttttcaaattcgtcactgatctcccagccatgggatttgaagagctgaaccagggagtcgtggaccgttgcttcagtgtcgagcaaggtgtcgtcaacgtccaggataatttgctgatagcgcatgtggcctccttattttctgttgcattgcttgtttctattaggcgtattaagtttccattatagacaaaaaactaaagcagtgcaaaaaattactttcagtttatcttacccccattttctccttttccacatcttgggccttactccggcaaggaactacgatatattgtggataactcctgtggaagttgtgcatatctagtagcatccccggcgctcagccactagacctgcttttccccatatttttgtatctttttacctaacctttatctttgttacttttccctccagcgattgctgtacatgtacttgataaaatatcttattgacaaaaggccccagtaaaactatattaatcaagtaagcaatagttttactggattggaggagaaaaatgtccagaaaaaacacttttcagctctgtcttttggccttatccacggccttgatcattgtcagcagccagttggcggtccccttgccgggcggggtcccttttaccctgcagaccctggtaatccccctaatcgcggctgcctttggctggcagctgggaaccggcgccgtcgccctctacctactcttaggggccgccggtctccccgtcttcagcggcgccagtggcggcatcgccgtccttttcgggcctaacggaggctttctctgggctttcttgcccctggccctgatcacgggcctggctaaaggaaaaagattttatttgaccctggcggccgggattgccctcttcttgcaactgctcctgggcgctgcttggctagcctggatcagccacttgccattcgcggccgcggctaacgctgccatctggccttttttgcccacaaccttagccaagctggccctggtcgttgccttggccccacgcttgcgggggatttttgccgtttacgccggcaaggtcagccgcggctaccaaaaataagctggaagaaagcaggtacagataaaagaaaaggcggagctcttcttagagtttcgccttttactttgttcaattttgccttgttttggctttactgctggtaaatcgtggccagttgctgggccaggtcgggctgcttgagctcgatctggggcaccagttccatggcgtcgatcttcccgctgtggatccgggagatgttttccggcgtcaagccttccgtctcgatgatttccaaagtggtcggcagcttgtggtacttgtacatctttccccgcaaagcctcctgccgggttccgtccagcatccgtctgagcaagtcccgcagttcatcttcctgctcgtccgttacagtgaagccgatcaggcgcagggaccggggcacggcgttgatggtctcttccaccgtcttgccgtagctgaccgagtgcagctgggtcagcgcctcaaagaaggcttcttccagccggtcgtcgctgaggcctggattgctgtctttcagatactggcggtactcttccgtcgccgtggtccgttcataataccattcgttttcccggcgcaaaaattcatccttctccggcacgtaatagaggcggttgtgctggagctttttgatccgcttgaaatcttgcggcaggtccatcaagacccagtcgccgtaaaggtagaattcctcatcctcatcttcgccccgctcttccaccagcagttccctttcaccggccacattgtagtcctggtcgctctggtccagcatggtgaattcccagaagtcatcctcgtcaatgttgagcaaggggttctggtggctgaaaatatggtacgcgtgtctcagcggaataatgccgtacatgttgatcatggcgtaaagatagcgccggatcaacaacttgttttctttactaatcatctgtctcacctaccattttcgatagatctttccctacttctccctacaagctattatagaccagcagggcaaaaatcagtacatcggccggccaaattcttccaggctgacctggccgttatcatcgacattcaagaccgtcatctcgttgtgcttaggcaagtcggttctgaggtgcttgccaccgtagatgcaggccaggcaatggatgacgcaggcatggccaaccaaaaggatccgctctgactcatcatggttgaccaggtagtcgatcccccgcttcaggcggctttcaaactcgctcccgctttcagcatccccctccgggtcagccgcgtggaataagtccccgatttcctgccaagtgtagccgtccttgaccgcgtcgaccaggcgggggtacttggtggacttgaaggccgccgctactccttccgtatcatgaaaggcctcgtagtagccaaaaaagagctcccgcaagtcagcggtctgggtcatctcggttgactcccagttgtcattttccgaaacgatgatcttccgggtgtcagcggcccgcttcaagtcgctggaggccaccaagtcaaaatgctggtccttcaaggccttccccatccggtgggcaccctcgatcccttcttcagtcaaaggggcgtcagaccagccctgcaggcgctggtacttattcaaataggtccggccatggcgaaccacatagatcttcttcattgtttacccttccttgggcagctgcttcatcatttccgctgccagcaattgataaccgcgcgggccaaaatgaaggccgtcgtcaagttctccccggcacagggctttcaggtttccctccttcagcatggccgtgaaaaagtcggcataggcaagctggtattcagccgcgacttcctccattactttagcatactttgccagttttgcgttggtccgcccccgctgcttagcttcatccaccgctggcccggagaccaggacggttttggtccccggataaaagcagaccagggcggagacaatagcctggaggttcttccggtactggtctagtggtacttgcttatggctggccgcgtcattgactccgaccattaagaaaagctggtcagcccggggccgctttaaggccaggtctcctaacagggctaaaagggcgccggaattgatgccggacaccgccgtattgtcgatttccaggtcaggctttttctctttcagggtccagttgattctaggctgatccagcccttccttgcgggcaaagatgctgtcaccgagtaataaaattctcatttctacctttctatgccaggaaagcatcaagtctgccatcgacaaggcgagggaggccctccagtacaccggtgatgacttaactcaactgtatcacgtttttgacgaaagcgtccgggaaaagtacgtcaatcgcgactatgtcctgactcacttccaggaggccctggataagctctggatcaagccttactaccagatggagacgagaagacgagaagtaaaaaatcagcacccggaccggtgctgattttttacttgctaaatttctactccaatcatcagcccgcccgcttcagcgtagaagctgcacagggcgtggcaggtgcctaagtcaaccttggcctctggacgctttttcctgatcaagtcgtggagctcagccgcgctgtcgaagttgtcagcgtggtcgatcttgacccggccgcccctgtagcccttctcttccaaagttctcagcagggctgccagggtcttcttctcccctctggccttgcccaggggcttgatttcgccttcctctgcccagccatagacccagattttcaaaagtccggcgatcttggccaccgccgggctgacccggccattgttggccagattggtcatcgactttaaggcaaaaaagaggcggacatggttttccaggtagtcgctcactgcttccaccaggtccgggaactgcatccccttttccttcagttccgcgatcttctccgccgccaaaaactgggccggacccgcgcttttactgtcaaaaacgtgaatcaaggcatccgggtattcttcctggtaaatctttgccgcctgcacggctgaattgtagctgccggacaagaccgatgagatggtcacgacatagatctcgctgcccccggcgtaagcgtccagccaggctgaaatactggggcaggatgaagacgccgcgatcccgtccttggctctttgattgaattccgcctggtcaaagctggcgtcgtccagccaggtcttgtccccttgaatcaggctcaaggccgctacttccaactggcagctccccaagttgcccgctgtcatgttagctccggaatcagttactatcttaattggcatatttcataatcctcgtcatcggtttcttaaaaacttttgcttaagtctatagcaggaaagtcctcgtgtcaagttttttgaaaaccgctaagctgctttgctataatgtggatgatcgaattttgttttgtctttattttttgtatcagctgacaggaggtttttatggaaaaaattgcccgttccctggccggcctgcacctgccccgctaccaggaactgccccagatgggcctgtacctggagcagaccgcgacttatatcaatgaggccctggcccccttggaaaacgtccacctgaccagttccatggtcagcaactatgtcaagcatgacctgatcgcctcacctaaaaagaagctctacagccgccagcagatcgctgagctggcctttatcgccgtgtccaaaaacgtcctctccctggctgacctgtgcgaggccctgaagctgcaacggtccagctacgacactgagacagcctacaactacatggttgatgaactggaaaacgttctggcctacgtcttcggctttaaaggcgagctgaccgacgtcggccacgagcatggcgaatacaaaaccatgctccgcaacgtcatcatgaccgtcagctacaaggtctacctggacaagtactttacccagtttaccggcgaagaagaagagtaaaaaagtagaaaaaagcactaaaaaaggacatccgccgggatgtcctttttatattttatgtttaggccattgtcatggtctggtagaccagcttcccgtagaggggattgtcaaccatgctgaagttggccttgacggcgatttcctgccccttcaagcgacgcttcagctctttatcgaagcccaagcggtcgttgatctgggtcaaagcatcaacctcgcctcctttttcaaaaagcgcgtatgggccagacgcagaaccaagaccactgtcaggcaaaaaatcagcaaagccagcagactgacataggcagtcattctccgggctttagcctcataagtccagccggttttcggtgaaatatagatcctccagcccccgctggaagtagttggcttaaagctgcaggccactggattgacaacgcccgcctttgaaaccagatagcttccctggacataatcgatcccctatagttcctggcttctcttggcaaaattggtcacccgcccctggtcattgaccgttgtctgggccagctcccggctgacgctgtccgcctgcagggcccggtcttcctcggcccgtttgtaatacagcttgcttctatccgccacacagacaatgatcgtggctaataaaataaaaaccgcaatcaagatgccgcggtcctgccagcgtaatttgtacttcctgctcattaattgctccttcatttcagtgctaataatcattacacaaaagttataataatgacactgcgaagtctttactgcccgaagaataattgctatgagattatagcttcccaaaaagagcaggcaaaaataaaaagaccggccttagtcgatctttttaacgtctttaatatttgattcactggaaatgtagtggggccggcgcttgctttccatgtagatcttggccaggtattgccccatcacgcccaggctgagcatgaccaggcccccgatgaagattaccacgcagatcaaggaagcccagccggctaccgggtcccctttgatcaacttgcgcagaacgatcacgatcagcatgataaaggacaccccggtcatgagaaaacccatccaggaagacaggttcaaaggcaccaaggagaagttgatgatcccgtcaatggcgtacttgagcagcttccaaaagttccacttgctttccccggctactctttccacgttctcataagggagccagtaggtcttgaagccaacccagccaaaaatccccttggagaaccggttgtattcgctcatctccacgatcgcgtcgaccatgtcccgcttcatcaagcggaagtcccgggccccgtcgaccacatcagcatcagagatcttgttgatgatctggtagaacttgcgggcaaaccagcttctgaccggcggctcacccttccggtcctcccgccgggtggccacgctgtcatattcaccggagtccaggatcttgatcatttccggcagaagggccggcgggtcctgcaagtcggcgtccatcacggccacatagtccccgctggcattgacgaagcccgcgtacatggcggcttccttgccgaagtttcttgaaaatgaaatgtagaagacatggggatccttggcggccaagtcgcgcaggatttccaaagtcttgtccttggacccgtcgttgacaaaaatcagctcgtagtcgtcgggcagtttttccagcacctcatgcgctaccggataaaaaagtggcaaggccgcttcttcattgtagcaaggcacgataattgaaatctttttcattgctgctatgccttcttttcttctctcttcttgaaaaaaccgccgcgccaaagcaggccccaaacgaccgcggcaaattgccccagcaaagagaccgcgatggccaacttgatccagaacggcgtctggaattccaagtaggcggtgttggtgcccttggtcttttcgggaaccgttggggcgccaacccggttgcgcttgtacttggtcaagacccgcccgttgacggtcagcttggactgcttgtaggtaatgactggcaattgctgcttgtgcttgcccttcttggcattccaggtcaatttcaagccgtgcttgaccgccttgaccttgacagtttggttgtggttcaagatagacttgtggtaagcggcggtaatcttggagttctccatcgtataatactgcttccacttgtaagtgtacaagttgcttggcacgtcaggctctggatcccacttgtagaccggcaggtagtccggaatggccttcttggtcatgtccaggaaggcttgcaggtcatgggcgtgggtggccgcgttagtgtccaccagcgcctgcttgcgccggtcatccagcttgactgggtgatagacaccgtagtcttccatcgccttctttttcttcttgcctttcttcttgcgagaactggtcttttgggtctcttcgccgaatttggtgttccggctgcggccaacgttgttttgatagccagcccaggcattggaggtcaaggtgatgaccaggcagtcggctgccgcgaaagtcagcagaccgagcgaggcatagaccgcgatttggacccacttttgcttgtgatgcaggatgtgctcaaacgaaagacccagcccgacgatcagcaaggggtaagcgatgcagacgaaacgggatgggaactgaatgaagcgggccaaggccggcaagtggttagtgatccggtcccattcaaccaagcgggaggccagaaacagccaaaagccgccataaagcgagacgacgacattggccttgttttccttgcgcgtccagatcgcgtagataacctgagcgataaaggcgtaggccagccagtaagtcaagctggcccgcaggttgtgggtcataattctgaacgggtggaaggccaccgtggtgtgtttcaagtggaccgcgttttccagcatcctcattgtcgccgttggcgccaagttattggtcttggacatccagtacagaggcaagagggtgttgatcgtcaagaagatggtcaagagcaccgccttcaaggtgttcagcaagatcccctgcttgtctttgcgcttaatgatggcatagagccaggctggcaccagaaaggccatgtacatcagcgccgtgagcaggtggacttccaaagcgaccgtcatcaagatggtcagcttgatccagtggattggcttctctttatcatagaacatgtcgtaggcgaccaaaatcccgtaaggcatcaaggcagcgccgatgccggtgaagttggagccagactgccagcgcggcagccagccgatagtcatgtagatgatcgtcaccaaaacggcaatgctgccgcgtaccttaaagcggtgcacggccctgtacatccccacacccccgaccgcgaagaccaggaagctggtgataatttgatatcggtaccaggtcccgaccgccagcagcagcagcccgttcaagtaggcaaaggctgggccgtaaagcgcgttgattacccggcctgactggttgaacccgtacagggtcatgaaccagctaaggttgccgtttctaatttgctcctcggtttcatagaagcggttgaagtggaaaatcgtatcggagccgataatgatgttccctgttcgcatctgtcggtaggccaaataggcggcaaaaagaacgaccgccaaatacggccaacaggccgcatagttgatctttttgagctttttcatatttatagtcttttccctttcttcgactgatccgatggcagggcgtaccaaataagcttggtattcaagcttgcgtttattattgtcttcttgcatctctctaatacaatcaccactaactctaaggataaacattttcattttcacgtgcaagccttttcaacatcttttaatgtcatttttcaaaagctttacgcatatatattataaaaaagccataacggctattttgtacgatgaaaaaatatctctggataccaaaaaagcagctgttactgactagctgcttcttaggtagtgtatatgtatgttgtgtatatcagggaaagaaaaatataagaaatatgagttatagacaagttctttcagcttgtctatgctttttatactacacagtaaatttgaacaaaatatgatactaacgttgctcttcggtgaattttccagctgccattacagggaaatttcctcaccgttgacgctgatctggtaagtcaaggcagccaggtccacccggagaaccgcttcccggtctccagcctggttgacccgctttaagacaatctcatgctcgcttggagcagcaacttccagccggccatccaggtcaaaggccgcttcagtatttctaaattccagcaatttcaaaagcttggcaacgactggccgcttaacttcctggtcaatttcttccaggctatagtagtggcggttgatgttccggccttccttggtccgttccagcaggtccaggtcgttttccccggccagcaggccaacatagtagatttgcggaatccccggggcaaaaacttgcagcagccgagccaggaagtacttttggtcatcattgcccagggctgagtaataggtcgtattgatttggtaaatgtccaaattgttgtactcagctgaagagtatttccgcttgatgttagccccgatcttgtacagttcctgggtcgtgtagtcaatttcctcatcagtcaaaatgtccttggcgtcaactacccccaagccgtcatgggtgtccagggtagtaaactgcttcatcgggcactgcttcagccaggcggccagcctttggctcttgccagtatacagggaatagagcaggaccatcggcagggcaaagtcatagataaagtagccatgctcgctgaccttgcgcggcaagctatagtgttcatggatttccggtaaaatttgcgcgtctgttccagccaggtcctggcggacttcatccagcaggtcccagatttcaggttcaacgaagaagtcgctcgtgtccagtttcttaaccgcgtaggcaaaggcatccagccggatcaagctggcctggtgcttgaccagctgctggagggtttccttgacaaaacgcttggtaacttcggtccgcacgtccaggtcgatctggtcggggccaaaagtattccacattttctcgcggctgccgtccgcgaattccagctcttcccagggtgccttgtccttgcgtttgtagatcaagtcaacatctgcctgagtcggccggccggctggccagaacttatcccagcttaagaaaaggtcccgccaaggactcttttccttgttcttttgcaagtccaagtaatagtcagagtgagctgagatgtggttgatcatgaaatcaaacatcaaatagtattgctcacccagcttttctacatcagaccaagtgccgaattccggagcgaccttttcataagtcatcggtgagaagccccggtctccatgagacgggaagaacggcagcaagtggatcccgccgatcgccttggagaagtagcggtccatcacctgggacaggtccttcaagttatggccaagactgtccggataagtaatcaacatagctttgttttgcaatttcatttttaaacctcttttgtttttgttaaagcgctttattttcttgctgtctccagtttacaaagtcctggccggacttggaatttccccctgtttttttgcagaaaaagtctagcgaaagccttataatatctggtatcaaagcaattatttcttgcagttttattagaaaagaggacgcatgaaagtcacctttaccgaaatcgccaagctggcgggagtttccgtgcccaccgtttcccgctacttcaaccagcaaaccgtcagtccccaaaaccagcttaaaattgcccaggcggccaaggccctgcactacaagccaaataaagctggctccaagaccgtcctggtcctcctgcccacggttaccaacccgctctacgctgaattttacgaagccgtccaggggaatctggcgcagctgggctatgactgccagctgcatgttggtcaagatgacaacttcctggccagtttaaaaagcaataaatttagcggtctgatcaccagcctgccggaaacgcccctgtccttgaccaggcagctgcctactgtctcctttgaccggcctatttcccgggaaatacccctggtcagctgtgacaattatggcggcggacacttgattgcccaaaccgtccttaagaggggagccaaggaaattctaatcttctgcggcagccagcaagacctctcccccattaatgagcgcctgcggggcatgatggattgcttccaaaagcggcaaaccaagttttccacggcctacctggactttaccgcgggcaacctctttaagcaggtccagctggccaagctgctgaccggacaaaagtacgacgccatctgctgcagcgatgacatcaccgccttgctggttaagcagcgggtccgccagctgagctaccagcctttggtaacaggttttgacggctccaattttgtccgcaatttttttccggacctgctgaccgttaagcagccgattaaggacctggcggccctgacctgccagttgctcgaccagcgcctgcgccggggccatttccccagcggccataaacaggaattaccggtcactttgctagatttgtgaacgattcacttacttttccctagaaagtttgttaaatctggcgataaaagcgcattcatgctcaaaaaatcacgattccctatatctttttgccggctataggtatataattattagctgttatgtaccttaaaaattatctactgcaaggagaataggattttgatgcacaacttgttaaatgagttcctgtctaccgggctcatgattcttttcggtgttggcgtgcactgcgatgacgttttgaacaagaccaaataccacggctcaggccacattttcgccattacgacctggtcattcgggattaccgcctgcctcttcatcttcggcggcgtctgcatgaacccagccatggctctctgccaggctatcctggggatcatcccatggtccagcttcatcccttacactctggctgaattcgccggtgcctttgccggtgctcttctggcctacttcatgtatgctgaccacttcaaggcttccgaagacaccatcgacggcgtggctacccggaacatcttctccaccaaccctaacctgcgtaacctgccacggaactggatggtcgaaatgatcgccactaccatcttcttgactggtatcttggctatcgttgccaactacgaaaagttcggcttcactccactccttgtgggtctcttggtatgggcaatcggtatgggccttggcggtactactggcttcgccatgaaccaagcccgggaccttggtcctcgtttagcctaccaaatcttgccaatcaagaacaaggctaacaacgactggcaatacggtctgcttgttcctggtactgccccatttgttggtgcagttttggccgcagccattgttaagtactacttaaagctgcatctttaatagaaaaagcgctgaatttcttccagcgcttttctttttgccttcgatggcgtgccccctgacgacgtagccagagcctttttacgaaattttggggaatcgatagcctaaaaaggcctcaacctacaaaattcgggggaatcgagccccaaacacagcttcaatagtttctggcgtaagttctcctgtccgaacctggccgcctctcaccagcaggacctggtcagccagcctttgggccaaacgcagatcatggatcaccaggcagatggtcaggccctgctcctggctaagtttttttactaaagtaaagaattcttcctgaaaacgtaagtccatgttgttggttggttcatctaatagcagtacttgcggctcttgagctagggcacaggccagccagacccgctgcttctgcccgccggacagggccgccattggccgctcccgcaggtcggttaagccaagcttatccagcacttgttctaccgtctggtccaactggttgttaaaaatcgaataataaggcaaacggcctgccgccacagcctcttccacggttaggtccccatagagctgactttcctgctccatcagggccactttttgggcgaaatctttaggtgaaaaagcctgatagtccttgccatctagaagaagctgaccactctgcggttttagctgccgggctagcagtttcaacaaggtcgacttgcccgaaccattttcgccgacaatggccgtaatctgcccttccggaatttcaaaggacgcctcgtttaagacggggcgttttttgtatgaaaaagtaaccttatcagctgtaatcatgcttttccctccctgatcagcaggtagattaagactgggccacccacaatggccagtagtaaagtcgcagacaggtcgcccaaggccagacgaccgattgtatcggctgcggctaaaatggcgctgccggccagcagagtcaggggcagttgatttttccccttggaatccagcaagcgggctagttgcggagctaagatgcctaaaaaggacaccgggcccagactagctgtcgccgctgccgccaaaaaggccgcaatggctaaaaggcctaagcggagcttccccgcctccagcccccaggactgcaatttactgtcgctgaatttcaagtaggtcaaacttggcgccaaaatggttgccgctgccaaaagcggtactgccaagaagactaatgttagactgctggtccagttgctggtggccaggctcatcccattttgccccgtcacttcttccaaggcgctaaaggccgcgttcaagcccaggcccgccaaaatcagccggtcgggagagatcttttgcgaaaaataaaataacaaaacaatggttaaaccgtcagcgacaaaggcagcaatgatcttgcccaaatagaagctgggaaataatatcccaaaggccagggcaaaaaagttggccgaagctgacaccccaatgatgcccgggtcagccaccacattgcggagagccgcctgtaaaagcaggccgctaaccccaacagccgcaccgccaatgagggccgccaagagccgaggcagacggaggttgacgacaaccaaagaggcgctagtccctaagttcaaaaagagggctgccagactggtcaggaaaatcgtgactaataaggctaaataaggccaaaaatctttatttttcatcattatttcccgggaaataaccactggctgacctggcgtaaagccttgggcgcgttgacattcgccgaggcattaaagactggctgctgcagatcataaacccgcttattcttaacagcgtccatcttggaccagaaggcattctgcttaaattccgtcttgaattgcggcagggtcacccttggcaaggcgtgctctagtcgcaaaatcacatccggattctgctgggccagggagtcgctgcttggggtcaggtaggccttagaggacttatagatgttctctccgcccgccaaggtcaccaagctgccgatataggacttggcggtcatgatcatgtagccagagcccggcacccccatcaagatcaggacttttggcttctttttagtctgccgctttttggcataagacttggccgactcaatttcctgaacgaagcgattggcctctttttgcttctggtacttatttcccaggctcttaacactggcttctaactggccaactgagtccaatttcaaaaaagtcaccggaatggcctgctctttaaaggcggcgctgtacttactcttcaaagtagatacggcataaacctgactagggttcagctcagcgattttttctagactcggcgccatggggctgcccaccttggctacgttttggtagcgcttaggcaaggccgccttggttttcggcacgccgaccaagttgatgtccagcttggcaaaaatttcagccagggcattgctggtcacgacgactcgctcctgcttggccgccttttggtcgacatattttttagcaaccaggccgctggcggctacaaccaggattaagcctaaaaaggcgagaatgattttttgactttttttcatgattactgttctttctgctgcttacttttccgcattaaataaatcaagcccaagatgtccaaaacaaacaggcttaagaccaggatgccgccaaaaaggaggaaaaagaagttgcgctgactagccgcatttacggcttgactgcgctggttcagggactgggcccgggcggctaaggtatcttcttttttgtccagcttcttttccttggccttgacctctttttccagatctagcacctgcttggctacggcagcgtcagaactagaattgttagtttgactagcctgactagtcttttctttgctggtcgagttttgactagcagttttttgagacgcagatgcctttttcaaactcggcaaggaagcttgatcaaacttgaaactaatttggtgggtggcctggtaagtgccgggcacgtcaatcttgatcttggaggacacaaccttggacaaatcctggctgtagaaactataggtgtagtagtaaaaattgctgtccttggtctttttcacgttggacggcgactgccctgccaccgacaagacggtgactggccaagcggtcagggccttcttggtcttgatcgtcatggtgaccaggtactggccgttttgcacggtcacctccgccggccgggcatagtagcccgaggccatcgagttttcgctagtgccgtatttataagtctggtagctgactgattgggcgcccactttttctcctgaaaaaaggctcagccagatcaaggggagcagccagacgatttgccattttttgttagtcatgttttttaatctttctcttgtataggtaaaaaacgagaattcctaaccctccaaggttggccaaaagcaacaggctaatcaggggcaagtaaggatattccactaattcttgctgaaccaaggtgccggctggagtcgccttaacctggcgaacgccagccttagcctcttttagcgcctgggccgtcttggacatttggctgacttcagcggggctggatgatgcgaacgatgatgaacttgttagctctgcgtcgctagttactggatcactagtttccacttggctagcatccgcggtttcagcagaactttcgctagtgcctgcagctggtactgaagcagcaggggcagaactttcgctagtgcctgcagctggtactgaagcagcaggggcagaactactgcttgccacttggccagcagaaaaactgaagatcacgttaaagagctggttgctgatgttggcgatcggcacgctcatcttgatctgccctgacagctgctttttagccaaattatccatgtaaaagccgtactgccagtaatcgtagccgccttgctggtagtgacgctgattcaccacggcctgcccgttcatgttgacgggggtaaaagttacgagcccggacttaaccttgacggtcatggtcactagatagcggctgccctttttcgcaacggccgcttggtgggtgtagtagccatcagcgatggagaggccggaacggtcgctcttatacacccgataggacaaggagttaggcgtggtcgccttttgctttttagctggtttagccacttgctttttagcagcagttttttgactagattgactagctgactgcggctttttagccgctgaagaactagaagctgactgattgttttcggtccggctggtccccgttttcttcacgccctcctgccaaggtgcgaagtagtagtcggctttttcactgaaaaccgacccattcatcgccaaatcgaccgtcaagacgcccaaattggcttttaacagataggtctttttgtcaaaaaggaggtcaaaactattgccatccttagacacgttggccttctgccccttgaccccctgcaagctgacgctcttgacgacctggctagtcgtagcctgcgccatggccaaaaaagccttggctgcctggctgtcagaattaacgtgcaccgccacttgggtcaccttgtcatcattgaccgtgattgtagcctgcttgataaagctgctggctgccgacttgtccgccgtgcccgtcttgagcagggtcatgtcgacggtatagtcgtcagccttaactgtttgtgtttgcaaaaggagcatccctgctaaaaagctcaggatgaccacgcaccattttttcttcattgctctccgtccatcatgtaaccgcttatcaacactacaattataacgacttagccgtcgtaattcaatagtcttcattgactaaagtatatcaactagacatttttgaattctttattgacatatttaacagcttatcagataatgatggtgaatactggaatattcaaattttgattgaagagagaaaaaagaaatgaagaaaactgcaactattcttgcctcattatcacttgctttgggcctggccgcaccactagcaccagctgcatcagcctttgcggcaacgacccaaactcaaaccgttaagtcagccactgttggctttaagctgtacaagactggcactactgacgcctcattagccagcagctttttgccaagctcagccactgtttccggcgataccttgtccctcactgtttctaaggaatcagcagccatgatcaagtccatgaccatcaacggcgtggctggcataagcacgactaactctgacggctcagtaacttttgcttttgccaaggcctacaaggctggtcaaggcacggtaagcttcgtggttgccactccaatgggccagatgacccccagcgccgacatcgtttttgatgctacggacggcgcctacacagccagcgctcaatacctgaacgccagcgacaccactaagacttcaatggctggctcatacctaggcaaaaacgttagcgtaactgttaccggcggtaaggttagcgctgtaaagctgactgtttccgcagatggcgcggctgttttggacaaggttactatgaacggcgtagccggcactcgcactaacaacgccgacaagactgcaacctacacttttgccggtagcgcctacaaggaaggcaagggcgaaatcagcttcgaagttagcgcccacgcgggttctgccgtttcagctgttctggttttgggcagcttgactccagacactagcgcgaagaccgccactgacactaagaagactccagacactagcgcgaagaccgccactgacactaagaagactccagacactag

SEQ ID NO: 2189 - DNA, 47432 bp, Unknown
  gut microbiota DNA sequence
gttctaagcggcgtaatcagtccttcagcttcccaattgcggagagttgacttagcaacattaagatattcagctgcttttgatatggacatgtattcgctcatcgtttcttccttccaatcttttgataccgacattatatcatgaattggtaagaaaaattactatttagtactggatgaaattaatactttttaacagtcacaacctttttcttttaaaattaatttttttcatatgcttttaagctcttcttctggccaaaaactatttttcttttgcttgggcaaaaaaagagctcctgactcagtcagaagctcttttttcgggttgggtgttctttagaacaattgcgttagctggattcgaaccagcgcatgacggtaccaaaaaccgttgccttaccacttggctataacgcaatcaatggaggaaagtggattcgaaccaccgaactcagagagagcggttttacagaccgccgcgtttagccacttcgctattcctccgttgaagtactctattatattaacgaaaaaatagggcaagtgcaaggttttttggcaatttttttactttttggcttaaacttccaggcgtaggtcctctgcctgggcaaagctcaagcggtcgatgaagagccagcgcatgaagaagcccaaggcaactgggtaaacgacgtagagaaccgtcaacaggatgatgctcccccagcctggcgtcatcttggcgtaagccgccaggggtccgatcaggccgctgaagccaaagccagcggaattaggcgtcccctgcaggttgaagatggcggccagaagaccggacaaagcagacgaaagcaggaccgggacaaaaagcttcgacttctccagcatattggccatctggatctttggcgtcccgatgaagtgggccaaggtggtccccatcccgttgacgctgtagctcataatccccaaagtgtaggccgccccagtgatgcccaggttggcggccccggaggcaaccccggtcaagccgatcgccaccgcgatcccaactgaagaaatcggggacacgatcatagccgcgaaggacatcccgatcaagacacccatcaagagcggctgcagcttggtaaaggccatgacgatcatgccgataaaagtggtcacggttttaacgtatggcaatatcaagaggccgatcccgccgccaacgaccaagacgatgattggcaagagaatggtcgtgtaggaaccaagcttgttgccaatcaatttgatcaagaggatggctagggtgatcgtcaagccgatgttgataacgtcaccagtcccggcgaccatgatcaagccgtttttaaaagtaaccgcgccagacccgatcatggccgcggctgcgaccgaacacatctggatcatgttcatctggaagaggtaggccgcgcagaagccggccatggccgccagcaggctctgggtaaaagtagtgatgttgatgaccgtctgggcaaaagccggagctacacccaagagggccttcatcagctggcctaaaatcgcggccggcaccagggcagcaatgaccccgagtccgatcccgtttaaaatgttcagcgtgccttgcttaaggccgtttgtttctttactttccgtcattcttattttcctcgacaaatttcttgattctgcttacgccttctttaattttgtccaatgccgtcgcgtaggagaagcagagccagccctgcccgcccttggcgaaccaggaaccggcgcaaaccccaacatgggcctggtcagccagctcataaacgaattccgtgtctttttggttaagaccggctggaatcttggcccagatatagaaggccccctgcggtttgatcacttcaaagccggtttccgtcaaagcctggtagaggtagtcccggcgctctttgaaggcggccttcatttcccgggcatccctgtccccgtttttaaaagcttcctcggccgcgtcctgcattggggtcggttcagtcgtggtgatgaactggtggaccttggccagctggtcagtgatttcctggggagccgccatgatcccgatccggtagccggtcatggcccaggacttggacaccccgtttaaaacgatagcctggcttctgagggacttggccattgaggcgtgctcttgctcgtagttcagttcactgtagatttcgtcgcagaggacaaaagttggccggtccttgattactgccgccaaagcatccagctcttcctggctgtacatgactccagtcgggttggtcgggtagttcatgaccagaatccggaggcggtcgccgtattcgtcaacggctgcttgcagctggtctggcattaatttgaagccggtctgggaagtgtcgatctggacaacttcagctttttccagggccgcgtcagcaatatataaaggaaagatcggggttggcaggaccatcacgtcgcctgggttgatgatggcagacatgaccgtgtagatggcttccgttgccccgttggtagcgatgatttcgcttggctcatagtgcatgtcgtaatgccgagccaggaagtctgccgcggcttttctgagtcctggcgtcccgtttgaaagagcgtagtgggagtggttgtccacgatccccttgatggcagccgtcttgatatggtccggggtattgaagtctggctcgccaaccgtgaacttgacgatgtccgggtactggctcgtatacttggcaaaattcaggatagctgaagactttacttccgctactccctgcttaaagtgtttagttaaatcaaccatggtgtcctccttggctaccgtaaaaacaaaaaatcgcggatcagatgatccacgattaccaaagtctgctaatgcgcgtgttcttgaaaccgccggatcttgattcctgccgtttcaaaaaatgctgagaaaactcctattattgaaactgcagatgcatgttcttgcttgaaaacttgcatccgcagatgcaagctagttccagtaataaaagctaaagaatttcgcgttcttgctgattaaagcgttcatgattcttgtcctctctcaacatttgatgctttaactatatcttaagaacaaattaaaatcaagcgcgatatgttaattttcttcccaattttcaggattagccaacaggtcctgcatggcctgcaggaggtcacggccgactgtgattgttccgggcttaaggaagtagctcaaggaaatttcttcttccagctggcccagcagcttttgaattttctccgcttcttgttcttttccagccatctgctgcctcttttcttaaaatcaatctgacgacaaaagttcttttccattttaccagatttttgacctgcttttttggtgcgcaaaaaaggccaagccttccggcctggccttgcttattgcgttagctggattcgaaccagcgcatgacggtaccaaaaaccgttgccttaccacttggctataacgcaatcttacttgtgagctgatcgctcaacaaataatatattacctaatttcctagctttggtcaacagttttcgacaactttttctaaaaatcttttcccttaaacccgggccggcaggtcgacctggctttcagccaaaaccttgccctttaaggcacgcaagaattcattgtagtaataaggctgctccaggtccagtttctcgcttaaagcgtaaacccggaagtggtagtcgtggtccttgtccggcggagtcggcccgatatagcccgtatgcacttcttctggatcggttaaaaagcgggaaacagtactattgtaaccctggggcgtattcgtcgtccggctgaagtcagctggaatttcgctgactgctggcacgtcgctggccagccagtggatccaggcaaagccgcagaccggaatggaatcatagtcgaccaaggaccaggccaggtacttggtcccttccggcaggtccgtcagggtaaaaggaaaagacactaccggattgccggcttctttaacgctggcatacttggcatatttatcgggcaaatagcccttatccaatttaacttgaatctgcatggttaaacctgctttctttactcaagacttactatacatcatcttcattttaacattttttctgttaaactaattaacggtgtattttataggagttttctcatgtcacgttacaaaattcaagcctttctcttcgttttcgtagccttcatgttgggctgcaatgaatatatgatcgtcggcgttttgccggatatttcccgggaaataaatacctccctcagcagcttgggctacctggttaccgtatttgccttggtttatgctgtcgccactcccctggtcacttccctgaccaagtatttcaagcgccaccagctcctcttctttttgatggggatcttctttatcggcaatacctggacggccttgtcatacagctatgtcagcctgcttttgtccagaatcctgtcagccacgacagccggggcgattatttccctgatcctggttatcgccaacttcgtggctcccttggaaaaaagagcctcgcttctctcctggatttttgccggcttctcgattgcttccatcatcggcctgccaatcgggaccttgatctcaacgactttttcctggcatgctagtttctggatgatctcgcttctgacactcgtaacctttatccttttactggccttcgtgccccgggacactccgcagagccagtccagcaagggcaataagcagtttgccatcctgggcaactggcacatccagctgaccctcctggccatcatcctggtctgcgcggctcagtatacctactatacctacatccggaccttgatcaccgactacatgcatttcccgaagagctggctgaatgtcctgctcttgctgctaggcttggcctttattgccggcaacaagactgggggctttctggccgaccatggcgggatcaagcgcctgcctttggtctttggcatccagactgttctgctcttcctcttggctccccttttgcctctgtcctggctggccttcctgtgcatcgtcggcatctgctgcgtcaacagcatgtacgggtcttccacccaggtttatttcatggacctggccgcggctgaatatccagagtcaatcgacttcgcttccagcttcaactcaatttttgccaatgtcggcatctccctgggctcctttacggcagcgcaagcggcaggcttgaccgggatcgccagcaccccctactttggcggggtctacagtttgctcagctgccttctgatggtcctggtctgccggcaattagctgctaagaagtaaaaataggcaaaagctgaaaaaatgaatagatagtaaaaactcgccgcacggcgagttttttagtcgaataaagtttgccagttggcatcccggtgcgcggcaaagcacatcttcacctgttcagttgagttcttgttttctgccaaaggcggcaggtcatcttccttaaaccaggccgcctggctcgtttcagagttggcctggaattccccacctaaagactggcagagataatagatgtcggtaatcccataagggtgaatggagccatggtgcttgaagtggtcttgaacagcgataattttgaccggtttgacagttaagcctgactcttcccggcactccttaatgcagttgtcagctggagactggtcgacgtcacaccagccgccgggcagggaccaatgcccttctttttcctggaccaggagaatctggtcattcttgaaaatggccgccctggtcgcgattttcggagtctggtagccaatttcattgcaaaagagctctttgaccttgtcataactgaccgcgcttttttccgccagcatttccgcggctatttcccgcaggcggctgtagcgctccgtgtcaaaaatatccttgctgtaggccaggccggtctgcccgatcgcttggatttccatggcccagtcaatcaatttgtcgtcttttttcatcatgccctctcttccttctgctgtaattgttcctgccttaattatagtcaaaggggaaaattttttgcgcaaaaaagcagatccggagatctgctttcttgactatctttaatctcgattatttgacgtaggcttccttgaagtcccagttgccccggttgtagaccgcgttcttgacactggtccggaccagcatgacgctggttgagtagtagagcgggcaaatgccggcatcgtttaagaggatgtcttcagccttgctcatgtcgctccagcgctggctggcagacgtggtggtcttggagtcagcaatcagcttgtcgtattcgctgtttgaccattgcccgtcgttttggctgttgccagtcgtaaacaggtccaggaaggagattgggtcagcgaagtcggcgatccagtcgatcaggcccagctggaaattgtggctggccaggcggttcaacagggtcttgaatggcacgctgttaacttccaccttaacctgcggcagggttgcttcaatgttggactggattgattctgccgtcttctcggcactgtccgtgtcactggagatcaaggtcagcttaatcttgctcttgcccagttcagccaggcccttagccaggtactgcttggccagcttcttgttgccgtccttcgggtacaggctctttgcgcttctggagatcaagctagtgtaatctttgccgttgaccttggtcaagtccttggaggtcaaggtgttggccggctggctggccccgccgtcgatggtagaaaccaggcccccgcggtcaattgccagtgacagggccttgcggatgttggcgttcttgacgtattcgttgccgctcttgccctggctgaatgtcatgtagtaggtcccgccttgcggcagcaaggtgaaggccttatcgctcttcagctgcttgatttgtgaagaatcaagggaagtagcgtccagcttcttagcctggtagaggttgtaggaggtcgtggttgatttttgtacgctccagttgatctgattcagcttgaccttgctcttgtcccagtagtacttgttcttgaccatcttccaagacaggttggacccggtccagcccttttggatgtaagggccgttgtagaccaggtacttggaagctgtcccgtacttggggccatacttcttaacgactttttcattttgcgggaagaagaccgcgaagcccatcagattgttgaagtaagggatccgccgttccagggtcacgaccagcttgtacttgccaaccgctttgatccccaggctcgttgccggcttcttgccagctacgatcttgtcagcattcttgatgccagagaagaggtatgagtattctgattcagtcttcgggttgactgtccgccgccaggagtagacaaagtcctgggctgtcaccggatccccgttggaccacttgtcgttctttctcaaggtaaaggtgtaagttttaccgtctttggaaactttttcagaggttgccaggccgggagtgatctttgagtccttgcccaggcggtacaggccttcaaaggtgttggagatctgggtaaaggaaactgagtcggtcgcttttgacaggtccatggtcggaatttcagcaccagctgaccagttcagagtttttttggcagatgaacttgtccttgaagagccacatgccgttaacgcgagtgccgccaggcagacgcaggctgcttgacctaagtttttcggaattttcattgtcttgccccctgctttcacatctttgtcatcactagttaattttttaagcttgtactcattgtatttccattttgcagcatatacaaggacttgtctttttttccgggaaactcttcattttggaagttttctttccgacacggatttactttattcagttggtctagacttttgcttaattttcttatgtggataagctggggagaaaaattggtctgctcagtcaatttccttgaaatacaatccttggtgctcaaccagactctctacttcttcccgcaactgccccttaaggttaaagaaaattgtactaaaaccatcttcaatccgcataagcgaaaaatcattctcctgcttaagcaagatatttaagctgccgtaattgtcaatcaccatagtatcgatgatttctcccagccgctctaagccaatgtttcgtaggttcttgtttttcagatcggggtaaagggcattagccactgcttcatctaagtagacatatgactcgtgctggtacatcagcgcgaaggcaataaattttattttttctgcaaatcgcggcttaaagtgtacgtttaaatacatctctagttctgcataatcttcattttgaaaagtaaacggaacaaaatcagcaaaatacttgtctgattgctggtcaatcaagtggtcaataagatcaacggcattgtcataattcatgggcaaaactccactgttcattacattatattttgatctatagattacttactattcattaatctatagagttccaaaacacctaaaagcagactaaaccctcctaaaatcaagtagtcatatgtcgaattagacctttctgtccgtaccgttaatcttgcggcagaccaccccgtaaaaaatataaatataaacgctaatatgcttctggaaactttactagtcaagatttttttcattgcactttttatacttccgttttatataatgtaagcatttttatttaatttcatatcaattttacccccactaagcaaaaatacaagtaacagctaaaaaagggcatccctacaagcacatttcatggcttaagagatacccacgtttctactgaaaaacattatctgaaattgatgcagaaaaaaagcaccagcaaaatgctgatgctttaaatctcttggattcgatatgatctgttgtgaccatatgtgaccatttgaagtctcgaaaccgctgatctgatgccgttcttgacgatccagattaacgctttgagaattgtgaagccttgcgggccttcttcagacctggcttctttctttccttcattcttgggtcacgagtcaagaagccggccttcttcagtggaccacggaagtctgggtctacttcaagaagggcacgggcgataccatgacggatcgcaccggcttgacctgagaaaccaccaccgttaacgttaatgataacgtcgtattggccttcagtttcagtcaaagtcaaaggttgcttaaggtccttaaccaagattggcaatggaatgtagtcagcaacatccttgttgttaacagtgatcttaccatcgcctggtactaaacgaacgcgagctacggcgtccttacgacgaccagtacctgcatatgcagcttgttgtgccatctaaactacctcctagatcaaattgttaatgtctaacttttcaggcttttgcgcttcgtgcttgtgttcttcaccagcataaacgtgcatcttcaagaattcttggtggccaagagtgttctttggaagcatacccttaactgacaattcaaccaatttaacagggttcttggcaagcaattcgccagctgatacagacttcaagccgccacggtattctgagtggtggtagtagatcttgtcagttgccttcttaccagtcagctttaacttagaagcgttaacgatgatgacgttgtcaccagtgtcaacgtttggggtaaattgaggcttgttcttacctctaaggatagtagcaacagcagttgaaagacggcccaatgaaacatcagtagcgtcaatcaagtaccacttacgttcaatttcactagtctttgctaatggtgtagtacgcaatgtaaattcctccgtttaattcgtagtttgaatacaataagtttccggggcctaccgtggacaaacatactcctatatcatatgtcctaaataccaaaatgtcaattataaatcaaggtcgagccgatattttcttggcacttcctcgtaaaaaacatggtagaggtacaagccgcaggcctgggcggtctgctggacctccagccggttcttggccgcgatcacccgctttaagtcgtgcaccggccggcggccattgccgatctccagcaaggtggccaccaggatccggaccatgttgtacaaaaagccggtcgcgataaagtccatgatcacttcgttgttttcttcatccagagccacgttgacatagtacatgtcccggactttatcctcaatctgcccgccgctggccgcgaaactggtaaaatcatgccggcccaggaggtccttggcggcttcttgcatcttttccacatctaccggatatgggtagtgtcctgtgtaaaaacgcttaaaggggtttacgaagccgtccaggctgacccggtagcggtaccacttccccttgacggaaaaacgggagtggaaatctttatccacaatttcacagtcagtaaaaaccatatccatcggcagctgggaatttagggccttgatcatgttggctgccggaatttccctgcctggatagtcaaagtggattacctgcccgactgagtggactccggcatcagtccgacctgacccgaagacccggacctcctggcccttagtcatccgcttgagaatctcctctaccgtcccttgaatcgttctttgccccggctgggactgaaagccatgaaagtcatggccgtcataggacaatgtcaatttgtatctgctcgtcatcaatgcttccttgtcgtgatcatcaaaattgtcaacagcaggcagtaggctgctggaatcaagtccaccttactccattccaggatccggtagcgggtccggccctcactgcccttgtagccccgggattccatggctgtggacaagtccagggccacttccagagaatcgataaaaagcggcaccagcatcgggacaactgacttggcccgcttgaccaggccgccgtcgttaaagtcggcaccccgggaccgctgggcattcatgatcttgaccgtctggtcaaacaaggtcggcacgaagcgcagggcgatcgaaatcaccaaactaatcatgcccacgttgaccttgaagagcttgagcggcgtcagcatccattccatggcatccgcgatttccaggggcttggtcgtcaccgtcatcactgttgacaccagaatgatcatggcaaaacggatgaaaacgtacaaaccattgatcaagccctcgctggacagggtaaatatccaccagtgccagtagacttttccaccggccatgaagaaggtctgcagaagggaggtgaaaacaatcagccaaatcattggcttgaccccgtcccaaaaaactctggccttcagtcccgtcgcgaaaacgcaggccaggccgaagatgctgatcaccagatagctgacccagttattggccaggaagatcatgatgataaagtaaaaagtcgtcagcagcttggcccgcgggtctacccggtagacaaaggtcgtccccggcaggtagcggccgataataatcttactcatgctctccccccttcaagctttgcttgatcgcgtccgccagctccggcatggttaaaggctggcccggcagctttaagccagccgcctcaagttttgcggcaaaacgggcgctgcggggttcagccaggtggtgtttttgcagccattcactgtctttgaagacttccttagggctggcatgcttgatcaagcggccatgctccaaaaccagtacgtcgtcggcgtaatctgccacgtcatccatgttgtgggttaccaaaatcaccgtatgcccagctgcctgatagtccttaaacagctgcatcatttccagccgccccattgggtccaggccagcagccggctcatctaaacagatgatctccggctcataggccaaaaccccagccagggccacccgccgcatctgcccgccggacaggtcgaatggcgaatgctcaatcaagtcatctttcagacccacctttttaagccattttaaggccgcctcacgggcctcatcttcactgaagccaaagttccttggcccatactcaacgtcctttagaaccgtgttttcgaagagctgggcctctggaaactgaaaggccaggctcaccttgcggcgcaggcccttcaagcccttgttgccagtctccggggtgatggtgtagcccgcgatttcgatcttgccactggtgggctttaacagcgcgttaaagtgctgcattagggtcgacttgccgctgcccgtatggccaaccagagcgatgaacttcccctcttccaggctgaaattcagctggtccaggccgatcgcctccagcggtgagccagggctgtagacataacttacattttcgaatttaattgccataagctctgaaccaacttttcctcatcatcaatttcatccgggagcacaatcccccgttccttcaagagctgcttgagccggtagacaaagggaatatccaggccgatccgctccagcatctccaccttggaaaaaattccctccggcttaccttggtctagcagctggccgtcgtctaagaccaaaacctggtcagcccccgcggcttcttccaggtcgtgggtgatggaaataaccgtcaagttattgtcttccttgatcttccgaaccaggtccaagatctgctccttgccttccgggtccagcatggaggtcgattcatccaggatgatgacctggggcttgactgccaggatgccggcgatcgctacgcgctgtttctgcccccctgagaggttgctgggctcgctgtcagcataatcagccataccaacgtcagcgaccgcctgagcgacgattttcagcatttccggccggggcactgcccggttctccaagccaaaagcaacatcgtcactgaccgtggccccgacaaactggttgtcaggattctggaagacaatgccgaccttctctctgacttcccaaaccgtgtcagcccccagcttgaccccgtcaactgtaatagaggacttatccaaatcatctggggccagcaggccattgatcaatttagagaccgttgacttgccgctgccgttatgcccgatcagcgccgtccagcttccccgctcaatcgcaaaagagaggtcagacacagctggccgcgggctgtccgggtaagtaaaagtcacatggtcaaaagaaataatattgtcgctcatcgcgtcaccacctatttgctcatttccctctattgtatcaagccagggtaaaaaagcgcaaaaaaaaaatcatccatgaagagggatgatatcgaaccatctaagctagactaaggtttccccaccatcatcgcgcttattctcgctttcatgaataatttcaaaaagtattaaatttgcagcttgagaattaaaccaattccaaaactaccataggagctgcgtcacccttacgaggaactgccagcttcatgatccgggtgtaaccaccgttacgatccttgtaacgaggagctacgtcgctgaagagcttttgaagtgctgacttaacaactacttcgtcgccttcttcgtggatatcagcgatttcgttacgtacaaaagcagcagcctttcttcttgcagccaagtcaccgcgcttgcccaaagtgatcatcttttcagcagtgcgacgtacttccttagcgcgagcttcagtagtgacgatgcgttcgttaatgatcaattgggtagtcatttcacggagcatagcttttctttgactactgtcccaacctaatttacggtatgacattaatgtgcctcctttattacagactagtcttcttgacgaagtgaaagacccaggtctgccaatttattcttaacttcttccaatgatttacgtcccaggttgcgtacccgcatcatttctgcttctgacttaacagtcaagtcttgcagggtgttgatgccagcccgcttcaagcagttgtatgaacgaactgaaaggtccaggtcctcgatagtcatttcgagtttcttttccttttggtcgttctcttgttctaccataacttcgccgatttcggcagcagcgtcagctgattcgaaggccttgaagtgttcgaccagaacacgggcggcaaagttgagggcgtcattcggagcgattgaaccatttgtccaaatttccagggtaagcttgtcaaagtcttctctcttaccaacccgggttgattcaacttggtagttgaccttttcgattggtgagaaaagtgagtcaactggaatgtcgccgatggacatttcagcagacttgttttcgctggctggtacgtagccccggccgttgcagacatcaatccacatgtgcaggtggccaccttgagcgatggtacaaatgtattggtcaggattcaagacttcaacatcagcatcagccttcaaatcttcagcagttacagtagctggaccttcaacgtcgagttcgatcgtctttacttcttcagtgtaggcccggagttcaagcttcttcaggttcaagatgatcttggttacgtcttctttaacaccgggaacagtagtgaattcgtgcaagataccatcgatcttcaccttcaccaaaccggtccctgggacagaagtcagcaaaacccgacgcagtgaattacctaaggtagtaccaaacccacgctccagcggttcaacgacaaacttaccgtaactgtcttcttgatccacgacggtaatatttggttttttaaattcaatcattactgggcccctttcaaaacgcacgtctcaaagtaagattttattaaacacgacgacgctttggtggtctagaaccgttgtgaggtactggagtaacgtcacggattgaagtgatttccagaccagcagcttgcagagcacggattgctgattcacgaccagaacctgggcccttaactgatacttcgatgtgcttcataccttggtcaattgcgctcttagcagcagcttcagcagccatttgcgcagcaaatggagtagacttacggctacccttgaaccccaaagcaccagctgaagaccaggcaacggcgttaccttgaacgtcagtaatcataactaaagtgttgttaaacgttgagtgaatgtgagccacgccactttcaacgtgcttcttcacacgacgcttacgagcagttttctttgcaggcatcaataaacctccttatattatttttggattaacggcttctcttagcacccttacgagtacgtgcgttgttcttggtgttttgaccacgaactggaagaccgcgacggtgacggataccacggtatgaaccgatatcaacaagacgcttaatgttcatgcttacttcacgacgcaagtcaccttcaacacggtacttgtcgacttctgcacgaagcttttcttgttgttctggggtcaagtcctttgaacgaacgtcttcagatacaccggctgctgcacagatttcttgtgcagtgtgttcaccgataccgtaaatgtaagttaaagcgataacgactcttttatctcttggtaagtcaacaccagcgatacgtgccatagaatgcacctcctactttctaaaattaaccttgacgttgcttgtgctttggatttgcagggcaaataaccataacacgaccatgtctcttaatgaccttgcaatgttcgcacattggcttaacagatggtctaaccttcatgtttgcctccgtttttatttaataaaccgatacgtaattctacctttagtcaagtcatatggagacagctccacagtgacccggtcgccaggcaggatccgaatgtagtgcattctgatcttgccggaaacgtgagccaaaatagtggcaccgttttccaattcgactttaaacatagcattaggtaaggtatcaactaccttaccttctacttcaatgacatcatcttttgccaaagttgcccctccgcaatcaaaacagtcatacttcgaaattataacatgttcgaaaaaatttgcaaattcttttagctaatccttgctcaggatagcgtcgatatctgcaaaaactttttcaggtgcttgttcgccgtttacagtagcgagcaaacccttcttgtcatagtactccttcaatggagcattcatcttttcattaacttccagccggttcttgacaacttcaggcttgtcgtcttcacgttgatagaactcgtggccgccgcagcggtcgcaagtcccttcgaccttaggtctctttgagaacttgttgtaagtcgcgccgcaattcttgcacatgaaccgtgcagataaacgatcgattaaagtctcttccttgacatcgattgcgatgacgttggtcagctgcttgttcaagcgggtagtgatttcgtcgagcaattctgcctggttagtcgttctcgggaaaccgtcaagaatgaaaccattcttaacgtcgtcttgaccgagacgttcttcaaccaacttagcagttacttcgtctggaaccaaatcgcccttgtcgatgtaagacttggcttccaagcctactggagtcttgttagccatagcttctctaaacatatcaccggttgaaatgtgagccaagtgatacttgtcaacgatttgttcagatgcagtacccttgcctgcgcctggcagaccaagaagaatcaaattaatcatattttttcacctatctaataaatccggcatattcacgcttcatcaacaaaccgttgatttgccgtgacaattccagaacaaccccgataacgatcaacaagctggtcccacccaagccaattgaacttggcaggtcccagatgttggttgcaagctgtggaagcaaagcaaccaaacccagatatacggacccgaccgttgaaagcttcagcaacattgaacttatatatttctcagtgtccttacctggccacacgctaggaatatatgcaccctgcttttgtaagttttccgccagcttctcaggatttacctgaacgaaggcatagaagaaagtaaatagaatgatcaaaagggtgtagataattgcaccaggggttgtctgcaagctaaagatattcgataagacctgataccaagtcgtgtcgccgtacttgccttggaaagccatcaaaatcgtggctggcgtaacgatgaacgaactggcgaagataactggaataacgccggagacgttaacctttaatggtagaaaactttctgatccactggtcgtcgctcttctcgtatattgaatcggaatacgacgatcagcttgttcaacccaggtaacgaatttcgttaccaataaaattgcgacaataagcgcaacgaagaacgcaactccttgccagcgatcacttgcactgttgttgatcacctgatcttggaagacttggtaaagtccgcctggcagacgggcaatgatcccagcaaagataattactgaaaccccattgcctaaacccttatcggtaatttcatcacccagccaagttaacaggaaggtaccagctgtcatgatcataccgatttcgaagtaggtttgccaagtttgagtcttaaccagaccgaaggaagacaaggcgttaaaacctaatgtaatccccacactctggacaaaagcaacaaacagcgttaaataccgggtaacctggttggttttgcgccggccaacttccccttgcttgccccattcgacaagcgttggtacgatgtccatctgcaacagttggataacgatttgcgcagtgatgtatggtgatacccccaatgagaagatggagtagttgtccaagccaccaccggaaaccgtatctaacacggaaacaagtcccgtattagcaactgtcgtcagagccttcgcatttatccccggaactgtaatatttgcaccgagtcggtaaattacaaggataaacaaagtatagaaaagcttatttctaatttccttatccttgaaggcgttcttcaaggttgaaaacattagatcacctctacagtgccaccagctgcttcgatcgcgctcttagcagcttcagaaaccttgttaacctttacagtcaacttaacgttcaattcgccgttgccaagtaccttgacacctgacaattgcttcttaaccaagcccttagccttcaaagcttcgaagtcaactacgctgccttcttcgaacttgttcaaatctgcaaggttaacgattgcgtattccttgcggctgatgttcttgaaaccacgcttaggcatagttctgaacaatggcatttgaccaccttcaaaacctaaacgggttttaccgccggaacgtgcgtgttgacccttttgaccacgacctgaagtcttaccgaagccacttgaagtaccacggccgacacgctttctagcgtggcgtgaaccttcggatgggtgtaattcattaagtttcattaaattggaccctccttgatttatttgttaacttcttcaacagaaattaagtgagcgattttcatcagcgcgccacgagttgcagcgttgtctggttggacaacagtactgttgatcttgcctaagccgagagcttcaacaacttttctttgttcaggcagacggtgggcaacacttctaattaaagtaatctttaaatctgtcatctataatctccctaatcttgcaagctcttagctgattcacgaagcttcagaacgtcttcgcgagtcttcaacttttgcagaccatcgatagtggcccggataacgttgattggagtgtttgaacccaaagacttggaagtaacgtcgccgataccagccatgtccataacgatacgtacggcaccaccagctgcaatacctgaaccggcttcagctggcttaagcagaacgttacctgagccgtagtggccaagtacttcgtgaggaatagtagtaccaacagttggaactgagatcatgttcttcttgccggcttcgactgctttgcggatagcttctggaacttcagttgccttaccagtaccaaagccaacgtgacccttcttgtcaccaacgacaactaaggcagcaaatctttgacggcgaccacccttaacaaccttggtaatccggttgatggcgaccaattgatcttcgatgtcttccttgcttctacgattttttgaatcgtttcggtttgccatgtgttaatctcctttcctagaattctaagccgttttcacgagctgcgtcagccaaagcttctacacgaccgtggtagatgtaaccacctctgtcaaagacaacttcagtgatgcccttggccttaccagcttcagcaatggccttgccaactgcttgagcttgttctaccttggtagcatcctttgaaacggacttatctaaagttgaggcacttgcaagcgtgacacccgctacgtcatcaatcaattgagcgtagatgttagtgtttgaacggaaaacactcaagcgtgggcgctcagcagtaccagaaatcttaccgcgaacacgtctgtggcgctttaagcgcaacttgtttttatctggttttgaaatcacaatttcacctcaaaatttattttctattacttaccagtcttaccttccttgcggcgaactacttcgtcagcgtaacggatacccttgcccttgtaaggttcaggtgaacgtacggcgcgaatttccgcagcaaattggccgactacttgctttgagataccttcaatagtaacgtcagttgctgatgaggtagtcacagtaacgccttctggggccttcatttcaactgggtgtgagtagccaacgttcagagtcaagacattgttcttggcaactgcacggtaaccaacaccgatcagcttcaattccttcttgtagccagttacgacaccttcgatcatgttagccaggttggctctcatagtgccgtggatagccttgtcattttcgtttgaacggctgaagcggattacgccgtcttcttgttcgaacttgatgcgtgggtcgaattctctagtcaattcaccctttgggcccttaacagtaatttcattaccattcttggtaacagtgacactttcagggacgttaattacctttaaaccaatacggctcattaattattctccttcctgtcagaattaccaaacgtaagcgataacttcgccgccgacgttcttttctctagcttccttgtcggtaaggataccagctgaagtagaaacaatggcgatacctaagccgttcagaacctttggcaggttgtcagctgaaacgtagtttctcaagcctggcttggagatacgcttcaaaccggagataacacgttcaccgtttggaccgtacttcaaggtaatcttgattacgccttgcttactgtcttcagttacttcgtagtcacggatgaaaccttcttgcttcaagatttctgtaagtgacttcttaatgtttgatgcaggaatttctactgaatcgtgcttagccatgttggcgtttctgattctagtcaaaaagtctgcgattgggtcagtcaataccatctatgctatcctccttaccgatttaccagctggccttcttaagaccagggatttgacctttgtgtcccaattccttcaggcaaatgcggcacaaaccaaacttgcggtaaacagagtgtggacgcccacaacgttcgcagcgagtgtattcacgtgaagaaaactttgcaggacggtgatttcttaccttttgtgatgtcttagccatgtatgtcctccaaattacttagcaaatggcatgccaaattgagtcaaaagttcacgagcttcttcatcagtttgagcagtagttacgataacgatatccaaccctctagtgcggttaaccttatcgaagtcgatttctgagaagatcaattgttccttaacacccagagtgtagttgccccggccgtcaaatgaacgagttgaaacaccgcggaagtcacgaacacgtggaagagatacgttgatcagcttgctcaagaagtcgtacattctgtcgcctctaagggtaaccttagcaccgatagacataccttcacgcaaacggaagttggcgattgacttcttggccttggtaatcattggcttttggccagagatcagagtcaattcttcaacagcttcgtccaggttctttgcgttggcaacggcgtcaccaacacccatgttcaaaacgatcttgtcgatctttggtacttgcatgcttgaagtgtagttaaacttcttagtcaatgcaggaacgatttcttcgttgtacttagttgcaaaactattagccattagtgtcctccttccctaattaatctttgttgctttcagctttagcaataaccttaacgttagaagcgtggattgaaccttcagtttcaaccacaccgccgttagcgttagcagctgaagccttggtagccttcttgatcatgttgacgcccttaacaacaacgcggttcttcttaacgtttacggaaaggacagtgccttccttgcctttttctgagccggcaataacttttaccttgtcaccaattttaacgaacattcgcgcaactctccttttacaatacttcaggggcaagtgacacgatcttcatgaagtccccttcacggagttcacgtgcaactggcccgaaaatacgagtaccacgagggctcttgtcagcgttgataataactgctgcgttttcgtcaaacttgatgtatgaaccgtcttcacgacgagcgcctgacttggttcttacgataacagccttaacgacgtcacccttctttacaacaccacctggcgttgcttgtttaacagctgcgacaacgatgtcaccgatgttaccggtcttgcgctttgacccgcccataacgcggataacaagcaattcacgtgcaccggagttgtcagctaccttcaaacgagtttcagtttgaatcactattaaatcctcccttagctaatccgtaaattaaacagatttcttaacaatgtcaactaaacggaaacgcttagtacgtgataatggacgggtttccatgatacgaacgatgtcgcctaccttggcttcgttattttcatccatagcgtagtacttctttgagtaacgagtacgcttgctgtaaactgggtggttcttgtaagtatcaactacaacaacgatagtcttgtccatcttgtcggaaacgacacggccttggtaaacgtggcggcggtttctttcgattgattcgctcaagttagtatctcccttccactagttttgttctaattctttttcgctcaagatagtcttgatccgagcgatgttcttacggacttggctcaagcgagcggtgttttctaattgaccggtagcttgttggaaacgcaagttgaacaattcttctttgtattgcttttcctttgccaacaattcatcagttgataatgatctgatttccttagtcttcattagttgcgccacctgcttcctggtcttctctcttcacgaacttgcacttaattggaagcttgcttgctgcgagacgcattgcttcgcgagcagtttcttctgaaacgccaccaatttcgaacatgatcttttctctcttaactacagctacccaacctgctggtgcacccttaccggaacccatacgtacaccaacacccttagcagtgtaggacttttgagggaagattctgatccaaaccttaccaccacgcttcatgtaacgagtcatcgcaacacgggcagcttcgatttgacggttagtaatccagtgggattcaagtgcttcaagaccgtattcgccaaatgctacagtcttgccacccttggcagcaccacgcatcttaccacggaattcacgacggtgttttacacgctttggtactaaaggcattacttcttacctccctttgaacgctttgcaggttgattcttgcgacctggcaaaatttcgccacggttgatccaaaccttaacaccgatttcgccgtaggtagtaaatgcgtttacccatgcgtagtcgatgtcagctcttaaagtatgaagtggaacactgccttcagtgtgccattcacggcgagccatgtcagcaccgttcaagcggcctgcagtttgtaccttgatacccttggcgccggtacgcattgaacgttgcgcagcttgacggctggcacgacggaaagcgatacgagcttcaagttgacgagcgatgctgtcagcaacaagcttggcgtcgagatcaggcttcttgatttcaacaatgttaatgtgaacttgcttgttagtcaaagcgttgatttccttgttcaaggcttcaacttcagcgccgcccttaccgataaccatacctggacgagcagtgtggatagtgatgtttacacggttagcagcacgttcaatttcaacagtggatacggaggcatccttcaacttttcatcgaggaactttctgatccgaaggtcttcgtttaaagtttccttgtagcctctagcagcgtaccatttagcttcccagtcgcggttaacaccaagacggaaaccaattgggttaatctttgaacccattcaaatacctcccttaatcgttcaattctgaaacaacaacaactacgtggctggttctcttcatgattggagaagctgaacccttggcacgtggacggaatctcttcaaagtagcaccttcgttaacgtatgcttctgatacgtaaaggtttgcactttcaagatcgtagttgtgttccgcgttagcaactgctgaacgcaaaaccttttcaacgattggggaagcagcttttggcgtaaacttcaaaattgccaatgcttcagcaacgctcttaccccggatcaagtctacaacgagacgagcttttcttggggcgatacgaacagttcttgcttcagctctagctgaactaatttgttctgccatttaattgtttctccttccttattacttggatgccttgtcgtcagccttgtggccgcggaaggttctagtaggtacgaattcgcccagcttgtgaccaaccatgtcttcagttacgaaaactggaacgtgctttttaccgtcgtaaacagcgatagtcaaccctacgaaagaagggaaaatagttgaacgacgtgaccaagtcttgataacttgcttcttttctgcggcttgttgctcgtcaaccttcttcaaaaggtgggcgtctgcaaaaggaccctttttaatactacggctcatttaattacccccttctcttacttacgacccttgcggtgacggatgattaacttttcactagccttcttgctgtctctagtcttaacaccacgtgacttcttgccccatggagtcattggctgtggacggccgacaggtgccttaccttcaccaccaccgtgtgggtgatcgttagggttcattacagaaccacgggattgtggacgcttgcccatccaacgtgaacgaccagccttaccgatgttgatcagtgagtgttgttcgttgccgacagcaccgatagtagcgcggcattctgaaaggatttcacgaacttcgccggattgcagacgaacttgagtgtacttgccgtcaacacccaaaacttgagctgaagtaccagcactacgtgcgatttggccacccttgcctggcttaagttcgatgttgtgaacttcagtaccagttgggatgttcttcagtggcaatgcgttaccaaccttgatgtcggcatctgcgcctgattctacccatgaacctacagtcaagcccttaggagccaagatgtaagccttagtaccatcagtgtagtgcaacaaggcgatgtttgctgaacggtttggatcgtattcgattgcgacaaccttagccttagcgttgtccttagtacgcttgaaatcgatgatacggtattgttgcttgtgaccgccgccacggtgtcttacagtaatgtgaccgtatgagttacgacctgcagtctttgacttagaagcaagcaaagtcttttcaggctttgacttagtgatttctgcaaagtcagaagaagtcatattacgacgaccgtttgatgttggcttgtaaactttaatagccaattgactgacctcctaattacttgatttattcgttgttttcgtctttgaaaatcttgatgtcgtttgaatcttcagttaaagcaacaatagcctttctgcgacgagcagtcttgccagtgtagcggcctacgcgcttttccttgccgcgaacattcatgatgttcacgctcttaaccttaacatcgaagatttcttcaatagcgtcgcgaacttgaagcttggtagcagttaaggccacgtcgaaagtgtacttcttgctatccatcaagtcggctgacttttcagtgataacaggtcttaagataatgttgcgtgcgtccattaagccaatacctcctcaatcttcttaacgtcgtcttgagtcaaaacgagcttgtcgtagttaacggcgtcttcaacgttcaagccgttaactggaacgaccttaacctttggcaggttcttggctgaaagttgtacgttcttgtcgtctgaaacaaccagaaccttgccttcaagcttcaagccgttcaagattgcaatgaagtccttagtcttaggagcgtccaaagtcagcttgtccagaactaccaagttttggtcaaggagcttttgtgacaagacagacttgatagccagacggcgttgctttcttggcatgctgtaagcgtaggaacgtggagtaggcccaaagacaacaccaccgccgcgccattgtggagcacggattgaaccttgacgagcacgaccagtacccttttgtctccaaggcttcttaccaccaccgcgaacggcagatctgttcttcaccttagaggtaccctgacgcttgccagctctttgtctgatgattgcatcaaagacaacagcttcgtttggttcaacgctaaacacgttgtcgtttaaagttacttcaccagcgttgttgccgttttgatccataagtttgaaattagccatttgagtcctccttcctacttgctagcctttgcagatgacttaacaatgatcaatgagttcttggcacctggcacgttacccttgatcatcaagacgttcttgtctgcaacaactttttctactactaggttttcaatagtaacagtcttcacacccatgtgacctggcaacttcttgccctttggcacgcggttgatgattgaacccattgaacccggaattctgtggtaacgggaaccgtgagtttcaggaccacgtgattggtggtggcgcttgatgttaccttggtagccatgacctcttgaagtaccagtaacgttgacaacgtcaccttccttgaacgtctccacagtagtttctgagccgacttcgtagtcactaagctctactccgcggagttcacgaatgaagcgcttaggtgaagtctttgccttatcagcatgacctttttctggcttgttgctcaaaacttcacgcttgtcttggtagcccaattgtacagcttcgtaaccgtcgttttctacagtcttaacttgcataacaacgtttggagttgcttcaataacagttactggtacaagaacaccatctttagtgaagatttgagtcatgccaacttttcttcctaagattcctttggtcatgattacacctctttctatctaaaaattaaagtttaatttcgatgtctacgccgcttggcagatcgagcttcatcaatgagtcaaccgtcttaggggttgggttcaagatgtcgatcagacgcttgtgggtccgcatttcgaattgttcacgtgagtccttgttcttgtgtggtgaacgcagaacagtgaacaaagttctttcagatggaagcggaactgggcctgagatttcagcgccagttctcttcgcagtatccacaatcttagcagctgattcatcgagaatgctatgttcgtaagactttaatctaatacgaatcttttcatttgccatctaattacctcctatacgtcttctttaaaagatgactagctcggcgaaaattccctgcacaaccactgtggcaatgcagcctggcgtgccgcaaccttccgcgtcgaagctacctacaatttgtactcagagggccttttccctctcaaaagcactttatctagtataaggccttaagccttaaatagcaagggtttagccctatttttttcgaaaaagtttcctagaattgctttcccttggtggagaaatttttctttcctttttaacatatttccagaagccagtttttccttaaaaatacaaaaaatacaaaaaatcctagcaaggacaagtaatgtcgttactaggatttctgttttggcctaaatcaaggcttagatcatgctaggaagcattaagcgttgccgccgcgcttcttgatgatttcagcttggattgacttaggacatggtgagtagtggtccataaccatcgtgaaggtaccacggccttgagtggatgaacgcagggtagttgcgtaaccaaacatttctgacaatggaaccatcgcgttgatgaccttggcacctgctcggtcttccataccttccatttggccacgacgagcagtgattgagcccataacgtcaccaaggtattcttctggagcgatgacttgaaccttcatgattggttcaaggataacagcgccagcctttgaagcagcgttcttcaaagccaatgatgcggcaaccttgaaggcagcttcgcttgagtcgacttcgtggtatgaaccgtcgtacagcttagccttaacgtcgatcaatgggtagccagccagaacaccgttcttcatggcttcttgcaaaccagcgtcaactgctgggatgtattcacgaggaactacaccaccgacaatggcgtcttcgaattcgtagcccttgccttcgtttggagtaaattcgatccaaacgtcaccgtattgacccttaccaccggactgacgaacaaacttaccttgagcttgagtcggtacagtgaaggtttcacggtaggcaacttgtggttcaccgatggttgcttcaacgttgaattcacgcttcatacgttcaaccatgatgtccaggtgaagttcacccatcccggagatcaaagtttcaccagtttctgggttagtttcagcccggaaagttgggtcttcttcagtcagcttttgcaaagcgacatccatcttgtcccggtcagcctttgacttaggttcaactgaaacttggataactggagctgggatgtccaggctttccagaatcaatgggtgagctgggtcagtcaaagagtcaccagtagtggtgttcttcaaaccgatggcaccagcgatgtcacctgagaagacttctgggatttcagtacgtgagttggcgtgcatttgcagcaaacgaccaacacgttcacgttggttctttgaagcgttcaaaacgtaggaacctgattccaatgaaccagtgtagacacggatgaaagtcaaacgaccaacgaatgggtcagtggcgatcttgaaggccaaagctgcaaatggcttgttgtcgtcagccagcagttcaacttcgttgccttccttgtcgtgggcgatgtaaggcttaacgtcaagtggtgatggcaggtagtcaacaacaccgtcaagcatcatttgcacacccttgttcttgaaggctgaaccagcaaatactgggaaggccttcaactccaaagttgcccggcgcaaggcagccttaagttcttcgttggagatttcttcaccgccaaggaacttttccatgatgtcgtcgtcaacttcagcgatctcttcgatcatttcttcacgacggctttcggcttcttccttgtattcgtctggaactggaatagtttcccagtttgcgcccaacttgtcttcgtcgtagacgtcggcaaccatgtcgaacaagtcgataacgccttcgaattggtcttcagcaccgataggcatttgaacggcgatagcgttagcgttcaaacgttcgtgcagactcttaactgagaagtcgaagtttgcaccgatcttgtccatcttgttaacgaagacgatccgcggaacaccgtagttttcagcttgacgccaaacgttttcagtttgtggttcaacacctgattgtgcgtccagaacagttacggcaccgtcaaggacacgcagggaacgttcaacttcgatagtgaagtcgacgtgtcctggggtgtcgatgatgttgatccggtggtccttccattgcgcagtagtggctgcggaagtgatcgtgatcccacgttccttttcttcttccatccagtccatttgggagtcaccttcgtgagtttcaccaatcttgtggatcttaccagtgtagtaaaggatacgttcagtagtagtagtcttaccggcatcgatgtgggccatgataccgatgttgcgagtcttctctaatgagaattcacgtttgttagccatatttttctatctccttagataacgagcactggattagaaacggtagtgagcgaaggcacggttagcttctgccatacggtgcacgtcttcacgcttcttaacggctgaaccagtgttgtttgaggcatcgatcaattcgtttgccagacgttcatccatagtgtgttcgttacgcaggcgggagtatgaaaccagccaacgcaatgccaaagtagtttgtctttctggacgaacttctacaggaacttggtagttagaaccaccgatacggcgagccttaacttccaaaactggcttaacgttgttcatggcttcttcaaagacgtccattggttccttgccagtcttgtccttgatgatgtcaaaagcatcgtacaagattgatgaagcttgagctctcttaccatccttcatcaagtggttgatcagcttagtaaccagctttgagttgtaaactgggtctgctaaaacgtctctctttgaaacatgaccttttcttggcattatttaagtcctcctttaacccttcttagcgccgtacttggaacgagcttgctttctgccgtcaacaccagcagtgtcaagggcaccacgaacgatgtggtaacgtacaccaggaaggtcctttacacggcccccacggatcagtacaactgagtgttcttgcaagttgtggccttcacctgggatgtaggcagtaacttcagtcaagtttgaaagacgtacacgggcgtacttacgcaaagctgagttaggcttctttggcgtcatagtaccgacacgagtcgcaaccccacgcatttgtggtgctgggttgaagacttgttccttcttcatgctgttgtagctgtagttcaaggctggtgactttgacttagtagtctttgagtgacggccttttctaaccaattgattaatggttggcattaactagttcctcctaaatttatatatcattttgttcacatatccgggagtttcttttttgcctcgcggagtaatcttcaaaacatacatctgttagtatactccatttgccagctaatgcaaagcttttttcaagaatttccagcctggaaaaagctgcgctttttcaatcgatgacaacgttttccatctatgctaagattgattttatgcgaaaaaattaatttattgttagtagaaaagaaaaaatgaggtaaaaaatgatcaaattaattgctatcgacactgacggtaccctgctcaactcccaaggagaaatccaggccagcacaaaggaagccatctctaaggcacttgaccgcggcgttaaagtcgttctctgttccggccggccaatcgcgggcctggccccttacatgaatgaacttggtataaagggcgaggaccagtatgccctaaccttaaacggggcaatcagccgcaaggccagcggggaaatcatgaccagcgacttgatcgctaattcagtttaccggcggctgaccgcctacgccctctctttaaagctccctttcaacatcgtggactttgaatcccggatcattacgccgaaccatgacatcgacccgatggtttaccagcaggcttacgaaaaccaggccgtcctctttgtcagaagcgttgaggaatttccggagaagggccaggccattgccaaggcctgctttgtcggcagccaggagcttttggacagagtagaagaccgggtcaaggaagactgggggcaggacttcaacgttctgcggactgacgcccgcttccttgaactgctcaatcccaaggtcaacaagggccaggggctcaaagaactctgcggccggctggaaatcgcgccagaagaagtcatggcgatcggcgacgagagaaacgacttagacatgtttgcttttaccggcaccagcgtggccatgggcaacggcaatgacctggttaagcaagccgctgactatgtcaccagtagcaatgatgaagacgggatcgcccaagctctggagaagtttgttttttagcaggtaattttccctaaactgacaattttttgcctttttaaaaaatattggcaaaaaaggtgtaatagtaagtggagggaaaaaatgctcagcaaaatgatttctttactctgcggtcttttggcagctctcatcgccgaccgttatcgttataatacctttcttgagtgtaaaagctggctggcggatgatatcccttacatcatcctggccggaaatttgttagtttatttaatctccaattctaggagcagtgctatttctttgctctttataatcaacttctttttaatggttgtcagcgacctgcatgaacagtcttttgatacttgcctgctcgtcgtaccgctggccaccgggctgatgcattttttccaggcaccaaacacggaaggcctggggcaggctgcaatttttctggcagtcctggtctggctcgcttttacagggaaaatgggcagcggggacgtttggcattttttactcctgtctttaaatttttcatgtcccgttgctgtgaagagtttcctgctggcctccctgctggccatcgcccatgcgctttggcataagcggccgggtaaagagccctttgccttcctgccctacttattctggggcctcaacctccaatttttcctttagggtaaaagaaaaaacgttcggatgactttgagccattcgagcgttttttcttgttaattaaactggattacttgctttcagtttccttgttttcgtcttccatcttcttttccaggtcagcgattgagtaaactgagtctggttgttgaacatcggcctttggcacttggtcgcggtaaattggcataccagtaccagctgggatgatcttcccgatgatgacgttttccttcaaaccaagaagcgggtcgttcttgccgcggattgacgcgtcggtaagaacccgggtagtttcttggaaggaagcagctgacaggaaactgttggtttccaaggcagccttggtgatacccagaatgtcagcctgggcagtagccgggatcccgccgctgatgatgacgtcacggtttctgtcgcggaattcagcgatgtccatgacttcacctggcaagatgtcggtttcacctgggtcaagaacccggaccttttgcagcatctgtctggtcaagacttcggcgtgcttgtcggccaggtcaaccccttgagtccggtatgacttctggacttcagccaggatgtattcttcagtcgtcaaggtgtcagttaccttgatcaattccttagggtcgatagaaccagggatcagcttgtcaccacggtggatttcatcgccttcctgaactgctggcttagcagtgtaaggaatggtgtagactctggtgtcgatcttgcccttaacggtgatttcctgcaagtgttcagccgcgttgctttcgatcttgtcaacaacaccgtcaacttcagagataaccgcgcgacccttagggttgcgggcttcgaacaattcttgcacacgaggcagaccttgagtgatgtcttctgcgccggcaacgccaccggtgtggaaagtacgcagggtcagctgggtacctggttcaccgattgactgagcggcaaccgtaccaactgcttcaccgatttcaacttcttcggcagtggccaggttccggccgtagcacttccggcagataccgtgggaagtgttgcaagtcaggattgaccggatttgaacttcctgcacgccagcgtcaacaatcttctgcgccatttgttcgtccatcaggacacccttagggcagatgacttcaccagtttgcgggtcacggatagtccggttggtaaagcggccgaccagacggtcgtaaagtgattcaatcaagccggcatccttgtcaacgatggccttggcagtaatgccgcggtcagtgccacagtcgtcttcacgaatgataacgtcctgggcaacgtcgaccaaacgacgggtcaggtaaccagactgggcagtcttcaaggccgtgtcagtcatccccttccgggcgccgtgagtggacatgaacagttccagaacggtcagaccttccttgaagttggagataaccgggatttcgaacaactcaccacttggagtggccatcaaaccacgcataccagccagctgggtaaagttggagatgttaccacgggcaccggactgctgcatgacggagattgggttcttttggtccttgaattcagcaatttcctgttgaacggcatccttacagtcagtccagatcttgatgacgttgtcgtgacgttccttgtcggacagcttgccccggcggaacatcttggatacttgcttaacctgcttgcgggcttcagcaaccaaggcatccttggtcttggtttccggaacgtcagccataccgatggtcaagccggaaatagttgaagctgagtagcccatttccttcaagtcgtccaggtattcagaagttctttgtacccggtagcgcttgtagatttcagaaatagtgtcacctaggaagcccttcttgaatggcgtagccaccaggtcctggccaatttcagcgatcttgtcctggatgtcctggccatcttccaggaagtacttgtcagccattggctgctttaagttgtcctgggttggttcgttgatgtagaagtagtcatctgggaagagggagttgaagaccaagcggccgtaagtagttacgaaaatgctgtcttcgtggcccgcgccccagtccttcttcggcattgaagcggctgacacaccgatgatggtgtggtagtgaatatcaccgttgttgtaggcgatggttgcttcttctggagtagcaaagatcatgccttcgccttcccggccgatttcagcctgggtcagccagtagttacccaaaacgatgtcctgggacggagtaacgattggcgtaccgtccttaggagtcaagatgtggtgggcagccagcatcaagaggcgggattcagctacagcttcgtctgacaacggcacgtggatggccatctggtcaccgtcgaagtcggcgttgtaggcttcacaagccagcgggtgcaaacgcagggccttgcctgggaccaaaactggttcaaaggcctggattgacagccggtgcagggtaggtgcccggttcaaaagaactggacgttccttaatgacgtattccaatacgtcccagatgtcgtcgtcttcccggtcgatcttgcgcttggcgttcttgatgttggaagcaatgccccggcggacaagttcccgcataacgaatggcttgaacaattccagagccattggacgcggaacaccacattggtaaagcttcagctttggagaaacgtcgataactgaacggccggagtagtcaacacgcttaccaagcaagttttgacggaaacgcccttgcttacccttcagcatgtgtgagatagacttcagtggccggttgcctggcccaacaactgggcggccccggcggccgttgtcgatcaaggcgtcaactgcttcttgcagcatccgctcttcgttttgcacgatcaagccaggagcgtgcatgtccagcagcttcttcaaccggttgttacggttgataacccggcggtaaaggtcgttcaagtcggaagtggcgaaacggccaccttccagctgaaccattggccgcaagtccggcggaataaccggaacagtttccataaccatccattcaggcttgttgccgctgtttctgaaggcatcaaggatgtccagccggcggatggcccgggtccgcttttgccccttcaaggtttgcagttctgccttaagggcagtaacttccttgtccaggtcaacctgcttaagcaggtcgcggatagcttcggcacccatcttagccacgaagcggttgccgtacttggccttttcttcccggtattcagcttcagtcaagagctgcttggcttccaggccagtgtcacctggatcgatgacaatgtaggcagcgaagtagataacttcttccaattgctttggagacacgtccaaaaccagacccattcttgatgggatacccttgaagtaccagatgtgggttacaggagcagccagttcgatgtggcccatccgttcccggcgcacgtgagaggtcgttacttcaaccccgcaccggtcacagacgatccccttgtagcgaacgcccttgtacttgccacaggcacaagcataatccttggtcggcccgaagatccgttcatcgaacagaccgtctttttctggcttcaaagtccggtagttgatggtttccggcttcttaacttccccgtaagaccagcttctgatcttgtttggtgaagccaaaccaatctgcatgctttcaaacttatttacgtcgatcaaagtttaacctcccaattactttgaagccttgtcgtcgtcagcagtttcagcttcatttgcatcagcatctgcttcagctgcgtcttcttccgcgctgccttctgcttcagcttccgcggcgatttcggcctcttcttcggccaacttcttcttttcttgcgcttccgcaaggcgagataaagcatcgatgtttacatgttcatttgagtcttcgtccatgtcgcgcagttcaacttcgttttcgtcgctgtccaaaacgcgcaggtccagacccaatgattgcagttccttgaccaaaacgcggaatgattcaggcacgcctggcttagtaattctttcgcccttgacgattgcttcgtaggccttgacacggccgacaacgtcgtcagacttgtaggtcaggatttcttgcagggtgtaggctgcaccgtaggcttccaaagcccagacttccatttcaccgaaacgctggccaccgaattgcgccttaccacccaaaggctgttgggtaacaagtgagtaaggcccgattgaccgcgcgtggatcttgtcgtcaaccatgtgagtcagcttcaggtagtacataaccccgactgaaacccggttgtggaatggttcaccggtccggccgtcgtaaaggacagtcttaccgtctgagtcaacgccggcttcgcggacaaagtcccaaacgtcgtcttcgctggccccgtcgaataccggagtagccacgtggatacccaaggcccgggctgcccggcccaagtggatttcaagcagctgcccgatgttcatacgtgatggcacacccattgggttcaagcagatgtcgactggagtaccgtctggcaggtaaggcatgtcttcaactggagcaaccagggcaaccgtacccttgttaccgtgacgaccggacatcttgtccccgacttgaatctttctcttctgtacgatgtaaacccggaccagggtgttaacgcctggtgccagttcgtcgccggcttcacgggtgaagacttgaacgtcttgaaccacaccgccaccgccgtgaggtaccttcaatgaagtatcacggacttcacgggccttttcaccaaagatggcgtgcagcagtctttcttcagcgctcagttcagtgatccccttaggggtaaccttgccgaccaggatatcgccgtcgtgaacttcggcaccgatccgaatgatcccgttttcgtccaggtccttcaaggcgtcttcaccaacgttagggatttcccgggtgatttcttccggccccagcttggtgtcacgggcttctgagtcgtagtcttcaatgtggattgaagtgtagacgtcttccttaaccaggcgttcgctcagcatgatggcgtcttcgaagttgtacatgttccaagtggtgaaggcgataaccgggttttgacccagggcaagttcgccgtcagccattgacggaccgttggcaattacctggccgtcaacaaccttgtcgccgcgcttgacgtttggcgtctggttgtagttcttagtcgcgtttgaccggcggtacttttcaagggtgtaagtgtccagtgtctggtcttcgcggcggacgcggatttcgtttgcatccacgtattcaacttcaccgtctgcttcagccagcaaggcgtcaccggagtcgtgacctgcccggtattccataccagtagccacaagcggaccgtgcgggttgatcaaaggaacagcctgacgttggtggttggcccccatcaaggcccggttggagtcgtcgttttccaggaatggaatacatgcggaagttacggaaacaacctgctttggaataacgtctatgtagtcgatccggtctggacttacttcgacgttgtcttcccggtgccggcaaaggatcacgtcatcaacgaaggagccgtcttcgttcaaaggagtattggccccggcgatgatgtagttgtcttcttcatcggcagtcaagtagtcgatcttgtcggtaaccttgtgggttgcccaggaaacgcgccggtatggggtttccaggaagccgtacttgttgatgatggcgtaagtggccatggagttgatcaaaccgatgttagggccttctggcgtttcgattgggcacagacggccgtagtgggtgtagtgaacgtcccggacttcgtagccggcccggtcacgggacagaccaccaggccccaaggcggacatacgccgcttgtgggtcaattcacccagcgggttgttttggtccatgaattgggaaagctgggatgaaccgaagaattccttgattgaaccaacgattggccggatgttgatcaattgctgcggagtaaccgtagccgcgtcttgaattgacatacgttcgcggacaacccgttccatccgggccaaaccgatccgcatctggttttgcagcaattcgccaacccggcggatgcgacggttacccaagtggtcgatgtcgtcgatgttgccgacgccttcttggagttccaggaagtagttgacagaagcgatgatgtcggctggagtgatgcacttaacgtcttcagcaatgtggccgttggagatcagcttgatttcccggtcaggaatttcacgggagaagaccttgatttcctgaacagttacaggttctgggattgcaccttcatcagatggggtgtaggtaacagtcttgaagtcgtcgcggtccaggtagtccttcagaacgtccatgacttcgttgttgacaaccgtccccttggcagccagaacttctccagtgtcagggtcagccagggtttcagccaaagtgtagcccaaaagccggttcttcaagctcagcttcttgttgaccttgtagcggccaacagcagccaggtcgtaacggcgtggatcaaagaagcgggaaaccaggaggctccgggatgagtcggtagtctttggttcacctggacgcaggcggtcgtagatgtccttcaaggcttctgctacccggctgtctgctgggttcttgtgaacatccttgtccaaagtcaggtccaaagtgtcgctgtcgccgaagatttccttgatttcgctgtcagagccaaagccaagggcccgtaccaggacagataaaggaagcttccgggtccggtcaacccggacgtaggaaatgttcttggcgtcagtttcgaattccagccaagccccgcggttagggatgacagtcgtgccgaagatttgccggccgttcttgtcgaattcgccactgtagtagacaccaggtgatctaaccagctgggaaacgataactctttccgccccgttaacgatgaaggagccggacttggtcatcagcggcaagtcgccgaagaagacgtcttgggtcttgatttcgccagtttcgtggttggtcagcttcagagtcacgtgcattggagcggagtaagtcgcgtcgtgcttgcgtgattcatcgacagtatacttaggttcttgcagcttgtagtcgacgtattccagagtcaggcggccagaagcgtcgctgattggcagaatgtcgtcgaaaacttccttaacgccttcgtcaaggaaccacttgtatgattcagtctgtacgtcggtcaagtttggcagcggcaggatttccttaatccgtgagaagctgcgtcttgtccggtgttgtccgtaatttactacgtgtccgtttagcaaggaaaacatcctttctatcctgttgaagaaagcaaatattacatttgtgttacattttaaaaaggccgggattttgggcataaaaaagacaaaaacgaaccagtcgtttttgtctgtatcattttactggacaatatatcagtaaaatcctgaacttcagccttttaaatcgcccaatattgtaccactaattttaaaggaaagcaagccctagcggccgctaaaaagcatggccgcctggctggccagaccaaccccggtgagctggtagccgccagccgtgatattccagaaaatctgcttgccttgcgggctgagctgggatttgatcgcgaccggctctaaagcgatccgcaagtcccgcatcaccttgcccaggtaaaccttctcttccagctgctgcttagcttcaagcagggcctcccgctcttctcttggcatttcgtcgtaaagagcgtcgatgatgtcgctgtaaagcaggatccgcccgtcagtcttcttgcttgcttcttgttctgccttagcagcttcagcttttttcttcttgccaaacataatctgcctccaaaaatctattgattatcccttgatcttttcaccggtcttggccttgacgatttcaaagcgcagcttgccgccccgggcaccgatcttgaccgtgtcgccggcctgcagcttttcgctgaccaggtcctgggccaattcgtcttcaacttcatcctggatagtccgccgcaatggccgggcccccatttccggattgtagccgtccttggccaattggtccaaggcagctggcgaaaggcgcaaagtaatgtctttttccgccagccgcttgaccagcttccgggtcaaaagcgtcacgatttcccgcagctgcttggcttccagcggcttgaagacgatcttttcgtcgatccggttcaaaaattccggccggaagaagtccttggtggccctggttaccttttctgcgatcagcttgccctggtcttcctggctggctgagaagcccacgtggctgccagcttccaggcttctggaaccaaggttggaagtcatgatgatgatcgtgtttctgaagtcgaccttccggcccagagaatcagtcatgaagccttcatccaggacccgtagcaagacgttgaaaatttccgggtttgccttttccacttcgtcaaaaagaaccactgagtaaggatgttcccggactttgttggagagctggcccccttcttcgtagccaacgtagccaggcgctgacccgatcagcttggaggaagattcccggtccatgtactctgacatgtcgactctgatgatgttgtcttctgagccaaaaactgcctcagccacagccttagccagttcagtcttgccgaccccggttgggcctaggaagaggaaggaaccgatcggccggttctcgtccttcaagccgcttctggaccggcggatggcattggccacggccttgacggcatcgtcttggccgatgactctttcatgcaggatcccctccaggcgggccaggcgcttattttcgctggtcttaagctgggttaccggaaccccggtccagatggagaccaccttggccacgtcttcagccccaacgactgaccgcttctcatccttgccggccagcttcttggcaatctcattccgcttttgccgcaaggcgatttcctggttgcgcagcttggccgcttgggcaaagttctgcttggctgcttcatcgttcttctgcttgagagtccggctgatttccaaatcgatttcagccaggtccttgtcttcgccagtgtcattagccaatttaaccgccgcgctggcttcatcgatcaagtcgatggccttgtccggctggtagcggtcggcaatgtagtggctggacaaatcaactgctgcctgcaaggcttcttctgacaaagctacccggtggtagtcttcatacttgtccttgatcccatgcaaaatttgcagggtttcctcttcatttggctcagccaggcggaccagctggaagcggcggacaaaggcagagtctttttccatgtgcttgcggtattcttcaaaagtcgtggccccgatcaattgaatgtccccgcgggccaatgccggcttcaaggtgttggaggcgctcatcgccccttccgcgtccccggccttgaccaaagagtggatttcgtcgacaaaaagaatgacattcttgctggcagtaacttccttgattaagcggtccatccgctcttcaaattcaccccggtagcgggtaccggccaccatgctgttgacatccagtgaaaccacccgcttgtcagccaggtcccggggaacctttttagcaacgatcgcgctggccaaagcttcagcgaccgcggtcttgccgaccccaggctcaccgaccaaaagggggttgttcttggtccgccgggacaggatctgaatcacccggtccagttcccgctggcggccgatcaccgggtcaatgtcgccttctttagcccgccggttcaagtcgatcccgaagcggtccaaaatcggcgtctgcgactggctgctgcctaccgcggctggccggctggtctggctgctttccccggtcacctggttggcgtcgtccagttcgtctttcaagttttccaggtccacgtccaggttgcgcaggatcatggctgacaggatctgctcactggagaccaaagcctggagaatgtcagtcgtttcgatttccttgctggaccggagttcagaattccgcttggcataatccagcgccaaagtcaggcggggagaaaattccatgtagctggtcggggccgctgagccgtagtccgtgtagcgctcgatttcttccctgactccggtcggcgtcacgttcatggtccgcaggatcttgccggctttgccgtcagcttcgattaccagggccaaaaggacgtgctctgtcccgaccaggcggtggtgaaactccttggcttgttcctgggcaatttccaagacctgtctgctgctcttactgtatgaattttgcatataaaaatcgcctcacactggacctagttgcctaaagctactgccgcgatctgctctaagtacttctggtccaaatcatcaaaattgtctaaattagtcgagtcaaagtcgtacacgccccaaaggctgccatcccggttaaaaaccggcacgacgatttctgaattggaggcactgtcgcaggctatgtggcctgggaagtcatggacattggccacgatctgcgtcttcttttccagggcggctttcccgcagacccccttacccagctggatgtgcacgcaggccggcatcccctggaagggtcccaggatcaattcccctttttcaaagcggtagaccccggcaaaattaacgtttttcatccccgccttcaaaagggccgaaacattgccggtattggcgatccagtcgctctccccggccgtcaaggccttggcctgctcaagcaataactcgtactctgcctgacttgctgctgccatgatttcctccttcacgtctgccaataaataggtaaaaaggcaaaaattgctatgcttgcaagcataacatttcccgatcttttcgacaagccaggcgccctgcagatctattataaggcaaaaagaaaaggcccgctaaattagcgagtctttgatgaagcggaagacgggattcgaacccgcgacccccaccatggcaaggtgatgttctaccactgaactacttccgcgatacatttattagtttaccaaaaaatttctcttttgcaagtcttttttgcccataaatgagaaaaaagcgccgctataaagtaacgctttgatcacacattggctaatcgggaatgcaggatttgaacctgtgacctctacgtcccgaacgtagcgctctaccaaactgagctaattcccgaagaagcggaagacgggattcgaacccgcgacccccaccatggcaaggtgatgttctaccactgaactacttccgcaacacatctattaggataatctaaaagccgggtcttggcaagggcttttttataaaaaatagtatttttctcaggggcaagttcgattaaactaagagtaagaaaacgtttgtctaaatgaaaggaagagaaaaaatgaaaaagaaaagactcctggcggcctgcctggccttggccctcctgcctctcctgtactcctgctccatgatcagcgactacaccctggacctcaagtccaagctggtcggcatcccctttaccgtctccacctatgactacgacgggcagaagatcgaccagatcaagggtaagtcagtccacattgagacctacaagccgatgagcaagaaaaattccagcggcgacgagcagtccaaagtcatcgacgtggaattcggcagccagcagatgatccatgtcggctccagtttgatcgccaacgaaggcctgcgcaattacgaagatactttttccaaaaaggtcaccattaccgacaagcagcggtccattccggttctgtcaataatgtacaacaatttcagaaacgactggctctccaagggcaaggtcatcatgatccggtcccaagccggcaagccgatcgccgtttatgccggtaacaaggtccgggtcagtgccactgacatgccatcaaccacccagatcaatgtcgacggccaccggctctttatctaccgctgcgactactccatttatgacatggagactatcaagaagatgtagacgcaaaaaacgtttcctcaagcaggaaacgttttttagcatgctttttagtattaaggagtatttttcaaaaattacagcttggccagggcctggtccaggtcggccaaaaggtcgtcgatattttccaccccaacggaaattctgatcaagtccggagtaatcccgacgctggccagttcttcgtcgttcagctgggcatgggtggttgaagctggctggatgatcaaggacttggcgtcagccacattggccaaaagagagaagagcttcaagttgtcaatcagctgcttgccggcttcttccccgcccttcaggccaaaggtaaagattgagccgacccccttcgggaagtcccgttcagccagggcatggtccgggctgtcggccaggcccgggtagcggacccaggcaacctttggatgcttgctaaggtattcagctactctttgcgcgttgtagacgtggcgttcaacccgcaaggacaagctttccaaaccctgcaaaagaaggaaggcgttgaaaggactgaggctggccccggtgtcgcgcagaactgttgcccggattttggtcgtgaaggccccagtccccagcttggcccaagtcacgtccttgtaggacgggtcagggttagtgaaagtcgggtagcggccggacttttcatagtcaaacttgccgctttccacgactaccccgcccatagtcgtcccgtggccgccgaagaacttggtcgctgagtggacaaccacgtcagccccatgttcaaatggccggtagaggtaaggggtagcaaaggtgttgtcgataatgaccaaaaccccgtgcttatgggccactgctgctaccgcgtcaatgtcgatcaagttggcattcgggttgccgatggtttcagcgtaaaccaccttggtatggtcgttgatttctttttcaaaattggccgggtcgcttgggtcaacgaagtgggtcttgatgcccaatggcggcaaggtctgggcaaacaggtcgtaggtcccgccgtaaatggtggaagcagctacgatttcgtcgcccgccccggctacgttcaagatagccgcggtgatcgctgccgccccagttgccaaagatacaccgccagtgccgccttccagggcagccacccggctttcaaaaacagccgtggttgggttggtcaaacggctgtagatgttgccggcgtcggtcaaggcaaagcggccagctgcctggtcagcgtcgtcaaagacataggacgtggtctggtagatcggcactgcccgggcgccagtttcgtcgattggctggccggcgtggacctgcaaagtttcaaatgacaaaccttcgttgctgatagcttctttactcatgttttttacctcgcttgtgttgttgctgtgtaatatttattttttagttgttagttgttggaaatgattagattgctgaaatattgctgttacaaacacaagtgacacatgtagctggccccaatcgctgctccccgccagaggatcagccagcgtttcgtctgttgataccgtttcctgcacatgaaccttacctcgtaaaaaaagccgcccaactaaccagtagttcaggcggcctttactatcttcaatacagtaacgatcttaggatggtgaaccacaggtattcgcttctacgctaaaaggcatgctggacatcagcatgttcattggcatgacttgcatttgacaattcttagctgcgaattccatcttggttctcccttcttcatcagttcttaatttagttttaagtatactagccttagggaaaatgtcaatccgttttttagaaaaaagggtaaacaaaaaccaggaaatcatggcagtgatttcctggttgatcgtcctattcaccaaatcaagccgctgaaagcactttccagctaaacttaatctgtatttaaagtatacgagctttttgtccaaagtcaatctcttttccggaaaaaatcaggaccgggccagcaaagcattgcccccgccctgctttttcacctcgtacatcaattggtcggccttttggtagagctgatcgacattaggcaagttgtttaggtagtgaatgaccccgcaggaaaaacgcagctggctgagccgctggccgtaattgtcgttgatttgcttgaagtagtctatgtcaaccaggacgatgaagaggtcagtgcactccggctgctcgattactttttgcgaaaggtccatgaaggtcgaccggagcatcaccccgctcaagcggtcaaaattagcctggacccggagctcgcgctggttctccttgtacttgttaaaaagcaggaaagaggcgatccgctctctttgcacgatatgaaaaaactaggcagccgggaaagacataaactggtggggcagcatggtcaaagcggcaaagaccaggttcaagactaaagccagagtccaggcccaggtctcttcccttttcagcaaatagttgattgccaataaagccagggcacttccagctgccaggccttctccctgccaaaacaaaagcaaagctgccgccagcaggccgccattcaagacagctaatgcccgcttccccggccgccagagaaggtaggcgctaagcccctctaagaggcagaggacggcaaaaatccccgcctttaagggctggccggccaaataagccggcaagccgctgctagcagccaaaaaggccccggccaaggcggagatagtggttaagatcgacaataagtatttgtagattggcaaaaattcaccgaatcataaaacttactaaatcttgataatcacatcaatattggtaagtttttctgatattcctttctagttaaatctatgagtagattcaacttggcaaaagaaatcagatttttaaccttttgaagttaaggtcagtgagtacggttggctgtcaaataacgccggatagcgtcatccaatagctttttatctgccccactgaaaacttttagcatggcagtcggaaaggcatcttgcccgcaaaaagccggcaagcatatcgtgatgcatctcgaagcagtcaagccgcgattttaataccccgaactgagttcgttaaagctgactgctcttacatgctagagccttcaact

SEQ ID NO: 2190 - DNA, 47697 bp, Unknown
  gut microbiota DNA sequence
ggccaagtagaatagcatggcggtgtggcggaattggcagacgcgtcagactcaaaatctggtgtccattacggacgtatcggttcgaccccgatcaccgctataatttagagtgactctgcggagccgctcttttttgctttcatttgcaggaaagtaatgaaaaaagctgccttttatcctctttttgccaaaaaggcttgcataaaggtgaaagtgtgctagcatagtaagcatattaggaagaacgatttaattagaaaggagcaaagtgcatgactcaagctagagtaaatacttgcaggcttggcggtgtcgttggtaaggcgagccgatatttgtcatgcttttgctcttaagcaaaattcttgaataatctgtaagcagcacggctgtaagatttttctgttcgcgccaatggcatcgttaactggaaactgttaattgtttatgcgaggtattggaattgaacaagggaaaatctttattggctggtgctgctgttttgttttctggggcacttttgacggcttgcgggcaaagcaagggggcaagtgagaagcaggtattgaactggatgacatcggcagaaatcatcactatggatccatcgaaggcgacggacgcgacttctttcacccagatggaaaacaaggcctgtatcaattagacaaggacaaccaggccaaggaagccctggcgactaaggctgcccaaagcaaggacggtctgacctggacttttgatttacggaaagacggcaagtggtccaacgggcaggcagttactgctaaagacttcgtctactcctggcagcggacagttaaccccaagaccgcgtctcaatacagctatatcttctccggcattaagaacgcggacgcgatcgtggcaggcaaaaaagccccgtccagcctgggcgtcaaagctcttggcaagtacaagctgcaggttaaattagaccacaagctgccttatttcaagctcttgctggccttcccggtctttttcccggaagaccaaactgcagttgaaaaatatggcagcaagttcggtacttcttctaagaccacggtcttcaatgggccctttgtccaaaaaggctggaccggagccaacatgtcctggaagatggtcaagaacaagaactactggaacaaatcagccgtcaaactggcccagattaatttcatggttgaaaagtcaccgtcaacggcctacaacctttaccaggacggcaagctggatacggcaattttgagcgcccaggcagccaagaaactgcaaaagcaggccggctacgtgatcagaaagaacaacggcacgacttacatgcagttcaacaccaagctggctaaatttaagagcactaagctccgtcaagcagtttccatggctttggaccggaaggccctggccaagaccctgggcggtggctttaccggcgcgacgacctttaccgcggctgatatgaccaaggtggacgggcaggactttacccagctggcccaggacaagacgaccaagcaaattaccagctaccacaagacattggctcagaagacctttaaggaggccctcaaggacttgcagctgaagaaattatcctttactttgctgacggctgatgacgacagctcaaaggcgattggtgaatacatccagagtgccttggaaacggcttttggcaagcaagtctccgtcaaggtgcagagcctgccgaccaagtcccagtttgccaagatggacagcggcaattttgaagcctgcgtcagcggctggaatgctgacttcgctgatccgatttcattcctggactgcatgacctcaactaacggctacaactccggtaagtggtcaaacaagcagtatgaccagctgatcgccaaatccaagaccgttacttcatctagccagcggatgcagcttttggccaaggcagaaaacatcttgatgaccgaccagggggtaacgccgctggttcagtccggcagtgcctggatgctgaacacaaaggtcaagggcttgatctacaacggcagctactacttcgaatatgcctacttacagtaaaagaacaagtagaacgattgtcaaaagggctcgcttttgctaaactgaaggcagatttaagagctttttgcaaagaggggggagcaaaaaatgaaggactcaaattcttttgtctacaatgtctggctgatcattctgctggttgctgcctacatttggccaatcttcggtctggtgccggcaatttacctttttatcaagcgtaaagatgaacagttagagaagatgcaaggctggattgctctggccttgatctggcaggtcgtgctctggctcctaatgatcattttcttaatctgctttgtagctcttgctggctcggctggcaagtaaaaattgacaaactaaaaccgctagccctgtgactagcggttttcttctgcctataaataaggtgccattttttgtaaagttcgtctaaaggaacgggcggactgaagagggagccctgggccaggttgcagccggcttctttaaggaaaatagccgctgccaaagtcatccatccagacctggtagcccaggtcatggaagtgctggacggcttcgaccatggcctggctgctgtcatcaagggcactttccgtaatctcaatatgaacttgatcgcggctgagcccgtagcgggcgacggtgtcttcgatcttttggtaaatatcgcaggcttccaggtctgttctggaaatgttaaagctgatggggaagatttcttttttcttttcccgtaaaaattcagcgtcttgcccatagctatctaaaacgtggcagtcaaccttgtagacttcccggttgccctccagggcagggataaacttgtctggagacaggaagccgtatctagggtcaatccagcgcgaaagggcctcacattcagcaagcttcatgttttggatgtcgatcaaaggctggtagtagatcttgaaccagttgtcgcggcaggcttggtcgatctggctcagaacatggacctggatttcatccgccttggccagctggtcatcatagtagccgatagaggcatttttcagcttgattgagttaagggcacgtcgagtccatgcatcagctcagtattgcgctggcggcgcaaaatatgccggctgggcttaaagggagctaagccagccttgaagagtaaagtttcaccagtgctgcgggccgcaactgttttaagagattgctgccgtcctggtagccgttagttaagttgtagtcatgcaggttgactagggagctgtaaaaaatacttaaattttggcttttgccgaactgcttgaggctctcttcataatgctccatgaaatagtggaggcttttggccccagtcagctgatcatcatatttcttcaagtagctttcatagcggttaacgctgaagatattgaatttcatgaagaaaatgtacatgatgcgggaaataatagctaaaaagctgaccacgtaggcgattggcgttgggaccgccgaattgttgccatcaaggaacatgcggggaaattctgcctgggctacgaccaggatcatgcagagtatggtggaccagaataagcggctgccttccgtgatgacggtctgctcctggctgatgtagcggattccttttttaaaaataaagtagagacagagggttaagataatggtgaaaaagtcccattgccaggtttgattggccaagagggatgaaatttcagcggcgatgacaaattgacagtaagtgaaggcggctacggacggcttcttgttaattaggcgctgataaaggaaaacgactgggatcagggtcaagaggatcaatccagttgccagaaaaaaggcgcttaaggcattaaggctgaccagggggcttagcttctggtaaaggaagacggtcatgatcatggatgtgcttaaagagagcaggaaggctcccaggcttttgccaatccgttttgggatgctttcctctaaaaaaataactgatcagtaattaacgcgataaagaatacctgcaggagaaaagtgtggttgcgggcataaaaggttgtaaactaggttatcatgtgtccttcctcgatataatctcgttattaacagaactgcttatatatagaattaagcatatatttctgtccaaagcggatgttaacttggcattttccggtaaggtaaaattaacgtaaagaagactgaacaaagagtgaaagcgttatattttacaaaagcaaaaaacagataaattaagcaaaataaactgaaaaagcaaaggggagccttgcgaaaactttgtaattctgttaagaaagcggcttgtcttaaacaaaattaagcattttacattgatttaacaattatcactgaatgcatttaacttgcctccattaagattgaatcagtaagaattcaaggaggaattaacatgtcacgcaaaaaaactaaagtcgccatcgttgcgcttgttttgctggcaatcgtcatcggctgcgtcgttggcagctccgaagccgataccaagggagtttccgggacagttaacatcgccgggtcatctgcccttctgcctttagcgcagaacgcggccaagactttcatggacaagaacccggacagtgtcatcaacactaacgggggtgggtcaggccaaggcctgcagcaggtttctgacggcaccatcgacatcggggactcagacttgctcgcggatgaaaagctggacaagaagtcagccaacaagctggttgaccaccaagtggccattaccgccatcgccccgatcatcaacaaggatgccggggttaagagcctgaccactgaacaattgatcaaagttttcaccggcaaggtgaccaactggaagcaggttggcggcaatgactgccagatcgtcctggtttccagaccatcttcatcaggtacccgggtaacttttgagcaatacgctttgaagaagcacgctagccagtcaaaccagtctctggaaactgacgactcaggtactttgatccaaatgatccaaagtgtttccggctcaatcggctacgttgccctgtcctacttgactggtgacccgcaagtcggcatcgtgtcaatcaacggtgttaagccaagcctgaagaatgtctacaatggcaagtatacggtttggagctatgagcacatgtacactaaaggccagccaaagggtgcggccaaggcattcttgcagcagatgctcagcgaggaatatggcaagaagatcgaagccatgggctacggcatagcctccaagctgacggctgccgctaaagccacccatactaagtaagaaggagaaataaggcattatggacaaagtagttcaaaaagcaattgccaaagacaagcgctggcgcgcggtctacatcgcctgcggcctcttgatcgttgctttgacccttttgatgggggccttcctgctctaccaaggcagccagaccttccttaaggcgcaccacagcgtttgggagttcctgtttaccagtgactgggcaccgcttgacaagaccggcatgtttgggggaaaagtcggggctgccatttacatcgttggttccctggaaacctgtttgctgggtttgctcatctgcctgccgttcgcgatcggctcagccgttttcatgacggaaatttcaccaaaaatcggtgaaaagttcttccggccggcaaccgaaatctacgtcagcatcccatccgttgtttacggctggtttggcttgaccaagctggttcctataatcagaaacgccttccacccaaagatgggcggtttctcagtcctggccgcctcaatcgttctggccatcatgattttcccaacgatcactactgtcgccgccgacgccatcaagtcagtcccgaatagctacagagaaggggcttacggtttaggggcgacccgctggcaagttatcggcaaggttgttttgccagccgcttccggcggtatcttgaccggggtggtcttgggtctggcccgggccatcggtgaagctttagccgtagccatggttatcggtaagacccggtccttcgcgaccagtctcttgtcaccaaccagcaacttgaccagtgcaattgccgctgacatgggtaacacggcccagggcggggaatacaatctggctttgtggtcaatggccctcttactcttcatcatctcaatcgttttgatcgtcttgattcacaagcttggcaatagaaagaaggaaaaataaatatgagccgtgctaaaagaaaagaccggctgatgacgggaatcttctacgccatcggctggattatgctggccttcctgctctacttaacgctgaccatcatctttgacggcttgaaaggcttccagtgggacttcttgggagcagccggcaacgggattttcaaccagtttttcaacactatatacttagttttcctctcactgctggtctcagtgccaatcggcatcggggccggggtttacctggctgaatacgctaaggaaggcaagttcctgacaatctttgaaatcagtatcgaatccttgtcatccctgccatctatcgttatcggcttgtttggctacttggccttcatcatgtggaccgggatgtcctggaatatcctggccggtgccttgacgatttcaattctttcaattcctctgatcactactgaaaccaacaacgccatccgggccttgccggtggaatacaaggaaggttccctgggcctgggcgcgaccaagtcagaaaccatccgcaaggtcttgattccggcggccatgccgcagatcttgaccggggtaatcatggctgccgggcgcggtttcggtgaagccgctgcgcttttgtatacttccggccagtcaacttacatcaactggcagaacttctggaaggttacctcaccaacttcaccgctgaacccgttccgaagcggtgaaaccctgtccctgcacatctgggtcatgagaactgaaggggccttgaacccgtcagccactcagatcgccaactttacttcagcagtcctggtcgttttggccctgctcttcactttggttacgcgccgtatctctgacagaatgcgcaagcgcaataacggaggaaattaatgatggaagacaaaattacaattgaaaagctgaacctgtactacagtgattttcatgccttgcatgacatcaatatgcacatccaaaagaacgaaatcactgccttcatcggcccgtcaggctgcgggaaatcaactcttttgcggtcacttaacagaatgaacgacctggttgaaggctgccggattgatggctcgatcaagctggacggcactgacatctataacggtgacctggatgtgaccgtcctgcggcaaagagtcggcatggtctttcaaagaccaaacccgttcccgatgagcgtttacgacaatgttgcctacggcccgcggattcacgggattactgacaagaaggaactggacgaaatcgtggaaacttccctcaagcaggcagctatctgggacgacttgaaggaccggctgaagaaatcagccctgggcctgtccggcggtcagcagcaaaggctctgcatcgcccgggccctgtctgtcaagccggaagtattgttgatggacgaaccgaccagtgccctggacccgatttcaacctctaaaattgaagaattagctttggaactgaagaagaactatacgatcgtcatcgttacgcacaacatgcagcaagccgtgcggatctctgacaagactggcttcttcctcttgggtgacctggttgaattcggtgaaactgaccagctcttctccatgccgaaggatgaaagaactgaaaaatacatcaccggccggttcggttaaggctagaggaggccaaaaatgagaacaagatttgacaaggaactggatcacttgcatgaagcaatggaagaaattggccagctatgcaaggaaagcatttctgaatcaaccgacaccctgtttacgggcaactaccatgaagcagaggacacgattaacctgcaccaccggattcacaaggcagagcgtgacattgaagaaacctgcctgcgccttttgatggagcagcagccggttgccactgacctccggataatcagtgcatctttgaaggcggtctacgaccttgaaagaatcggtgaaattggcgcagacattgccgacctggtccttaacgaacacctcacagtcgcaaatgacatgctgaacttgaagagcatgtcccaaattgctacgggcatggtcaacgacgcggtaacggctttggccaaccagaatgtagaactggccaaggccgtaatcgaccgcgatgaccaggtcgacgaaggctttgacaaagcgaaggcatttttgatcgataactttaacaaggatggtaatccggaatatttgatcaatttgatgatggtcgcgaagtactttgaaaaaattggcgatcacgccgtcaatattgctaaatggtccttatttgtaactaccggcaagactggcagataagtccatgaaattccccttaccactcttgtgcatgattatggtcgtaaactataattaagtttaagaaaggttaaggggattttttatgactgaaatttggtgcgtggaagacgacgaaagcatccgcgaaatcgaaatgtacacgctggaatcaatgaacttcaaggtccgcggctttgacgacggacaatcttttttcaaggccctggacaatagccggccggatttagtgattttggacttgatgctgcctgatgaagacggcagcaaaattctccaccggctcaggtctacttccgcgaccgaggacttgccggtgattatcgccagtgcaaaggcggcagaatatgacaaggtcaagaacctggattccggggcggatgactacttaaccaagccatttggaatgatggaaatggtttcccgggtcaaggctgttttgcgccggaccaaccgtaagaaggaggacaagatcgaaaaagacgggatcaagattctcttgaagcggcatgaagttttcgagaacggccatcaggtcgatttgactttgaaagaatacggactcctgaagctcttgattactcatccgggaactgtcttttcccgggaagaaatcatggatcagatctgggagactggtttttacggggaaacgcgcacagtagacgttcacgtgagaaccttgagacagaagttgggtgaggctggtaagcatatcgaaacggtgcgcggggtcggttatcgttaccatgaagcagactaatgtttaagaagatatttcgggcaagttttttactgacttctctggttctcttctttgcggtactcttaagcgcgattgtcttgagcattgacttcgaccatacagaaatgtccgccctggcttcccaggctgacctggcagccagcggggtaaataccagcggcaagaagtacatcaagaacttaaaaggggagaactaccggattacttggatcaattccaagggcaaggttctctacgacaatgaagagaatcccaaaaagatgggcaaccactcccgccgcgaggaagtcgccgaagccatgaaaaaggggacagggaccagcgagcgctacagcacgaccttgtcgaccgtaaccatgtattatgccgagcggctcaatgacggcggggtcatccgcatcgcgatcaccagaaactccttctggcggattctggtcagatttttgtcgccgcttttgttaatcatgcttttatcggtcctggtgtcctggttcctagccaagacaatctcgcaaacgatcgtcaagccgctgaatgaaatggacctggacaaacccctggaaagcaatgcctatgacgaaatcaagccgcttttgaccagactggacagccagaacaagcagatcgctgaccagatggagcagctccaccaccgggaaaaagaattaaagacggtgacagatgccatgctggaaggcttgatcttgattgaccttgatgaccagatcctcttgtccaacccggcggttgtctcccttttgggcttgcatgatactgaccccttgccagatgatgttaaggaaatcatcgataagaacagccgcttggcccatgctgaggggattgtggaaagaaacggccgcaatattcaaatcagtgccagcccgattaccagccgcaagattctgaaggggacttcgatcctggtggttgacgtgacggaagaataccatgaagagcaggtccggcgggaattcacggccaatgtgtcgcatgaacttaagacgcccctgcagtccatcatggggtcagctgaacttttggaaaaccacctggttaaagaagaggaccgggacagcttttacaagaagatccacgaatcttctgcccagcttttgaccttgattgacgacatcatccgtttgtcccacctggatgaaaatcaacgctttgaagaaatcaagctgaacttgaagagtccggtgactgaggccctggaagccctgcagagttcggctgaccggcatggaatcaagctggagactaatttgtcagacactatgatcctggccaacttccgcctggtttacgaaattgcctacaacttgattgataacagcatccgctacaacaaggaaaagggcaagactaagattacggtcaaagagcaccggggccaggcgatcctgcaggtggcggatactggcatcgggattccccaggaagcccagaaccggatttttgaacgcttctaccgggtggataagagccacagccgcaagaccggggggactggcctgggcctgtccattgtcaagcatgctgttcagcagtgtcacgggaccatccgcctggaaagcgaattaggcaaggggtcaaccttcacggttattttcccgaccctgccagcaggagcagatgataatagcaaataaagtaaaaatgacaaatgaaaaccagttcactttaaacggtgaactggttttgctgtatattggctaatttctgttattgcactagttgtcgaagtggaattgcaggtccttttgcagcttgtagctggtcagttccttgccatccaggtcagtcttgtgcatgtcaacggcgtgaacttccgggttgccgtaggtggtgtagtagtagatccccttttcctggttcatgcaggatgagtagatggtgtactcgtattcacccggggtaacttcacacagtcccttgacttgttcaactgagcccaggatcttgaagaactggttgactgagctggcttcatccttgtcgcagaggctgttgtacttggtgaagacgcagcggacgaagcgggacttgctggacaggtcgcctggcaggcctaagctgctcataccgcgggagtattcagtcaattcaacgccgtcagcaaacttgtggtccaagcggtgggctgacagggcgtagtagtcgttcaaggcaaacttcatgattgggaatggcgggttgttggtcatgacgccgactgggttgtcgtaaacgtgcaggccgtcttccattgattcaaccacgatgctggagtccttgtcggcgatgatccagtgcagggtgctggttgggaagtcctttgaaaagtcttcagctgagatgctgatcttcttcaaggcttccttggcttcagccacgctcttgcaagttcccaggatgtatgggataaattcaaaggaagcgatgttgtccttgccttcctggtccgggaagtagtgggcattgcccgggaagttcaagccggccatacccaggcccttttcattaacggcatcatagtaaagcggatagtcgccgacaaccgttgccatcccgatgatggcgtagtggctgtttaagtccggcactttccgcattgggaaaacatagtttcttggagtgatagtgactgtttcattgtaagaaaagtccaggtccaaattacggccaaagtagtggtcgttagttgcaaaagtaatagctgtacacatgatttaaatacttcctgttaaggtcattgtagaacttttccggaaaaaggtaagcaaaatcacctaaattttagtagagaaaaatataataaaacaaatagaaaataaaataagaaactttagagtaagaatattagcaaaacttttagtaaaaaaggcttgcttcttctttgcacattatgctagtatacaaggcaaataattacgcgaaaaggaggcgaaagcggtgcgtctgtaatcttgcatttttcataggcaaccatcatgattcaagtagctttatttgctgcgcggtcaagggggttactatgcacttttgcaagattgacgctgcttttgccgcggagagtctgtccattgcaggggtgcagactctcttttttcttttcgaggtataaattatgacagcaattcagattacgcacctttcctacacttaccccagccaggcagaagcaatctttaccgacctctctttggacctggattccagctggaaactggccctggtgggcagaaacggccgggggaaaacaacctttctctccgccttttggccgggcaattgggcacccagcgggcagtcaagtctcctttaacctttacctactatccccgctttttgccaaaagatgagccagcttactttagtttaatggatgaggcggcttttgagctctggcgcctggaaaaagaaatgaaccggttgaacttgagtccggacttgctctaccagccctttggccagctcagcgggggagagcagagcaagctgctcttggccctggccttcagctaagatggcgtttttcctttgctggatgaaccgaccaaccacctagacggcgccagccgccaggaggtagctgattatctgaaaaaatccaagtccggctatatcgtggtcagccacgaccggacatttttagcagaagtcagcgatcatgtcctggccttggagaacggggaaatccacctttaccgggataattttgccggctaccaggccactaaggaccagcgcgaccagactaatctggaccgggacaagcagctgcgccgggagatcaagagcctggaaaagagccaaaagcagctggcggccatgcccagaaggcagagagcagcctccacgccaaagggaaaatgaagcctgaccgcaaggcagagctcttggacaagggctttttgagcaagcgggcggccaaagtggtgaagcgggctaaaaatgtggcccgccggcaggaaaaagaagaggcagccaagcagggccttttgtccaatattgaagaagccccggccctggacttgaactttaaggccgactatcaccagaccctctttactggccgcgatcttagcctggagattgccggccggaccttgtttcaagggtagcaatcgctagccgcgggattgtggctttgaccgggccaaacggtagcggcaagagcagttttttggcctggctcttgggtaataaagattttacctgccagggagactgggacttgcagactgggataaaaatcagctacctgccccaagatttgtcaagttaccatggctatctgccagcttttgccaaagagcatgacctggactacgagcactttttgaatcagctgaaaaaattaggcctggagcgggaggcctttaagcaaaagattgaggagatgagccaggggcaaaagaagcgggtagccctggccaagtctctgactgaagaagccagcctctacctttgggatgaaccggccaactacctggatcttttcaaccaggaccagctgatcaagctgctggcaaaagagcagccggccatgcttttagttgatcacgaccaggccttcatcgaagccgtcgccaaagaaagagtcaacttgcggctggtcttataatttgcaaaagcgaccgtcttgccctaaaatttacataaaattaatgatagccttttacttgattttacttctttagcttattctaataactaaaggggggcggaaaaggatggcacggtacgtcttttgcaagccggataggcccaaattgacctactggagcattattgcttttattgtgctggggatcgtcgccacggcatacttaggcttgacggcatagcttacttattgataaacccttcttaaaaaaatacaactgcgctaaaaagccacggcattttctgccgcggcttttgtcttgtaatatctatgtaacatccgcttgctacaattatttccagaggtcactgacaaagtagcacagggctgcccaggcaaccaggggcaggtagtggccatagtcgtctctgccttccttgagcaggcggcgggcctcttccttgtcaactaatttgaagtcgccaaaaacttcggtgccttcagctcctttgtggttaagggcggacaagtcatcaacgtggatgacggctttgacaatggcgttgctttcgtcgctgaagccggaagccgtgaagaccagggggttgatgacttcaaccgtgtccttttcgccgatgctgagtccggtttcttccttgatttcacggatcatagctgttttgattggatccgggctggccaggtcagccgggtcaatcaagcctgccggtaggccgagcaggtagctgccagccgggtaccggtactcgtaaaagagcaggagcttgtctttctgaccggctttcttaacgatgatgaccgcgcagacggcatcaggcagggcgcttcccagctctggatcctgcttgaaggcaaagagctggtctttgtcccgccttgaagcatcatagtagtggaccccgttttcataagccagatcgtagagtttgacatatttggtagcggccagggttttgctctggtcaggtaaaattttaggttcttgcatttagtgtcagtcctccttgtatcatctttattgtacgataagaatggagcagtcatgaggaaaatcagcaaatttttgagtattgtggtcctgggcctgttagtcgggggatgcagccaggggcaaaaggccaagcagactaagacgaaaactgagaccaagaccagccagaaggcaagcggggatttggcaaaactcagccagggccgggatttgtttgcctggacggtctactgggacgtggacaagccctagcagaccattcaaaaggaaagtcagaacatcgatgccgtcggaaccttcgctgctttttacgatgaaaacaagaactacgaacttttttagcagatggcagcaagaagctggacaaggaaatgcggactacagccaaaaccagcaagatcaagcgttacatgactgtggtcaacgacacccggacggcagacaagagcaccgaccttttggagaccctcctggccagcgggaaaaaggttggcatcagcatttggcggatggaataaaggcaaatagcaaagaaaaaactagctgaaaaatcagctagtttttttcttttttctttcttttctttttcccgtctataatttttgcaggtattcccgcaaaagctttaatccgcccactggggtgcagaagtccgggtctttggcctgggccttctcccagacctcatcaaggtcaaaccaggcaacggctgaaacttcttcttcctgcaggactaatttattttcgtctacgggcttagagtagacatgcacaaaggagacctcccggtttttgaattctgcctggtggaagaccttgtcgtagcagttgtggaaggtgccgataaaggtaaagtcagcggcctggctcttgatgcccagttcttcttccagctctctgatgatggttgccaggggctcatctccggcagcgatgtggccggcagaagaggtgtcaaagcaacctgggtaggagtccttattggcggaccttttctgcaggaggacttgccatttgccggctttttgccggatgatccaaactgaggcgcagcggtgccaggccccaatccggtgggcttcattccgctcaatggtctgcccggtaggccggccctctttatccacaatatcaagaatttccataatttacctcgaattttcaacgcttttagggcgattttaccagcaaaaagtctttttgtcatggccccgtgaaactaaaacgccattttaaccggttacaaggcaaaggggcgtaatcccttaataacaagctttttctcttaaaagatggtcaaaaagcatttgtgcaccaaggctattaaatacagaaaattaacgacaaagctagatataccaagcaattaaagagccttaaaaaagaaagatgaaaaaatcgcgacaacgtgaaacggtaaaagtggaaaaaggcaaatattgaccaaaaagagcaaggcaaaaggaagttcctttaccttgcttctttaaggagcgataaatgtgtttagtagaccaggaggccgattcccaggaagatcaggcagatcacgaactggatgaccagttgcttccatataaacttaaaccagcggtcaaagccgatattgaccatagccagggacatcaagatcaggccaactggggcgatcaaggcgatgtagccctgcccccagttataggcatcgatcacgctggcccggtcgacgccgacgatattggccagcggcgccatgatcggcatggacaggacggccagaccagatgatgactggatgaagaagccgaggacgatgtagatcaagaagaggacccagacgaaagccagcttgttcatgccggtgatctgcttgctgaagaagtacatgatcgtgtcgctggtgtggctttcatccatcacgatggagaccgcccgggccaggccgaccgtcaaggcaacccctaaaaggtcagccgcgccgctgacaaagctttccatgaagcggtgttcacttaagccggaaaccaggaagagaaggtaggaaacggccaggaagacaaccgcgatttccgtgaagtaccagccccggttctggacaccccagatcatgactaaaaagccagccacgaaggtgagcagagtcagtttttgccgccaggtgaagtcgcccttgtcagcttgtgagtcaaaagcaagaaacttcttcttgctttcttcatattggtcgtagactagggacttgcttgggttcttgcggactttttcagcatagatgatggtgtagagcatcccggcccccagggaaaccaggagcatgatgattctcaaaggcagggcccgggcgaagttgaccccggccgtgtttgaagcaataaccgttgagaaggggttgatggttgaacccaaagtccctaaagtggtgcccaggaagatggtggcgaccacggtcatcgtgtcatagccggcctccaagaagaccgggatcagcatcgggtagaaggccatggtttcttcggccaggccaaaagtagtcccgcccagggcaattaggcccatgacgatgacgatcaagaggatttgcttgcccttaatatgttcagacagggcctgcatccccgagttgatggccccattggcgtagacaaccccgatgatcccaccaaggatcaagataaaggtgataatgtcgattgaatcggcaatcccttgcacctgggaagtcaaaaactggacgacagcttcccggaaattaggcttcttgacattgactctctggtaggaatccggaatagccacaggtttatagatggtgccgtcgattaatttcttggcatcgattttgactttatagcggtcgagggtcttctgcgttgctggttcgtgcttgaccttgccggacggcatggtaatggcaaaatccttggccgactggtcataagagaccgtggcatagttgccggccgggatgaaaaaggttaaaagctggacgagcaccaaaacgatgatgatgaccgaataagcggtcggaaattcatgcttgcgtttctttttcttgctcccactgcgatgaaaaagcatcaaaatcatcctccttgcttgcttttgcattccttacacattaattgtaagaaagctgggatgattttgcaagcgctttcttttaaaaccaagctagcttttacctgcctttaagaggatttttaggtaaaaaatccgctaaagtaaactaaaggttatagtaccgggcttagtagcgaggcaggaagatgagagcgagatgaagcgcatacaaaatatttacgatatttttgccaagggaccggtttattttaacgaaaggacctctggcttaagccccagcagctggctgagctgccaggtcttggccggcaaaagacccaggcggtccaaaagctcctggtcactaaagagctggtgaaccgggccgtggtagaccagctgaccctggctcatggcataaacctcctggcaattttcggccagccagtccatgtcgtgggtgatcatgatcacggtcttgccctgggccagccgtttttcaagcaggcgggtgaccaggcagcggccaggataatccaggctcatcaagggctcgtccagcaggcagacctccgggtcaaggactaaggcggaggcgatagtcaataatttctttccggaaagagacaggtcgtaagggtttaagtcccggaattctgccaggccgaattctttaagggcggcttccgttcttctggcgatttcgtcttccggcagtttagcctgcttcatggaccaggccagttctttttccacgctggagttaaaaagttggtcattgggatcctgaaaggcataggcgatcttgctcaagcggccggaggccagatattcagacaaagcctgtccgtctgctttaatggcatccccagctggcaggaggtcagccaaaagtttcaagagagtggatttgccggacccgttttgtccgaccaggcagatcaagccgggagaaagagtcaagtccgggatgtccagggaaaaattcgtttccgagtatttataatgaaggcttttaatcttaatttgcattttcggcagcttcctttagttcacgggcattgaccgggtaacagccatcgagtttaagctccagctttttggccattttccaggcagcaggcttgtcgaaagccgggtcatccagctggttgaagaccgtttgcggagagtccgccatcaagaggcagccgtcttttatgacccagatttggtcgcagagggcagctaagtcatccagttcattggagatgagcaagaatggacaggaaagcttttccagccagctgaaaaagtgctggcggcccaagggatccatttggctggtcgggtcgtcgagcaaaagcaggtcgggctcagtgaccatggcagtggcaatggctacccgctgggtctggccgccagacagctggtttggcgactggtccagcaaattagtcaagtccagctggtcagttgcccgcttaactgcactttctatttcctcatcgcttttgccctggttgagcagggaaaaggctaattcatcataaacggtgtcggctaaaccagatagctgactggccgggtcttgcaaaaggagggcaatttcatgctggcttcgccaagcttctagctcttctccgttgatccggactgaaccgaaaaacttggcgggaatcatttttcctacaattccggctaaaagggccaaaaggctgcttttgccggcatggctgggcccgataatgccgatccgcttaccacggctttgggcagaaatattttctaaagccagattttcgaagcccaggtagcggaggctgagctggctgatggtcagttgaaaattgttagacatgcttttactcctaaaaggaccaggcagctggcaatgagcaggcggtggcagaatttgtctttccagtagtcatttgtcaagctggccgcccgccgcttagggttggcatagccccgcagctgcagggcgatcgaccggttcatggcctgctggaagctcttgacgatcaagggcaaaaggacgggaaagagatttttgatccgggagagcagggacttggccggcgcgatcccccgggccttctgggccagctggatcttgcgcaggttttcctgcatttgcggcaggatatagcagactgacatgaggacgtagacctgctggtaggacaaaccggaattttccaggtagcgggcattctctgaaatggtggttgtctggatgaaaaagctgctggaaaaaataatggtcaaaatccggcaggctaagagagccacgtggtccagtccttcctggtaaaaggtcaaagaggcaacggaaaaggcggcggtatggttgcccggccaaaagagcccctggatcaagagcatggtcaggatgaggaagaggctgaaggcacacattccccaaagggcatggagatttttggtcaaaagggccaggataaagctggcagcgaggatgatcagcgcactgggcagattgccggcggcgaaagcagcgagcgtaaagagcaggatcaagagcagcttgctgatggggtcaatggctgcctgccaggcgggcagggccaggtcttccgcgttatttctcatttttcagtccccttgaaaaagtagactaggcgctttggcagctgcttgtagatcaaaaaggccaggtaggcgacgaccgtcttgtccaaaaggtcaagaacaaattcatcaaggaatgaagcaatccagatgttcacgtgcttggcaaccagggaggcaaagagggcatccccccaagcgatcccggtctgtccgctccagaaaatgacgttgagcggggtggagatcacggcggaaaccagggcaatcaaaatagctgctggcaagacggtaaccggccgcttgaaaaagccccgctggttcagccaggcaactgccaggccgatcccgatgctggtcaaagcgtaaatggtggaaacgggtgacagggtcaaaccgtagatgacattgttgataaagccgctgatagccccggcgacaggaccagccagcatgctggccaggaaagtcccaagtgaccccagccagaccggcaatttcaacccttcagcaaaggccttggcaacataattgatcccgacgacggccggaattagggtcatggcgtgggcggaaagcttgaaggaccagaagctggccttgtttttagaactgatttctttagaatccattttgcaacctcgtgaaaaatataaacaaaaagaaaatgacataaaaacaggcgatcgtcgaaccaaatcataaaagtaaaggtaacctatacttttatgaaaatgatttactgtaagcttaccaccagactaaagcctgggcaagagcttttttcgaagaagttaatgaaagccttttaattgtgacttgcagcaaatataatataaacaagaaataataaccgataaattatattccgcgcttcttttttactggttaccggagcaggtctctcccggtctttgatcaagattgaaattacggagagggacctgtcaaacaacactagccgcttgaaagagcagatcgatcagctgcgctcctacggctttgaagttcggatggatgacttcggcagcggctattcctctctcaacgccttaaacgactatagctttgacctggtcaaaatcgacatggtctttgtccgccacctggatgacggacagttaaaccggcttttgattccggaaatcgccaaagttgcccataaattgggtttgaaagtactggcttaaggggtcgaaacggaagagcagagagacttcctgcgagaagcaggctgcgacctgctgcaaggctttttgttcagcaagccggttgaattggatgaaaatcagcaggttatttcctaaacagggttggaatgtaaagtttaatgtgatgtgatagtgatgaaagagaaaggaaataaaaaaactgttcatggcctcagctggcaatttgccgatgaaaaagaagcagtttacgctgactacctggcttcagaggcgtttgccagggaagtagccagcaataatttaaccatgggaattgccgtttccagtttgatcgcggtcattagctttttaggcatatttgacctcaattcagattatgcaaatatctcgatgcttccagtaattgccagtgaatgggtctatcttttcctgctattagccaacctgcccaagctgtttttgcccctttggctgcaaaaacacccgcaggctgccgagcttgaaatccggatctgctttgccaacctggcggtcaatgccatcttgtctggttttaccttgtacactacccaggaggggagcagctacttttttgaactggtcttgatgatgatggtcatctgcgtctttccctactataaagccgggcatggcttatctttagtggctttgagcctgcttatgatctcagcaatcattcttgtcaaccatgtccaggttgcctggcaggatgcctatgacctcttcctcttttacgttatcggacaggtctgtattgtcctgcgccggtactggtttaggcagagctcttggtacaattacatcctgcaccaggccaacgggacgctttttgtcagcagccggaccgatgaattgaccggcctgtataaccgcctggccttgcgggaagacttccccaactacagcaagcaggaggttggcgtggccatgattgatttagacgacttcaagcgctttaatgacaattacggccatgcatatggggacctggtcttgactagactgggccggtatttgcaaaaggactggatgaatgagcatttgcgctgctaccgctatggcggggatgaaatcttgattattgcttatggcttagaagatggtgattttgttaaaaaattgcagatttttcaagctgaatatgctaaactaaaccagcaattagaagagccagccaccttgagtatcggctatgctaccggcgcggttgccgatgaagaagagctgcggaaaatgattcagctggctgataattatctttaccaagctaaaagacagggcaagaaccaagttgttggcgcagagaagaaatgaggcattatgtacagctacatcctgaaagaacaaatcaagatctaccgctacttgacggttgacgcggtcaacgccgctttggcggacttgcggcaaaaaggcatcagcctggaactggagagcacggtcgggacggcaggcaacttcgtgacccaaaacgacggggtggtggacctggactaccagttaaagctggtcaaggcggccgaagaagatccggcggcccttctggctaaaatcagcgccggcttaactgccggtctggccagcaagttcgaaggcggccgggaaaacagccaggctttaaccttcctgcaccgggctaagaagagcggcaaggtcaactttaagttagacttgaccatcatcaaggaagaagacggggatgaataccgcctggtcaaaactgacgggggcaagtggagtgaagcctttaatacccgctttttgaccatccaggaagaaacgattaaggactgggaccagtgggaagacttgcgcgaggattatcttcgccttaagaacgcagatccggctggtctgtcagttgacctctaccggcaggcagtcaaccagatctacggttaagaagtgtgaagcaaagcaggcatttgcctgcttttttcatgcagaaagctttgaaatctcttacaaaaaatgaaataatggtctaagaagctagcaaaaatgagtttggagaaaaagatggaagaaaagaaaaaaatcaaattaatcgcgactgacatggatggcaccctggtcaatgacgccaaagaggtgcccgcttcatttgccccttgggtcttaagccacccggaccagcagatggtgattgccagtggtcggccatattacaccaatgaagagcttttcaaggagatcaaagaccacttgatcttcattggcgacaatggcggcttgatctaccagcaggggcaagtcttggccaaggccggcattacagcggaagaagcaaaattctgcctggacctctttaaagatgagcccctggccaatccgattctctgcggggccagccaggcaatctgccacgaccctaaaggtgaccggaactttttaaagcagctggatacttactatatcaagcgccgctatgttgaagaccttgaagctgaagtaaacagcgatgaaattatcaaattcactgtttatatcgaaggcggggccgctgaaagcatctaccggcaactgccggaaatgccgggcaacttaagcgcggttttggccgggccggaatggatcgacatcgttaacaaggacgccaataagggagcagcggtaaagaagatcgctgaccttaaaggaatcaagcaagatgaaattctggcttttggcgactacttaaatgacctgaccatgttagaagcggccgggaccagctacgccatggtcaacggccacccggacttgaaaaagatcgctgaccacattgccccaagcaacaatgatgaaggagtaatgcaaatcctgcgaaaattgtttgattaattgctgacagctgccttttggcggctgttttgttttacattgtgcatgatccaggtatactagatagttaggtaccgaatcttaatttcttgattattttttgcagaaaggacaagcaggatggcagaagaagaactcaatgaagaattgtttcaccggagcatgagtttgcagcggcaactagcccaaatgggaatgcggtatgagaagctgcacggcggcgtccgggggcagaaccggactttggccctgctcagcaagaatgaggggatgaagcaggcggaactggcccgctttgccagagtaaggccatcctcaatcagtgaagtcgtggaccgtttggagcggcatggcttgattgaacggcgtcgggataacagcgaccaccgggttttccgcctctacttgactgaaaagggcagagagcaaaacgaacgcaaccactccagctggctgggctttgttggcgacttgatgagtcctttaagtgacgatgaaaaggcggagtacctgaacatcttgaagaaactggacaaacaggcattattcttagaagaacgcatggaagaagatgccaaaaaagagggtgaaaaccatgcttaaaattgctagaaaaacattgacttgctgggcgacttgcctggcaagtctttttcttattagtacaagttgcatgtgatttgtacttgccgacggtgacggccaacctggttgacaaggggatcattggcaagaacctgccctatatctggcaaaccgggggcgagatgcttttggtttctgccttgggcctgctggcggcttttggcaacatttactttgcctcccaccaggccatgcaggtcggccagcggcttagagccatgctctttgctaaggtcttgaccttctctgatgacatttctctcatgcagcccgcctggccagggccgacagcttcatccgccagctgccggatggctacgagaccctgttaaacgaagaagggacaaatatttcccaggggtaaaggcggctcttgacgattgcccgggcccttttagctgatccggaaattctcatcctggatgaggcgaccagctcggttgacacccggacggaaagcttgatccagaaggtgatggccgatctgaagcaggaaagaaccagcttcgtgattgcccaccgcctgtcaaccatccaggatgtcgacaagatcatcgtgatcaaccacggacaaatcgtcgaaagcggcaaccatcaaagtctcttggccaaggtcggcttttacgctgacctctatcagagccagtttttgggccaggaaatctgaaaaaagccatgatcctcgcgaatcatggcttttgctttagcgatatttaaaaaatagccctttgcattttgaacatgtgttctgtataataggattggttcaaaaattactactccttcttgtccttgtcctgcttttgcttaatatgatagtaaaggccgaaggaaaccaggttctcatttccggcgataatccgcttgatgttggcccggtggctccaccagatgaggacaaccaggactcctgacatgactgtcaagaaggtatcatggaagaagaagctggaaataaagatcaagacgactgaaatcaagctgctcaaggacaccatgctggtgattaagatcagggggatgaagaagcaggcgcagaggccgaagaactggacattgtagcccagaagaaagcccgccgtggtggccacggctttgccgcccttgaacttgaggaagattgagaaggcgtggccgaaaatagccgctgccccgaaaatcaggcacaagtggtggtcacccaagtggaagatccggggcaggcaggtggccagggtccccttgaagaagtcaaccaggaagaccaaggtgccggccttggggcccaggacccggaaggtgttggtggtcccgatattgtgcgacccgtaatcccggatatccttatggtagaagagcttgccgaccaaaacaccggtcggaaaagaaccaattaagtatgctaaaattaatagtaatgcaaattttattgcaaacatcaaatcaactccgtttatcttgtacctgctattttaacaaataacggactgaattgatacgaagtttataatctaaagcttggagatgttttattttgccaaagaacacatatgatgattcttcaattcaaattctgcacgggctggaggcagtccgcaagcggccggggatgtatatcgggtcaaccgacatccacggcttgaaccagctggtctacgaaatcgtcgacaactccgtcgacgaagccatggctggttttggccaggaaatcaacgtgaccatccacgaggacaattccgtgaccgtgcaggacttcggccgggggatgccgacagggatgcatgcctcaggccggccaaccattgaagtcatccttactgtcctgcatgccggcggcaagttcacggagcagaactacaagacctccggcggtctgcacggggtcggctcttccgtggtcaacgccctgtccagctacatgaaggtgcacgtggtgcgtgacggcaaggcctacgaggaagaattccaaaatggcggtcacccaatcggcaccctccgctgcctgggggcgaccaaggaaaagaccgggaccacgatcactttcaagccggacccgatgattttttcaacgactaagtacaactacgagaccatccaggaaagaatccgggaatcggccttcctgcttaaaggagtcaagtttactttgacggacgagcggacgccaaagcaccacgacgtcttccagtatgacgacgggattgaaagtttcgtttcctacctcaacgaaggcaaggggacgatcggcaaggtcttctgctttgaaggcagccaggacgggatggaaatcgaatttgccggccagtacagcgattcatactcagagaactttgtttccttcgtcaacaatgtccggactgctgacggcggctcccacgaagtcggggccagaagcggctttacccgggcctttaacgactatgccaagaagcaggggcttttgggcaagaaggacaagaacctggaagggtccgactaccgggaagggctcagcgccgttttgagcgtcaagatcccggaagaactgctggaatttgaagggcagaccaagggtaagctggggactccccaggccagaagcgcggtcgacagcatcgtttacgagaaattgtcttactatctgctggaaaacggggaatgggcccaggacctggtcaagaaggccctaagggcccgggatgccagagaggcggccaagaaggccagagatgagtccagaaacgggaagaaacggcacaagaaggaagttctgtccgggaaattaaccccggcccagtccagaaaccctaagaaaaacgagcttttcttagtcgaaggggactcagccggcggcagcgccaagcaaggccgggaccgccgcttccaggccatcctgcctttgcgggggaaggttttgaatacccagcgggccaagctggcggatattttcaagaacgaagaaatcaacacgatgatccatacgatcggagccggggtcgggactgaattcaaggttgaagactccaactacgacaagatcatcattatgactgacgccgacgacgacggggcccacattcagatcctgcttttgaccttcttctaccgctacatgcggccgatgatcgaagcaggcaaggtctacattgccctgccgccgctttacagaatcagcaagaagcagaccaacctttacgcctggaccgatgaagaacgggatgaggatgaaaagaaggtgggcaagggctatgccctgcagcgcttcaaggggctgggggaaatgaatgctgaccagctctgggagacgaccatgaatccagaaagccggatgctgatccgggtcagaatcgacgatgcccagttggctgaacgccgggtaaccaccttgatgggtgaccaggcttccgccagaagaaagtggattgaagaaaacgtcaagttccgcctgggcgaggaagagtcgatcttagacaaggtaaatgattaggaaggaagcagtatatgccagaaactcacgagcggattcgtgaaatgcctttggaacaggtcatgggcgaacgctttggccgctattccaaatatattattcaagaacgggccttgccggatatccgcgacgggctcaagcccgtgcaaagacggattctttacgctatgtaccgggacggcaatacggctgacaagccttttaagaaggcagccaaggccgtcggtaatatcatgggtaactatcacccgcacggcgacagctctatctacggggccctggtcttcctgtctcaagactggaagatgagagagccattgatcgaaatgcacggcaacaacgggtccatggacggcgacagtcccgccgccatgcgttatacggaatcccgcctggccaagatttccaatgtcctgctggaggatatcgacaaggaaaccgtgccaatggtgctcaacttcgacgacaccgcctatgaaccaacggttttgccagcccgcttccctaatcttctggtcaatgggtcaactgggatttcttctggttacgccacggaaattccgccccacaacctgggcgaggttttagacgccactatccacttgctcaagcacccggatgccagcctggaagacctgatgacctttgtcaaagggccagacttcccgactggcgggatcgtcatgggcaaaaaaggcttgcgggatgcctacaagaccggtaagggccggatccaggttcgggctaagacccatattgaagagatccggggccaccgccagcagatcgtggtgacggaaattccttacctggtcaacaaggcccagctggttaagaagatcgatgaaatccgggtcagccgggaactggacggaatcagcgaagtcagagatgaaactgaccgccacggtctctctattgtcatcgaacttaagaaagacgctgacgcccagaacatcctcaactatctcttgaagaatactgacctccaggtttcctacaacttcaacatggtggccattgcccacatgactccagtccaagtgggccttaagcggatcctggccgcctacctggagcacgaagaagaagtcgtaaccaagcggacccagtttgacttgaagaaggcctcagaccggctggaaatcatccagggtttgatcaaggccatgagtatcttggaccaggtgatcaaggtcatccgggcttctaagaacaaggctgacgccaagaagaacctggtagcagaatttgccttcactgaccggcaagccgaagccatcgtctccttgcagctttaccgcttgaccaatactgacgttttggccctgcaggctgaagaagaagaactgacgggcaagatcgcagcttacgagaagattttggcggacccgaaagttttgcaaaaggaaatcatcaaggaactccgggccgtcaagaaggaatttggctcagaccggcgcagtgaaatcagcgatgaaacggccagagtcgaagttgatgaaaaggccttgatcacggaagaatcagtccgggtcttgatcagccgcgacggctacatcaaacggtcctcaatgcggtccttccagtcaactgaagccggcgacaatggcttgccggaaactgaccgggtggtttatgaagggagcctgtcgactttgaccaacctctacctcttcaccaaccacggcaatttgatctaccggccggtgcatgagctggttgaaagcaagtggaaggatgttggccagcacttgtcccaggaactgggcctggcggctgacgagagcatcatccgggtctttgccttggaagctttggatgatccaaacctgtccttcctgttggccacaaacgacggctttatcaagcaggtggccctggctgacttgcagccaaccagaacctacaagtctcgggcaattatggccatgaagatgaagggggaagactcccgcgtcattactgtggacctggtcaagacaagtgaaaagcgggaaatcaccctctttaccaaccaggcctttgcccttaaatatgacattgatgaagttccgcaagtcggggcccgggcagctggggtcaagtcaatcaacttgaaggaagacgattatgtcgttgcctgcctggtcactgacccgcaatatgaagacctgctcaaggtgggtctggtaacccaaagaggggccttcaagcagatgccgctgaagctgatcggcaagaccagccgggccaagcggggcgtattggttttgcggaacctgaagaccaagccgcaccggatcgtggccttgaaggcttacgggcaaaaccatgagctgatcttgatcacttccagcctgcgcaagcaggtcatccggaccagcgaccacccagtcggcgaccggcagagcaacggttccttcgtcattgatgttaagacagacggagaggctaaggaactgctcatgggccggcctttaccggaccatgccagggatgtcggccgcttgctctaaaaaaatcaaaaagattacgaaaagatcgcgaaaagattgaacaaagcgctgattttctagtagacttaattagagagaataattttagctaaatctagaagggaaaattccaagatggaaaaagaactgatttttggtcacagaaacccagatactgacgcaattggcacggcgattgcctactcatacttccaaaaccaacatggctacaacactgaagccgttgctttgggtgaagccaacgacgaaacttcttttgccttgaagaagttcggctttgaagcaccacgcgtggttaagactgtcgcaaatgaagtcaaggccatcatgctggttgaccacaacgaaccgcaacaaagcgttgaagaccgggaccaagtcaaggttacccacgtcattgaccaccaccggatcagcaacttcgcgacgatcgaccccttgttctaccgcgctgaaccagtaggctgcacttccactgttttgtgggaaatgttcaaggagcaaaacatggaaattccaaccaacattgctggtatcatgctcagtgccattatttccgacaccttgcttttgaagtcaccaaccactactgacatcgacaaggaagcagttgaagacctggctaagattgccggcgttgactataaggaatacggtttggaactgcttaaggccggcaccaacatcgccgctaagtcagttgaagaactgatcgacctggacgccaagagcttcgaactgggctcaaagactgcccggatcgctcaagtcaacgttgttgacgtcccagaagccctggaacgcaaggatgccttcctggcagccatggaaaaggatgctaaggctaacggctacgacttgttcatgctggtaattaccaacgttttggactctgactcagaagttctcttcatcggggatgacgaaagcaagtctgtctttgccaaggccttcggcaaggaactggttgactcagaagcccacctgccaggcgttgtttcccggaagaagcaaatcgttccgccattgacccgggcatttgaagcttaatcagctaaataacaaggaaaaagaatccaggaaacctggattctttttttactgctttttaaacatcctacttgttactacaatttttcttaaaaaagaaaaagcgcggccaagccgcgccagaaaaatactgttaacaaataaatccaaggggaaattttgtcaacagttatttctttagctctttattttttactcgcttgctttatttgccagcatattgcttaagctggtcaaactgattcttcagttccaagtctaagtaatatggctgcttgactggcagacagccttgcccatataaggcaaaaaggtaggtcagttcttccttccagcggctgatttcttcatccaggccatccaggccctcatttaaaagggtgtggaggaagtggttggccacgcctacaaatttgccgcccagtgccaggcccttgaagacgtccagcggatttctgaccccgccagagacgatcagctgcttggtcaaaggcgctgccaaaagggcagccagggccgttggcaggccacagtcgttcaaatacgccatggggtgggggttgcgggaattttcgatttgggcaaaattggtgccgccagctcccccgatatcgaaccagctaaagccagctgcctgcaatttttgcaggctgactggatccaggccgctgcctacttccttgacgatgactggtacgccagctgcttctttaatctccagcatccggtccagccagacaaagtcccggtcgccttcaggcatggggatctcctgggccacgttaaggtggatctgcagggcatctgcttgcagatccttgacgatcttggcagctgctttagctggagttaaaggattaacattagcaaacaagaggccgtctggattggcttctctagctacgtaaaaagactccagctggtcttcttccttggtcaagatgctggctgaacccaaggccagggcaatttgctgcttattggcaatttcacccagctgccggttgatctgcctggatttttccgacccgccagtcatcgcgttgatgaagaagggggcggctaactctttgccaaaccaggtcgtcttgacggcgttcaggttaacctggctttcaggcagggccgggcggagcaggtggacccggtcaaaggaattcgttttttgggcattaaaaaacatctgtgtcaaagccagatgttcttcttttcttatagatctttgtgacatcgcaatgctcttagtaagttaattcagattggtgaatgtgaaattccaggggcaggatgttgttcttgacccattccttgcggaggcggtcaatatcggtgtccttgttgacgatgacgatgccgcagtcgccgttgcccgcgccgctggtcttagccgcgccgccaaacttgttggcgatttcgatcagctcagtcaagcggggaatttcgatagcaatattgttgatagcggcaaaatgctgcagcaagcggcggttgatgccgatctgcttttgaatcaaagcgatgttggcttcttcaaaaccgcggatcatctgcaaaacgcacttgcgtgagtctgccaaaaacttggcgtactcagtccgcaggttgttcttgttggcgttagtcttgtcaaccaggcgggaagttgaagccggctgctggctccagccaatcaagagctccatgcccttcggcggaaccagctgctggatcttcagacctggccaggcttcaccgaccactgctgacagggacttgcttgccagttcttctttcagccagagcttgttgaaggtctggtaggcgatccagccgccgtagacgctggccgcgatatcgccggcgctgccgttgccttggactgagtagtgagaaattgtggagagcttgtaaatcaggtccttgcttgcctggacaccgtaaaagcgcaagattgccttgaccgtcgcgaccgtgaccgcggctgaagaacccaggccatacttcttgccatctgcggaatccaggtcagaattgacaaacaagtcgtaaacgtccatcttgaccttctgttccaggcagtatctttcagtgaaagaaattgcggacagaatgtattcaaatggattgtcccggttgtcgatcactatctttgacccccgtctgacccagtgaatggagtcctgggagtattgcttggagtgaatcaaaccggtgtcgctgctgcttggcttgattgagaccctgacgtattggtcaagggcgaccagaatggctggacaatcttgttccaagacagcgtattccccggcaatgtaaagtttgcctggcgctttttcagtaatcacaaaaactcttcctcttattctcttaattttttctttttatattacgtcctaagacattatagacaattaaataagctttagtccaacagagtgactgctggaccaaaacctgcctcaataatcttaacacgatcaaaggaggactcaaagcaattaataatatctttagaatttttcccctggcagaggaccttgacgttcgggccggcgtcaatggtgtagtagcactccagcccttgctggcgcaggtcctggaccagcttgatggccttgatggtattcggttcaaaataggtaaagccggggacagcggtgaaggttaaagcatgcatctcactggcatttaattcagccagagaacccaatttgctaaagtcagcctgcttaatcgcttcttccatctccttgatctcactgtcatttctgtccagccagacctggtagaagggggagctcttgctcatttccatccccttggttgaagaaatcttcttttcctggtcgttgatttcaacagccaaaaggcgcaggtccatgttcggctcttcgtccagcgggtaggcgtaagaagtctggtcactatcgcctttttgccagacggaaaaaccgccgaaaacagatcttgaagctgagcccgatcccatcctggccattctggacaattcctgccggtcaacgcctaactggtagtggtcggcaaaagccgctgccatggcggcgaaggcagagctggaagatgccaggccagccgcggttggcacctggttgaccgattcaaccgccaaatttcccttgactccgaagcggtcctgcatggcccggaggtaggcgaaaacgcggtcagcggctggaccggaaacggcttggccgtttaatttaaaagacatttgctcgctgtctgagattttggtgtcgctatagaaggcatccagggtcatggacaggctggacatgagcggcaggcgcaatttggcgtccttcttgccccagtacttgatcaaggcgatattggtatgggcgcgggcggttttactcatctgtttcacattcctttactgtgtaattctgtttttaataatttttgggcaaaaattaaatctcttcaatccagtagttactgatttctgcttggcaagcctgggcaatctcttcgcaggaagcggcatccttgcaaagggcgatgacgattccgcccaggccgccgccagacaacttgcagcctaaagccccgcctttatcagcaatctggcagatccggtcgatcttgcttgtcgacaagttaaaggaagctaaaagctcctgggcctcattgaagaatttaccaacgctctccgggtcttgttcaagccaggcagctttgacttcgtcagccagttgccccagcttgcgcattctaacttgcgcgtcaggtgactcatttaaaagcttggcgaccatagtgacggcttctctggtattgcccaaatcgcccgtgtccatgatcaaaaggctggcacctaattttgaggagagcttttttacgcccttttgcttattaaaaaagaccaggtaatcggaattgaccgtggccgcgtccaggccggaagccttgccgtggttgatcgtttctgcctggttggtgatgtccataacttcacttgcacttaacttcaagcccaagtattggctcaaggccacggtagtaccgtaagcgacggtagctgaggagccaagtccgcgctccatgggaatttccccggtataggtaagcttgatctggggatttttcccgcttctagtcaaaagctccttgacgacatacttaaggccgttatagtcagcaggcgcgtcaaaaaaaggaccctggtagagcttggtgtccatccagaccgggccggcataatcactgacggtcgtcttgatgtgcagggcttgaattggcatagcaagggcgtcatagccgtaaacaacggaatgctcgccgatcaaaattacttttccatgagcggtacatgaagtctgcaaaaagaatcacctcaaaaaattaatttgttagttcggttaacgtttgcttagaatcaatggcaatcagttcccaaaaaggaaagagattgataaaatttagattgaccgatcagtcaacaaaggagtggaagcaatgatcaaaattataaccggcagacagtcggatcccctgcaaactgagatcatcggccgggctacccgcaattatctggcccagcccggcaaagatacctttattattgttccaaaccatatcaagtttaacacagaagttgccgcaataggcaaagtcgcccaacttcaagggcgggaagagaccagcgtcaagaacctgcacgtcctgtccttctcccgtctggcctggtttttctttaaaaaggccgacctgctcatgcctgaaagcctggatgacgctgccgcgaccatgattttggagcagatcatcgacaagcgcagagatgaactgctgcttttcaaaaattcccacgccaattccggcatgattaagcaggtctacagcacgatcctgcaggttcataccggccagctggacctgggcaatcttttggagcgggcagccgacccggcggtggccttggacctggataatgagaccagggacaagctgcacgacctggacttgatctaccaggactttttagaaatcgtcagtgaaaagcacttcgccaccaaggatgaactgaacatccagctaaaccagcttttggccagccggccggacctggtcagccaggccagcttctacgtgactgatttctcccatttttccattcaggaaaaaatgaccatgcagctgctggcagcttttgccagcgagatgaccttcgccttcaagacggctgacggcagcgtgattgagccggccgccggggaatacgactatgtggttcagaagacgatcaaggacttgaccggctacttttccgcccatgactttgcctgggagagagaaaaaatcgccagtccagtcagtccagccagggacttgaaccaggcctggcagggacagggccagccggatttagataacctccagctggttaaggcagattcccgttacgctgaagcatatttcgtggcccggaccatctatgacgaggtggctttaaagggctgccagtaccgagactttttggtcctggccccgaatttgcaggagtatgaaacttacctggctccgattttgcggcaaaaccagattcccttctttgacgacctgcagcagcagatgaagtaccaccccttggtgcttttgctggaaaatttgggcaagctcctccagcaggcaggagacacgccagctcttttgagcatcatgaagacccgcctcttgatccctgactggtatttagaaggggatgcagaagccggggaagccgcgtatttgcgcgacgtcgaccagctggaaaactttgccctggcccacggaatcaagtacagcctttggcaaaagcccctcaaggactttaccaaagcccaggtcatcgccctggaccaagaacagtaccaaaagtggctggaccgcttggacaagctgcgggacttctttgtcagcaagatctcccggcttgccagccagctgaagagtgaaaaagacagcatgaccgccgtcaagctcttttttgacttcttggtcaaaaatggggtcagcgcccgcctggaagcctggcgcttaaaggccagcgagagcggagacctgcagcaggcccagcagccggagcagtgctggaatctgcttttgtctttgctcaaagactacctcttggtcaacccggaaaactttgcctgggctgacttctttaagatgctgacggcagccttttcccaggccaatttcgcgacgattccggccagcctggacgccgtcaccttgtcagaatacgggatggtgcagaccagcggctacaagcaggtcttcatcatcggagcagccaatggcagcctgccgcaaatcaacgaccagcccaactttttgactacggaaaacctggccagcctggcagacttttttgaccaggaggcctacctggaagacagtcagcagctgcacaacctggaccaggaataccaatttggcaatgccctggccctggcctctgaccgggtctacatctcctatccggtgatcaattccaataatgacctgctggatccttccatttactacaagcgcctgctgaagctggttaacggccgggaataccggcaaagggacctgccagataccgctgaaaaagaccggactgaatttgcccgccagcttttgctctttttgaccagtccaagggccagcttaggctacctggcctatgctgaggaaaattccgcccaaagcccgctggtggccaagctggtcgaactcagccggcagtatgaggaagaaaaggctgaggaaatcgcggaagggatggcctatgacaataacccgcaagacatctcagaagacctggctgagcgcttgtacggcaaggacctgttgtcttcagtctcccagttggaaagctactaccagaattcttttgaatacttccttaactatggcctccgcctgcggccacgggcagaaaatgagctgaatgccatccagtccggtaactacttccaccggacctttgagcttttgctcaaggaaatgcaaaagaaaaatatcgaaattgacaagctcagcgagctggacctggagcttttgctcaagcaagtcagaagcgagatcctgcaagaacccctctaccagcagttcttgcgtgatcctttcaatgaatatcttttcaaggcctttgacaagacgaccagtaaggtggcccaaagctaccggcgcaagcagcaggaaaacaagatgcgggctacttacggggaactggcctttggcccggctgaaaagctggccggcctggtcttgcctttgaagaagtttgccggccagcggaagatcagcctccggggcaagatcgaccgagtcgacctctttaatggggaccagcacgttttaggccagctgatcgactacaagtcttccgaccacagcttcaacctggcccgttttgccagcggggtggacctgcagatgatcgcctatttggacgttctggagaagaaccgggacctcctggccggcgggcggcagtttgacctcctgggggccttttaccaatatgtcacccggaagctgaattccgtcaactcctcatcaaccggggccttgtttgacagcaagctgcagctgaaagagaaccttttgggcggggaagacaagttgaaattgtccggggtctttgtcagtgagccagcctggtaccaggaagtcgacaaagcccttgagaaaaaggcaagcagtccggtttaccggggcctcaaactgaacaagagcggcggctttggcaaaaaagacaacttcttcagccaagatgagatgcaggagctgctggaatacgtcgaagccttgattgaggacgcggccagcgagattttaagcgggcagattgccttgaatcctttccggcaaggcaacaataccggcctggcatttagcgactacaaggatatcttctactttgaccagcagctgccaactaactcttaccgggacctgccaagccttaagaaggcagatctgctggctttggtagaaaagcggctgcggcagaggggataaggaatggtacatagaaaggaaatagcatggctgtaaaatatacaccagaccaggccagggccattgaaagccgggggcaggaccttttggtttcagcctctgccggctcaggcaaaaccagtgttttggttgaaagggtcatccgggaaatcatggacgaccacttggaggttaaccagctcctggtcattacctttacccgggcggccgccagtgaaatgaagcagcggatcaagcagcgcctgcaggaccgcctgcaagaagaaacagatgccagccaggccgactttttgcgccggcagctggctgaaatcgataccgcgattatttccacgatcgactctttctgtttggacgtcatccgccgcttttacttcgcgatcgacatcgacccggacttcagcattttgactgacgccacccagattgagcttttaaaggaaagagccttgagggatgtcgaaaacggctacctgcaaaatgaggaccaagcgaaaaaagaccgtttcctggccctctatgatgcctttgccggcgacagcaacgccaattcagccagagacttgcttttggatttataccagtttgccatggcccggcccaactaccgggcttggctgcaaaagctggctgacccttaccagctggggaccagcgacatcgttgacagcgccctatggcaggagaaaatcaagccttacctggaggaagaattttccaacctggcggacaagctgacggctttgatggccgaagccgactttgaccatgaaaagtttgccaagtaccagccagcttttacggcttttgccaccagtctggccagctaccgggagagcctggccacagatgatccctttgaccggcaaagagagctgctggcggcctgccagtttgacgggaccctgcggactaacaaggagatcgccgactttgttgaggaggcaaaggaggttaaagaagctggcaagcagctggtcttcaatgtctataccagtttttacgcaagcagcaatgctgaccagcaggccctcttagccaagggggcagaaatcgcctccgcggcagcggaagttgaactggcctttattgaccgctttaacgaattgaagcgggctgaccgggtcctggacttcagcgacatggagcagttggcctatgaaattctgacccaggatagttcaaactctgacctggcccgggcctactaccaaagccgcttcaaggaaatcatggtcgatgaataccaggacaccaacgccctgcaagacggcttgatccagcggctgaaaaaagcgggtaagaacaacctcttcatggtcggggacgtcaagcagtcaatctacggcttccgccaggcggaacccagcctgtttatcgccaaatatgatgaatatggccaggaaaattcggctggcaagcagcggattatttttgccgaaaacttccgctccagccagccggtcacccaagctgtcaacttgatctttgacagcctcttaaccaaggacttcggggggattgactaccaaaaagaagggcagctgaaattcgcggctggctatgacccagaggcggccctgccgactgaaacagaagtcctctaccaggaagattcatctgcaacagatgatgacggggaattgaaccagggcgatttagccatggtcatcagccggattcagaagctgatcgctgaccagacgccaatttttgacccgaagaccgggcagacccggccggtcagctatggggacatcgccatcttaacccggtccaagaccagcaacctggacatcaagcaggaatttgaccgctacggggtcccgctctttgtcatggatgtccagaactacttccagacctttgaattgacggtcatcatgtcctacttgaagatcatcgacaacccggaccaggatattcccctggtggcggttttgcggtctccgatttttaacttctccagttcagatctggccgaaacccgcctggtcaacaagagcgtcagcttctacgcggctttaagaacttatgctaaaaaagatacagatctggctgcccgctgccgggactttttggcccaattgcaggaccttcgcgacttttccttgagccaccggatttcagaactgctctggaccatttacgagcggaccagctttttggaaatcgtgacggccatgaccaacggccagcagcgccggctcaacttgactgccttgtacgaaagagccagcgcctacgaaagttcgggcttcaaggacctttaccagttcatcaactttattgccagaatgcggaagagccagaaggacctggcccagccgatcctgagcgaaaatgccggcaactcagtcaagctgatgaccatccatgcctcaaaggggctggaattcccgatcgtctttgtcttgggcctggagcaccgctacaattaccagcaagacattaccggcagctatgtcttagatgccagcggcctgggcctgtcctttgcctatccctttgatgaagcggaataccgggcagatactttggctaatgcctggctgaagattgccaaaaagcagaagttgctggaagaagaagcccgcctgctttacgtagctttgacccgcgccaagcagaagctgattttggcggcaagtatcaagctgccagccagaaccgacctggcgggcttggaagagaagtgggccaaggaaatttctgctggccgcctgccccttttggataagatgaaggtagccaagccccttgactttttggccccggctttagcccgcgccaagcaggtgaagcggctgggtgaaaaagccgtcagcgacctggcggcaggccaagaaggcagtctggtctttgtccactttgaccccaagaaagaccaggcccaattgccggatagtgaggccgcggcggacagcggggcagacttgacggaagatgaagcagccgtctttaagcaggcagaaaagctctatgccttcagccagggcggctatccttacttggatgccagccggaccacggcctaccaggcggtgtctgaaatcaagaaggtttttggcgacccgatcgaagacgaactggctgactcccacatttcggaactgcagtcagccaaccgctacctgcagccgatcgatactgaacctgacttcctcttccaaaatacggtcagctcagctgaactggggacagccagccacctggtcttgcagtattatgactatgccaaaggcgacaaggatgccattgacagctgcattgccggcctggtggaaaagggccggctgagccagaccttggccagcaagctggaccgggaagccttgtcttggtttgtcaagagcgactttgccaaagacttttaccagcagcctgaccgcctccaccgggaggaaaattttgccaccatcctgtcgccgaagactttatttaaggattttagcgattttccaggaaaaattttggttcacgggacaatcgatggctattatgaagcggagaatggtatcattttatttgactacaagactgaccacgtgaacccgcgtaagcaggaggaagcaattcagaagctgaaagagaagtaccagggccagttgcgcctttatgagcgggccttgaatgaatctggccggctgcctgttttgaaaaagtacctggtgcttttgagctgccgggaaattgttgaagttgattagaagtttttaggagtgaaaggagcggaaaatggcggatttttttgccggtgaaagcttcgcggtcgttgacttggaaacgaccgggacgcgcaaggaagagggggaccggatcatccagtttggctgcgccatagtcaaagatggtgaagtggttaaaacttattccttcatgatgaacccccaccggaaaattcccctggccgtgaccaatttgaccgggatcgaccagaagatggtggccggccaggctgatttcaagcactatgccccgaagattcgcgagatcctgcaggatacggttttcgtggcccataacgtcaatttcgactttcctttcttgaactacgaattgaccaatgccggttttgaggccttgacctgcaaggcggttgacacggttgaactggccaagatcacctttccgaccctgccttcttacaagttgcgggacttgacggccagtctggagatcaagcacgccaacccccacaaggcggattctgacgcctatgggacagccgtcttgctcttgaagatcatcgacaagctggcttctttgccccaggcaactttgaatgttctgggctctttggccagtggccttatccgggacacgggggacgtgatcaaggtgattgctgaccagtcccggcaaagcaggcgcaaactgcccaaagacaagatgcaggtccgcaacctggtcttaaagaggcaggagattccggcggttgaacatggggaaaatgggcattttccagttaaagacacggataaacgcaagctttttaaaggcaagatcaattaccggcaagcccaagtggacctaatcgaccgcttgcacgactttgtcgaagatgccgggcaaagggtcatgctggctgaagcgccaaacgggacagggaagacttttgcctaccttttcgcctacgcctaccagctctattccggcaaaaaattagtaattgctacaccgaccaaggtcctccagcagcagctcctagaccaggaaattccccagctcctgcgggttacgggtcttggcttaaacgcggaaatggtcaagtccagcagccactacctggatttagacggttttgcccagactctctaccagaattcgcccaacaaggcgaccttgctcttgcagatgcagatcctggtctggttgacagaaacgacaactggggacatggatgaattgcagctgaccagtcagcagctgccgatttttaaccagctcaagcacccgggggatgcccgggtggccagccagtttgccagcgttgacttctggaatctggcccgccgccggcaggagcaggccaacattttggtgactaaccacgcctacctggtcaaccactacatggactccatctgggggcagaatccttacctggtaattgacgaagcccaccgcttcagcgaaaacctgcagacggcccggatggactccctgcgcctggaagcaatttggggcagcatcagccacctgcgcaatttgctctactttacggacaataacctgctcagacaaagcgaggaaaatgtccagctgcagttcatgctggacctcttggaccaggaaagcctggacttgattcacagcttgaaccggatgcaaaagtacctctaccagcacaaggggcaggcgatcagccaggttgttttgcccaacaagagcctgcagctgaccatccagggccaggatctcttcccggaaaactctcagttccggccacttcttagacagttccagcagcaattggagcaggtccggatccataccaaccagatccgctacttgctggagcaggaaaaggaccgctttttaactgatgaggaatctttgctggaagaattgaatgaccaggtcgacctgctggaattctatacgggaaagagctaccagctggctgacctcttgaaccagccgctcttggatcatttgggcttcgtggtcaacgtgaccaaccccgaagatgctctcagcagcaacctctactggctcagcctggacagttctgaagaattgcataaaatttacgaccgctttgaccatatcagcatgatcagtgcgacaataactaatgacggcaattttgcctttgccaagcagttcctggccctgccaaatttgggtatctcctgctacaagggcaaggccagcttccccatggctgaccatctggagattctggccatggacgaggggcagccggaaccagacagcccgcgttttttggaagaattgaaaaatatcctgaccaaggacttaagcgggcaaaagcacgttttgtgcctgtttaccaatctggacttgatcaggcagctctactttgaactgctgaatgatccccgggttaaggactatgagctcctggcccagggcttgacggggtcaaatgagcggatcacccgccgctttgtcatcgctgaacggtcaatcttgctgggggcggacagcttctgggaaggggtggacttccacaattgcgggattgacctggttatcgcgacccgcctgccatttgagtccccggacctgccggaggttagcctcaggcagcactacctggcccaaagaggctgggatgtctttcaagaggactctttgccccgggcggttctccgcctgcggcagggatgcggccgcttgatccggggcgaggatgattatgggcagtttttgatcctggatccccggatctggaccaagagctatggcccggcctttaggtccagcctgccggctccggtgcaaagggttaaagcgagtgagttaaaaaagaagttgaagttcgagaggaaaaatgcttaacgaaagagtcaaaaatttcttgcagtatctggcctggctgttcttcttcctgtttttgctttacgcgggaacagtggcggttgttgctagggcagccaagccgtacagtcagcagaaagagaaagtcgccaagctggtcaagcagacttccatgaagcaaattgacaagtactaccatttgagccggggcgtcaagtcatattcagccagcgggaaaaccagtaagggtaaggcggcttacttcatctacctgccgggtaaacataaggcctactattattcagctagtgacggcgtcagcgaaagcacggtcaaatccagctttcagaagtcttacccaaaaaaggccatcaaggaagtcaacctgggctggtatcaaaagcaggccgtctgggaagtcacggcagtcaacgcagacggcagctactgctatgccatctacaagttcaaggatggccagctcctgtctctggtcgataagttatagaagatcaggcaaaaatctgctatcatggatagagttataaaaataaggtggaattaaaagaatgacagaattgatttcaatcagagaatcagccaagcacgttgacgaagaagtcagaatgcacgtctggctgaccgacaagcggcccagcgggaagatcgtcttcctgcaattaagagacggcacggccttcttccaaggcgttgtccgcaagaacgatgtcagtgaggaagtttttgaagcagccaagggcctgcgccaggaagcaagcttctacctcaccgggaccatccatgaagacgcccggtctcacttcggctacgaaatccagatcagcgacctggaagtcgtctcaaacaatgaaggctacccgatcaccaacaaggaacacgggatcgacttccttttggaccaccgtcacctctggctgagaagccggcggccattcgccatcatgcagatcag

SEQ ID NO: 2191 - DNA, 37679 bp, Unknown
  gut microbiota DNA sequence
tgaatcagctacggtagatagctcttctagctcggaaactactaatccaaccgttgacaccccattcgccggtaaagctgttcacactatttatactggtactaatacttacctatataccactaaagagttaactaccattgccgccacaccattacaaggtgataccagcgtaattgcttatcccgatggcattacaacggccttaaccggtaagaatgctggtgacccagctatacccgtaacttataaaggacaaaacttgtattttaaaggtacttttgaaggcttgacttcaaacggcttatatccagatggctattactacgctttaacagacaccaccttctacggtgtggttaagccaaccgacccttccgtcaaacttgacgcaccttttctaaacggttccacttggttctacttttttgatggtggctcgacgatttacagttatcaaaataacgtttggactagcaatacctttttaaacgctcagtaaccactgatagataataagaaacattaatgtgtagcgcgtcaagatacgacttattctacacaacgcaaaagccatgactattcccagtttgagaatagtcatggctttttagtggtgccgaaacatggatcaaaaggatgcttgtttcgcttaacccggcaccagtaagcattccaaaaaccggaataattaccggtaccacattaatgctcacaaactaaccgattcatgcctcacgcttaatctgaaaacaaccccatcaaatcctccgcctgtaaattctgtttggcctcaccgcgcacatccaatttctttgctgttaaagctgattcatcttacttcttatagttttctgccaaaaagtccttcatattctgtggggtatggcccgtgatccgggtgaagtcatcagtaactccgtccatcaagcccatggctgccgccttgtacatggaggccagttcatccccgtcgccttcagcccggtagatattcgcgaattcttctaggctgaccggctggtagccgatcttttctccggtaacttcagtcatgatccggcttaattcaaccatgttatagttattttcttgggtcaaaaggtaaatctgccccttgtctctgaggtaaggccggacagcgacattggcaatagcttccgcactgtcttttcttgagataaaactcatcgcctgatcgccaaccgggtagatcacattgcctcttgcaatcaactccggcaggtatgggaccaaggggtcagcgtaaagagaatttttgaccacggcataggacaatttgctagaagctaaacgggctggcaggtaggcgtaatagcctgccatctggaagggattattagcttggtcagccatgaagctgacgtcaaccaggtgcttgactccggcttccttcatcgcttcaagtgaattctcgaattcctcgatccgcttgctcacgttataagtgatgctgggaatgtaaattaggacatccgtcccggtaaaagcttcgaccatggatggaacatcgtagtagtcgctgtgcatgacttcatagccggcttttgcaaaatcttcagccttttgcgggctgcggactgccaggcggatattcttgctatcagttaatttgcttaattctttaacgacttctctgcctaagtggccggttgcgccagtaatcgtgtatttcattttgacttccttacaatttttctccgcttattcttctttactattttctgcctgctttttcgcggcttctttaaccaaaatcgtgtcaatcacgtcctgcaggctgatcttacctaaaaccgcctccgccgcgatctccgcgtgggaaaagtagtcggtcaaggttggctggatgttgccgccgacaatgcagtccggatttgtttcgtggtcgattgcaaaaaggggacttttaccttcagttgccagatagatttccagcaggctgatgtcttttggctcccttaatagctctggatccggtgacccatgggtcgtcttgataaagccggcatcccttaaattcgacattaaccgtctcaccacaactggcgaagtatttaaagaactggcgatgatgttgctggacagagtggtctttcctttgtagatcacgagaaaggtcaaaaggtggatgctgtcactaaagcgggttgatactttcatttgtttttctctcccaaataattaggcaaatcatgtaacttatctaattaccagtatagtaactgaaattgctaaaagcaagttctttgtcagcaagatcagaatgaagcttatacccgcctggaagataccgactaagcaatagtactgcttttacacttttcttataactagctggcccaagatagaaggatgagaaactattatagattcctggccaagaaaaagaagaaagctgtagcttttacctttacaagggctaagaaagagtttatgctaagtcgagaaaccatttaagttacatgaatgccctgcgagatggaggggaaaatgatcgaataccgcgatgtcgggatgacctatggagacaatgtcatcttgaagcagataaatcttacaatcaatgacggggagctttttgtcttagtcggccccagcgggagcgggaagacgactttgctcagaatgatcaaccgtttaacagaaccgactcatggcgatgtctacttagacggcaaaagagtcaaagaccacgacctgcgccagctccgcctgcatataggctatgtcctgcagactagcagcctttttcctaacttaacggttggcgacaatatcactatccagctggaagaagccggagtcaaaaaggttgaacgaaagaagcgggccttagcattactggcccaggttggcctggaaggggacaagtatatctcccggctgcccaaagaactttcaggcggccagcagcagcgggtcgctatcgcccgggccatggccagccagcccaaattgatcttgatggacgaatccttcagtgccttagacccggtcctgcgccgccagcagcaagagctcctacttgacctgcaccggcaaagcaagaccacggttgtcttcgtgacccacgacatgcaggaagccttgcgtttaggggaccggatcggggttatccaggatggctgcctgctgcaagtcggcaacccggaagaaatcgtgcaaaagcccgccaactcctttgtggctgacttcttcaagagcgcccggccacggctgggcactatgcttgagcttttggctagtccatacgtaaatagaattacagaagagaatctgccggaagttgagaaagtcgaagaagtcacgggattagctgaaaaagctggctttttgcaatttgcctaccagggagcaggttaccaaatcaagtccagcgacctgttgcactactttggaaaatggggggactaagagatgagtgaattgatcaatactatatcgtcgcaccaagggcagatctggcaggctttaggtgagcacttgctcttatccatggaagccctcttgctttcttgcttgatcgccattcctttagggatgctcctggcccacagcgaaagagccggggaagcggtcttccagatcaccagtatcatccagaccatccccagtctggccctactcggtctcttaattccttttgtcggaatcgggacgactccggccttgatcgccttgactgcgtacgggatcatgccaatctaccagaatacctactcggctttgagaaatatcgatcccaacttggaagaagcggccgatgcctttggcttaagccgctggaaaaaattatcccgcctggaattccccattgccctgcccataatcctttccggcgtcagcatttccttagtcatgattattgggacagccacgctggctgccatgattggggccggcgggcttgggacctacatcatgatcgggatccagcaaaacaacaacacctatgtcttgatcggggctggtctgtcagctgtcttgactttggccatgtctggcctgctcaagttcatggcctcatcaaaaaagcacttccgtgtcacagccgccgtcctggcaatttttgccattggcttaggagttagccaggctccgaaacattttaccccgaagcaagaggaagtcgtcatcgctggcaagctggggagtgaaccagacattttgatcaacatgtacaaggacttgattgaaagggacaatcatgtcaaggtgacccttaagaacaactttggcgggaccagcttcctgttcaatgccttaaagacaggcaaaatcgacatctatccggaatttaccgggacggttctgcaaggtctggctaaaaagaaggtggccactccgcatgacgcggctaaaacttaccagctggctaaaaagctgatggctgaggaggaccagctgacttacctgccagcaatgaactatcagaacggctacgacttggcggttacgaaggcttttgccaagaaacataatattaagagcttaagcgacttggcgaaagtggacgcttccttaaccgctgcttttgacccggactttgccaaccagcaggatggctacctgggattaaagaaggaatatggcctgaacttcaaggttaaaactatggaacctgctctgcgctataaggcaattgccagcggcaaggtcgcagtcgttgacggctatacgaccgatccccagatcaagcagtatgacttagtcgccttaaaggatgacaagagctttttcccgccataccaaggggcgcctttgctgaaaaattcttttgcccaaaagcatcccggcgtcgtcaaaagcctgaacaagcttgctggcaagattactgaagctgaaatgcaggaaatgaactacaaggtgaccgtcaagcacgagagcgccagcaaggtggcccgccagtacctgaagcagcatggtctgctctaattagaaaattggtaggtactttttctgcaaaaaggcttgaaaatagttagaaaagcattaaaatgtagatgtgattacatccatgaaaggagttgctctcttgacagaacactatttaaactatgtcaatggcgaatggcgggactccgctgacgcgattgaaattttcgaaccagcaactggcaagtccctgggtactgtacctgccatgtcccacgaagacgtggactacgtaatggacagcgccaaaaaggcccttccagcctggcgggccctctcatacgttgaacgggccgcatacttgcagaaggctgcggacatcctttaccgggatgctgaaaagatcggttctaccttgtccaaggaaatcgccaagggcctcaagtcctccatcggcgaagtgacccggacggcggaaatcgttgaatacacggccaaggtcggcgtaactttggacggggaagtcatggaaggcggcaactttgacgcggcaagcaagaacaagctggctgttgtccgccgggaaccagtcggcctggttttggcaatttctcccttcaactacccggttaacctggccggctcaaagatcgcgccagctttgatgggcgggaacgtggtggccttcaagccgccaacacaagggtcaatctccggtctgcttttggccaaagccttcgccgaagctggcctgccagccggcgtcttcaacaccattaccggccggggccgggttatcggcgactacatcgttgaacacccggaagtcaacttcatcaacttcaccggttccagtgctgtcggcaagaacatcggcaaactggccgggatgcgaccaattatgctggaacttggcggcaaggacgcggccatcgtcttggaagacgctgacttggacttgacggccaagaacatcgttgccggcgcctttggctactccggccagcgttgtaccgccgttaagcgggttctggtcatggacagcgtggctgacgaattggttgaaaaggtgactgctttggtcaaggatttgacggtcgggatgccagaagaggatgccgacatcactcctttgatcgacactaagtctgccgactacgtacaaggcttaattgaagaagccgcagaaaagggcgctaagcctttgtttgacttcaagcgcgaaggcaacctgatctacccaatggtcatggaccaagtgacgactgacatgcgcctggcctgggaagaaccatttgggccagtattgccattcattcgcgtcaagtcagctgacgaagctgtcaagattgccaatgaatcagaatacggcctgcaaagctccgtcttctcacggaactttgaaaaagcctttgccattgcaggaaaattggaagtgggcacagtccacatcaacaacaagacccaaagaggtccggacaacttcccattcctgggcgtaaagagctcaggggcaggcgtacagggggtcaagtactccattcaagccatgacccgggtcaagtccgttgtcttcaacattgaaggctaattttaaaacagtaaatttgacaagatgtctgcttgagaaagtccgctttggcggacttttttcgttttgtaaaagtttaaaaagtctaattattttgttagcattttttcagaaagaatggtaaattaaacaaaagaattcagacaggagagtgcactatgccaattactttagataaacagttagccgccattgatgtgttaaggcaggagaatatttttgtcatggactcgcaaagagcccggacccagaacatccggcctttaaagattctggtggtgaacctgatgcctaagaaggccaacacggaagtgcaattgcttcgccacctggccaacacgcccttgcagctggaagtggaattcctctacatggccagtcataagtctaaaaatgcttccaacgaatacctggaaaactattaccggacctttgccgacatcaaggacaagcgctatgatgggatgattattactggcgccccggttgaacagctgcctttccaggaggtcgactactggagcgagctctgccagctgatggaatggtccaagacccatgtctactccagcctccacctttgctggggagcgcaagccgggctttactatcactttgggatcgacaagcagcctctggaaaagaagctgtccggcatttatgagcaggaagtagtggggaccagcccccttcttcgcggctttgacgactcctaccgctgtccgcactcccgctataccacgatttacccagaccaattaaagaagtgcagtctgcagattttggcggaggggccggaagtcggggttgcaatcgcggctagtgacgacttgcggcagatctacagctttggccatttggaatactccagagacaccttgtctgaggaataccatagagaccttaatgccggtatcaatccgcttttgccggttaactacttcccggatgacgatccggagaaaaagccccgcctgacctggagtctggccgcctcaaccttcttcagcaactggatcaactacgccgtttaccaggaaacgccatacgacctggcagaactggactaaaaagaatttggacaaaaagaaatctgcccctaccagggaggcagggacagattttttacttgtgaataaagtctagaagcggtaattccgccggtcgatttggaagtacttgtcgtttttggacatcttgttcaccagatggaaggagatgaagaaaaggacggcgatgaaggccaggaagatccactgcccttcagcggaattaagggaagccacgtagtcgtagctaccgtgcagggcggctggcacgacgatagccaaaacgcggaagaacttggaccggatgtttttgcccaggtaggcgtagccgcgggccaagccatagaagatccccatgaagacgccgaagcaggcgtggccgggaacggccgttacagcccggactagggcggtagagaagccgtagatcatgacgtaggagatattttcccagagggcaaagcccagggccacgaagacagcgtagacaaccccgtcatactggcagttaaattcccagctgaaccaggaccggcgctttaagaagaagtacttggctccttcttcagcgtaggcaacgatcacgaagtacatgatgatgttgtagattggatctttttgcgagacataagaagttaaaacaccattggcgatccattcaaggatgccggcaatcaccgctgaccagatccccccggtcaccattttccacaaaaggtaggggctttccggctccagccggtcagattggtaaaccttgatcattaggaagatggcggggataaccgcggccaggataaggagccagttgtagattaaaactggttctaggaagaagaaaaacatgttggacccactttctattctttggatatgaatctagtttactcgcaatcggggctttttttcaagaaaggaacaataatgaccaaaatattagtgacaggttttaaccccttcaaccatgaaaaaatcaatccagccattgaagcagtgaaattgctgccagacgaaatctctggctgtgagattatcaagctgcagctgccgaccagctaccagaaaagtgagaaaaagctgcaagcagctgttgaaagagaagagccagactttgtcttaaacgtaggccaggccggtggccgggcctgtttgactccagaactagtcgccatcaactatgatgattgcccggtcgcggacaatgacggggaaaagcgggaaggacaggcgattgatctggagggcccagcggcttactttacccagctgccggttaaggaaatggtcaaagctattaaagcggcgggcatcccggctgaagtgtcgaccacggccggctgctttgtctgcaaccatgtcatgtattacgcgcagagcttgagaaaagaacatccggggatgcaggcgggcttcattcatatcccttttttgccagagcaggtggtcaagcggccaaatcagccatcaatggctttggaaacaatcgtgaccggcttaaccgcggcaattgctgcattttttccggacggggactaggaagagttaaatttttaggaaaataacggcaaaagtttggaaaatagggaaaacgctatcatctgcataaaatcagctttcacgcttaaaatggtgctataataatcttaagtaaaaaagcgctttacagaaagaaggctggttaaaatgagaagcacggaagaaaccatgttgatggacaccatgattgccaatggcgtcagcaacaagatgaccgagcaggcaactggtcttgcggctccaaagccggtgcaaaagaaaaatgcagctaagctggagacgcgtgacatgctgctggccaacggggtcgacgaagaaatggccgacctggcggcagatctgtaatttaattgaatagtttagacctggctttcttagccaggtcatttttttgcaatcgttcaggctacctcaaaaggttggtaaatgataaaatcaactggtgaggaatgcatatgacacaatttattgaaaaaatttcagctttagccaaggaatttgctgatccggaactggaccggcaagtgcaagagatcaaaatgatcgatgagtgcgtatctagccagcagatgctgctgttcgcgccagaccgcttaggcatcagtgatgaccgttttgccgagctgacctgggagctgcttgacagccagatcaaggacatgcgggcattaaacaacctgctgaacaatgtccgccagtacctgtccctggaatatgggatctggtcactgccaaacatggagacggctcagctttttaaaaacgaattagggattgagacagccctggaagttatggctggcaacgcctactggtctaaggccttgagcgaggccgggattcaagtctgggccacggattctttagaatggtccaagagctcaaagaccgggaagaagcctttttacccagttgaaaacctgccagctgaccaggcagtcatgaagtacgcgacctgcgacatgattctctgctcctgggcgccgaattttggccaggcggatttggaactgatcgctgccaagcagcactacgctccagctgcccgcctctttttcatcggggaaaaaggggtgaccaattccccggaattctggaccagaaagcatttcgccaaatcaagcgaactgagaaagattaaccgcagctttaagtcctacgactttatcaaggaaaagtttattgaggtgagctgatgaaaaggtacaaactgtttgttattttgtccgcctttttcctcttcatcatgatcggcatcgtctactccaacatgcagtcccagctggctgaccaaattctgcaggcgcaggggatgagcatggaggcccggatcgtcaagccgaagaagaccatgacaattgcctccttccttaagtggatcaagaaagaattccctaaggaaagcatccagatgcagttcaagagcaaggaggacaagaaccaggtcttgatctggtcacaaaaccgggacctcaactacttccctgtttccagtggccgctttttcagtgaagatgactttaaagggcaggtcaccatcgcggcggtctccccatcttcagcggcttcccagatcaagacccagggcaatacttacttgatcgccaacggccagtactattcagttgtcggcagccttaaagctgtgccataccagtccagcaaggcctactacttgacgacgggggttaagcaggaaaccgggcaaagccggataaaccactttaccttgtacgtggacgccagcagccagacgatcggcaagatcgccagccacttaaagagtgagacctattggccggacttcgtcaagcggggccggcaaagaagattgacgcttctcatgccagaagccctcttgatcctctttttgctgggcgtgggggtccttttgatgggtcttattgcctggctgacttggaaagaaactgatttgagccatgttaagggagacttgttgcccaacctcctcttgaaccggagcgggcgttttatcgtctttatggtcctggaagcttttgcctcctacttcctcttggtgtggaaggcctactacagcaaccagagcattttaggcctacttttgctcgggacagtcgtggttgaactggcagtatatgttggaatgatggtttatatgtacagaaaggggaaacaggcggatgattgagatcccagaccagtttaaggagaaatttacgggtctgcttggccaggaagaagccggcaaactgcttgagtcattggctgagccaagcaagaaggcctaccggatcaacagtttgaaaaagggagccgtggcatacccgcaagaagatgcggtgcccggcatccctaacgcttattacggtgaagtctccggcaaggacccggaatggacagctggcctggtttactcgcaagacccggcagccatgttcccggcccaggaaattccagttaagccaggcgacaaggtcttggacttatgcgcggctcccggcgggaaaagcacggctttagcccagaagctgcaaggtgagggcttattggtagccaatgaaatttcgccgtcccgggctaaaattttacgggaaaacctggagcggtggggcgtagcaaacgctgtcgttaccaactgcgattcttttgccttgagcgcccgtttcccgggattttttgacgcgatcttagtggacgcgccatgcagcggggaagggatgttcagaaagagcgaggacgccatcaagtactggagccaggagaatgttaacctctgcgcagaccggcaaagggaaattttgactgaagcggtcaagatgctgaagccgggagggtatttgctctattcgacctgcaccttttcaccagaagaagacgaggagatcgtcagctggctgctggatgaatatggctttaagcttttgccacttgcggcagagaaagccgcgcctggccggccggaatggggcaacggggatgctagtttagcaaactgtgcccgtttttggccacaggacggtgttggtgaagggcagtttgtcgccagtctgcaaaaggcagctggcgaagaatgctttgcagctgaagcaggagaagttttttctccggtcagaaaaaacgaggacaagaagaaaaagggcaaaggcaagaataaagggaatagaagcagcctggagcggccaagcaaggaagagtctggctatatcagtgaagctatagccggctttaactggccggaaagtctggcttcctggccaagccagatgctgaagagccaggatcatgtctttgtcccggcccttgaacctgaacaattgaaagggatcaaggtccttaacaacggtctggaactggggattttgaagaagaagcgctttgagccaagccaccagctggcggaagttttaggtcaagttgaccaggaaagagtggttgacctgactgaagacgagtatgaccactacctgcatggggaaagcctgcaagttgactccagcttgaagggcttcgtcttggtttcctgccgggggatgattttcagctttgggaaactctctggcaagggacagctgaagaattactatcctaagggtttgcggcaatagcagattagctttacataatttttcttgtgtgaaaaggagacagcatgatgaaggtagccctggttgggtgttcaaatcccttaaaagcagcatatcggccagttgttgaccagctggtaaagatcttggaagaccggggactggaagtcgtggtcagtcaatttttgaccgatgatacattaatcggccggggagaaaagcgggccagggagctggaaagtttcttcctggatccagagatggcgcatatttttgacatttctggcggggacttggccaatacggttttagggcacttggatctggatcagatcaaggacagccaggcggtcttttacggctacagcgatttgaccacgatcttgacggccctggccaaaaacggcaaccaggcggtcaacttccagctgcacaattgtctgctcaacaaggatttgctgaagagcggctattttgaccgcctgctggcaggtaaagaaaaaaataaagagctcgatgagctagaagtgacttttgtccggggaagtggaatggcagggccagtttacgggggcaacctccgctgcctgctgaaactggcggggacgccctattggcctgattttactggcagcatcttgctgctggaggcctaccggggccagccggagctggtagctagtttacttgagcaatgctgggagaccgggatttttaaccagatcagtggcgttttactggggacattcagtgagctggacaagttaagagcaagccagttgccagcagaaattctcctggacctgctgccagcacatgtcccaatcgccaagacagaatttattggccaccggccggatgctaagacaataaggctggggcaagagtgcgttttcaaggaagttggcgtataatataagtataaaaccgcccgctaagccccgtagaaatcgggtgattatgatgcttagcgagaaaattattgacttgttggtatgctttgtagcattcgttgtatttgcaattgtcgtttctatctatccagaggaaatgtttgcattgttgatcgcgaccgttcttttgatcggcatttatgctgtagttaaggaactggtcaaggactggttgaaacacaaccatcgttttggggtatgacgggcggaaaataagcgcggactggattaatgctagaccgcgtttttattttgaagcggagaagattatggaatacgaatacagactggttgaccgggatctggcggttgacggagtaaaaaggctcttgccagatgtagtttggaaaattgccaatacggaactggttgaaggtattggactgccagaggttcagatgatctgcgacggcaaagcaactgaagggatgaccgtcaaggaagtgattaccgtgcacatctgaagcgggcgatgcagttcatgctgtccaaccttgaccggccagttgacttggacctggtgaaggaatacaaccggattgtatgtgagagcttgtgtgataagccgggtgagatcagaagctacccggtgaggattacgggaacggattataagccggggatgccaggtattgaaaaaattgaggaagtgttgcggctggcaaaagagattgaccacccaataaagcaaggcttctatctgtttggccatattgccagagagcagtggtttaatgatggcaacaagcgcaccgcccagctggtggccaaccatgtttttgtccaaaataacgcggcaatgctggcagtcccggttgaagagcgggaaaacttttggcacaagctggtgaagttctatgagactggccagcaagatgacttgaacgacttcttgtacaagacctcgattggaatcatgccgggcggtttgaccatggaaaagacccgggagatcgagcaaagaaacagaaaatggttggggctggagtaaagcaaaaatgcatccctaagtatgatctttcataccaaggatgcatttttgcgcctattaagttattagctcaagccaagaatcgatttagcagctctgcggccttggtggatagctccagataccgccgtacctgagcctgggtagtaggatccgatccagccgccggcgttcatcccggcagcgtaaaggccaggaatcggttgcccaaagttgtcgatgacattgcactgcgcgttgatcttcaagccgccgatcgcgcccaggttgccaggcgtgttggtgtaggcatagtagggcccgctaaatggcttaacgcccatggtccgttcatattccggatctctgccttcagccgcgtgcttattccaggtttcgacgcttttgactaggttttcagctggaacgccaatcttttccgccagttcttccaaactgtcggcagtcttaaccaagccgctttcgacgtccttggccaggcttgcttcattccatggagaagccggcgcggtaatcgagtccttgccaaaaatctggtaggtcggcttgcccaattttttctcttcgttgaaaattgcccggaagccataagcgtaggtggcgtcttcattggcaaagcgcagcccctgcccgttgataaaaattgatgggatagtcggcaggcggtcatcagtcccgttgccagtccgggcatcaaagtcaatcgtgccgccaaagccagtgacagccgcgccaatgttcatccccatcacgatcccgtcgcctctgtcagaagcaacagaccagcagaggtggcgcttgacgtcttcataatgctgcggactgaggtccttggccagttctgcgttttggtcaattgaggcagctgacagaattaccccacggttggctttaaaagcgtagagcacgccgccttgttcagcaatcaccccggctacttcactagaggtctcgtcctttaagaccaaagcaacgacagctgtgtcgaattggaattctgccccttgatttaaggcgtattcgtagagcttgcgggttgcgataatcccgttgccgccagcaccgccgccttcatagacatggattctgtctgcaaaggaatccttggcgtaaggaatttcagtgtggccatacacgctggtccacttaacgccaactttgtcttccagccattccagatttttgccggcattctgggtaaagtcacggacaagcggttcatataaacggccttcaccagcagccagatattcagcttcgtgctgttcaggcgtatcgtccttgtagtcagtgaattccttttggtacttagtgccagccgcctgcataacgccgccggaaaggctagtcgtcccaccaggaatgccttgcttttcaatcgccaagacgctggcaccattttccgcagccgttgctgcagcagaaagcccggcaccacctgcaccgacaacgatcacatcatattcgtcgtcgaattcaatgtcgccttcatagaacttttccttgaggaggggatagttgttaggctggttatgaatagaagcagaagagatagcgtcaacatccccgctagtagcttccgcataagctatttgagctgcctttcttagggcgccggttgaaactgaggcaccagaaatagcatctacctcgactgaatgctcagcgttggcttcttccagccaggtgtcaaccccaagagcgccgaccgtgtttggcacttcgccttcagcgctaatcttgaggatcttaccgttttcgacttcaacgattgccgtgatctccgagttgaaaccatgggctttagctctgtattcggtcattattttttctccttaaaacgcaatgctaatattgcttgttttttttgcggtgttggttacgcttacaagatctatgataccatatgttatttattttataagcagaaaataataaaacggtttatttttccttcatggtaaaataaagctgttagtaagtaggtgctagttttttatggagaaggctattgactgaattagagttaagaagggctaacgtcggggatgcggaaagattgcttgaaatctatgctccttatgtggagaagacagcaatcacttttgaggatgaagttccacctattggcgaatttcaaaaccggattttaaaaactctgcagatctatccctatcttgtcgcacttaaagatggcaaaatcgttggctatgcctacgctagtgcatttaaggagcgggcagcttatgaccacagcgtggagttgtcgatctatgtcgacgctaatgtccgtcaccagcatgtaggcagatttttatatgacgcgatggaaaactgcttaaagaagcagggttttctcaacttgaacgcctgcattgctgctcctattggtgaagatccgtatctggatgacaacagcattcgtttccatgagcacttaggctacaactttgtcggccgtttccaccagtgcggctataaattcggccgctggtatgacatggtttggatggaaaagatgcttggtgagcataccgtgcctgcaccagcgatcattccttttccggagatgaaaaatgattaacgacatcaataccctggctgactacttaggctcccgcgacttgccggctttgaccccggcagccttagaaggaaaatacggcatcccccaagccgacgctttcgtcctatttggcggcagtattttgcccggcggggatgtctttgccgcggctaaaaaggctgagattgccaaaaaatacatcatcgtcggtgggcatggccacacgactgatggcttgcggacccaggcaaaagccgtctttccggatctggaagttgattctttgtcagaagcggagatttttgccgcctatgtacaaagaaagtaccagattactgccgatttacttgaatgccggtcgaccaattctggcaacaacatcacttacttgttagatctgcttaaccgtcataatattgacctgtcatcggtcatcctctgccaggacgcgaccatgcagctgcgcttaagtgctgtgttacgcaagtaccggccagagctgaccatcattaattacgcggcttaccaggttcatgtcttggaaaaagacggacagctagcatatgataaggagatccctggcatgtggccaatggaccgttatatcagcctgctcatgggtgagatcccgcgcttaagagacaacaaagatggttatgggccgcttgggaaggactatatagcgcatgtggacctgccagcttctgttgaaggggctttttcccgcctgcttaaggaatatggcggctctgtccgccaggctaacccggcatataagagctaggttgaggtgaaaaatggacgtagaagaagagatttttgctaaaagacagtgcaggtttaataagctggccgcctacggcttcaagaaaaatggtgatgactattatcttgaagttcccttgaaaagtactaatttcctcgcaaaaatcagaatttcttcagctggtaaggtcagcggtaacgtctatgatcttgataccggggaggaatatcttttactccgcgttgaaagtaacacggtcagcttcagcgccgtagtcaaggcggaatacaggacgattttacaggatattgccggtaaatgcttcgtcaaagcccaggcagaccggatcaaggatgaaattaaggcccgctacggtgatgagccggattttccttttaagaaattcccggactacgctgtcttccgtaatccccagaaccggaaatggtatggcttgctgatggctgtgcctctaggcaagttgacagatgatgagaaaggccagcaggaagccgcggtacttaatttgaagctggctgaggaaaaattgcctgctttgctgaaaaaggcggattttttcccggcttatcacatgaataagcaaaacaggctgtcagttctgctcaataatgatctgccagatgaagaagttctggccatgctggacgaaagccgggcttttaatgttgcttttacagaaataaaatagagcttccagaatttttctggaggctctatttgcatcttaccggaaaagctgggacaagaccggcaaaaaacgatacgataatattgtaaaagagccaaagagaaagaaggtggccagcatgaaggttaaagttgagctgaataaagaccaggacttgcccctggcagtgatctataccgacaaaatgactgaagaggttgagcgggcagttgctttcctggaaagcagcgccagctctggcccgttaatcgcccagcaggaagaccgcctggtcatcatcaagcctagtgacgtcatccttgtccgggtcgaaggcggcgatacggtcatctacaccggaaaaggcaagtatttttccagaaagcgcctgtatgaggtctaccagcagctgggccaggacttcatgcagatttccaaacaagccgtcgtcaacttgacctgcctggaaagcgttgaagcatcttttaacgggaccatgtttcttcgtttagagaatggcctgtctgattacatttcccgcaaatacctgcccgcttttaagcagtatttggggctctaggaggggagtaaaatgtctgccaagaaaaatatcctggtcagttccctaattggaattggcatcgccgccgtctcgtcctgcctggtcagcttgttgcttttagcaaaaggagccggcagcttgaccatgacggttgctgaatatactcagatgctggccggcatcatcttggtcggcctcggttttggcctgcccagcatcgtttatcaaaatgaaaagctggcaccagcctaccaggtcttaatccacatgggaaccggctgtctggtcatgaccctggtcagcttttggactggctggatcccggttaaagccggcttttggccggccttcttgactattgccggtgaaatcgccgttgcctttattgtctggctgattttttaccagcaggaaaagaagctggcccggaagatgaacgaccggatcaagcaactgaaaaagtaacaattaggcaagattggaagaaattccagtcttttttcgtataaacaggaaagttgaacttgtaaaaaataagtagtattgtttgtatatcttttagattcaatctatagaaatgtgagctaatgcaatgaaaaaatacgactacattatcatcggcagcggcccggcggctaaccacctgctcttcaaattagcaagaactgaccggactgccctggtcattgaaaacaacttgtggggcggaacctgcccgaataccggctgccagccaaagatttttcttgaaggcgccgttcgtccggtcttgaacacatattatctgaccggcaagggagtaaaagcagccgcccagctggactggaagactttgatcaagcgcaagaaggagatctgggcagaatttcgcgcagaagagcggtccagcatcgaaagcgaccaggtggatactgtctttggcagcggggtgatcacaggtccgcatacggttgcggcagctggagaggaatatgaaggcaaaagcattgtcattgcgacgggtcttctgcctcaccacttggaagtgccgggtagtgagtatgccattagcaatgatgagttttttgacttggatgaattgccgaaaaaagcggtcgtcattgggggcggctatgttgccctggaactggctacaatcttgcaggctgccgggagtgaagtcacggtcttgcagcactctgagaagttgctgagggcttttgaccaggaatatgtcgagaaattgacggaaataatggaagagcgcggcattgtgattcatctgaacactccagttaaggcaatcgccaaaaattctgctgcttatgaggtaactgcggaaaatgggcaaaagtttgaaactgatctggtaatcgacgcctctggccggcgggctaatgtaaacggtctgggcttggaaaaattagggatcaagtttgatccggtcaagggcgtggcggtcaatgagcacttgcagaccaatgtcccgagtatttttgccgccggggatgtcgctgacaacgggcagatgaatctgacgccggttgcctgggttgactcctaccacatttatgattttgtcgaaaatggccttactgaaggaattaagtacccggccgtagctaccagcacctttacttacccgcaagtcgcccaggtaggcaagcgggaaagtgaaatggcagaaggcgatacggttagaagaatgaagctggggtcgacttttgccgctttgggagagggcgatgaagaggcggaattaaaggttatcttcaacaaggatggcgaagtggtcggcgcttcagaaatcagcatcaatgccggggaggacatcaatctcttcgccccgctgatcgggaggaaggacccggcagaatttgccatgaataatttgggcttcgccttcccgactttagccaacaaattggacgttctcttccgctagaagttgacagcaagttgaaatttgaaaaaattgaattcgagcaaaggtttatcctttgcttttttctttgcccacggattgaattttagctgcttttacagatctttttgcctgtaaaaagcccgtcagaccgggctttgtcaagggtgaccagcggctttttcctttagggaaaatctgctttaatcaaaactgagcttcgaacatttggtcgagtgatgaatgtgaagacagaaaggagaatgagatgacgtattcaattcagcagatccgggagggcttagagaaagctggctatgtggctaatgacgaaatcacgaccgcgccagaaaccatgaggaatttgcaacttaaaggcggggatgtcctatggcgaacttacagaagtattgcggaaggtgccaaccattggcgtctatttgccaagcgaggaaaagatcttcaaggatttgtgccgacgggtgaagaaatgctactggcttaatcctgaagctaaaagcaaatggaataccggagactcagtcatcggcagatataccccatatgtcagtgaactggctgaggtaaccaatacggcctctttgatcaaatttttgtgcggattacagaattgaggatgaagatgaaagaagaaagcaaagtcttaacagaaaaagaaactgaccagctggtcagcgacttctttgagaattacgagagctactttgaccggccatattacatggatgtgctggcccagcccctagctaagcagtatctccggcctagcagcttaaaggtttgcctggcttaccaattgctgactaaggagtggctgaaagccaagcttgaggaagagtctttccatgataacggagagaaggagcggatctacctggagcctggcaagctgaagaataatttgcctaaagaagattgggatctggccagcgactacctgtttccaggagacaagcaggcttacctggaactgacagctgataaaaagaaacttctcttaccaagcaacaagcgccagcagcttcagcactttaagacaagtttggctaattgccagtcctggcaaaagctgctttaccatatcaaggaaaatcatgctgacctgtcggtcaattggcatttcaagaaccagtccaaactggaagtgactttgacggggagaaaggatcacgagcatgcttttgccttaaaagagccagaggcgatggacgaggagtatgacaagtttttggcaaattcgaagaagaaagaggcgaattacaagaaaaagatcaaagaaaatgttgctgcttccagcctgcggggggacctgttagcccgggcaattgcccagcttgctttgagaaatgagacgcggattacgccaaataactgtctgaagattctgcggggattgtcttatccggattatgacgccatcaaccacagcgactatgacagacattttcgctttctgccaaaccaggagattctgcaggtaattgaggcgatgcaaaaagacggacttatcgcggctgaagaacgcttttattctgactatcatgtctattaccatgaattggtgccaactgatttgactgaggaatttctgaatgcggaagcagccgaagggtcagatcttgccttgctgaaggaacttaatgagtctgcagataagactgatctttccgcttttaacgttgtcaaattaagccaggaacttctgcagcatcccgccctggtttgcgttgaccagggctatcaagcctttatcgaccagcatgacttggcaagagaatacctgaaaacccgcctgcagctgacgaccaacaagtttaccaagaagtatctccgcctgcttttagagggggatgcagaaaaaagcatccctggccaagcggtgaatgcttgattggggatgcttagtaattggtatagagtatttaattggagtgatactactcggtcagctggtcaacgaaagtcaggtatgcagcttgttcaccagtttctttggtcttcaccgcctccagcttaacctggccgctgtgcagctggtcttctggaatttcaatagtatgggtttcagtcgcgttgccgatcagttcgatccagtagccgtgatccttttggtgcaagacggtcttgaccataccgccaggattgtagacagagatctccttttcaaagtggcccaggtccgggtgagtcaaggcaaaggccaatgagctagctgacatccctgtcccgcaggcattagtaaagccaacgccccgttcgtaggttctgacaaaaagctggctatcgccgcggataacggtgtagttgatgttgaccccgtctgagaagtatggattttcgccattcaagtaggcaccaagctctcctaagaccggactttccaggtcttcttctttgataaaggcgatgaggtggggattaggcacggccagagcactaaaacgccagcctggaaccagttctggtaccagagtgtccagcaggcggtcatgtcccaaattgtcaaaaggcaaagattctttattgaagcggacaggagagatttctaccccgaaagccggcactccttctgcaaagtcatcagcttgccggacagccaggtctgcgtacatggtttccaccttaaactggctttctccggtcttttcgtgcaagtagcgggcaactgttctaagaccattgccgcacattgaggcttcactgccgtcagcgttgatcacccgcatcttgcctaaaacgcctgggtggcttgcttcctcaactgacaggatgccgtcagctccgccaagcaggccagtcttgtgatcagtaagtgtctgggtcaattgccgcagttcattatcagtcagcggattttccagttcggtctggtccagaatgaagaaggaattctgtgagccgtggactttcaataatttattcatcttattctccttgtgcttcttgcttgaaaaagtagtcgtaaatcgcggctaccgcccggtcggcatctttagctgccgtgcccagcatgatagaaatttcggaagccccttggttgaccatccggagagaaataccctctctggctacaggggtggcaatatcccggatgaccccgatccggtccctcatcccttcaccgaccagcatgataatcgcgtaatcgctgatccattccaagtggtcaggactgacttcattttgaatttcattgcagatctggtcgatcaattcatcgtttaacgtgtcccggtcaaagatcaaagtcaagtcgtcaatcccggttggcatgtgttcataggacagtttgtacttgtttaagatttgcaggatgcggagggtaaagccaacttccttgttgagcaggtacttgtgcaggtagagggcaccaaagtgcttgccgctggcgatcccggtaatgacggtttcaggcttgaagcctttttccggtacgatcatggtcccgcgcttttccgggtgctgggtattcttcacattgattggaatctgcccttgaatggccgggatcaaggcttcatcgtggaagacagagaaaccagcataagacaattcccgcatttcccggtaggtcatcgtgtggatcggctggggctggtcaacaaccttcgggttagcggagaaaatagcatcgacatcagtaaagttttcatataagtcagcgtggaaacctctggccaaaatcgccccggtaatgtctgaaccacctcttgagaaggtagcgatatggccagccagagtatagccgtaaaagcctgggaaaatcagcttttcgtcagcgtcataggcaaagttttccaggagctggtagctttccgggttgacagaggcattgtttggactaccggtaacgatgatcccggcatctttaggatcaacatagcgggcctttaccccttggctttgcagaatcttcgcaatcagcttggcgttaagccgctcgccgtgggccttaaaggcagcctgcagatagttcttgtttggatagtgctcctttggcaaattcagcaggatttctttcaagggcaagatttcttcgagcggcaagttaaagtactcgccgatttcaacgtagcgctggaagatccggttagcaacttcaagcccgtttctgccatggctgatttcatgggcgtacttgatcaaaaggtcagtgaccttgatgtcatcgtcaaatcgtttgcctggggcagacgtaacgacaacttgtctttcagcttcagcggtaataatcttcaaagcattttctacagcagggccgctagccagggaactgccaccaaacttaacaactttcatgggctactctctttcgtgtttgtctttaatcataatttaagtttaatcagaatggactttaccatttttctctggaaaatgcaaagaaagattctgaaaaatcatgataatcgccttctaaacattgtgataccagtgcttgaggaagcttgaaataaaaaatgcaaataaaaagctgaaaagctgttgacaagatgaggccaatattataaactgactacaaattgaagaggcgcaaccgacaagagtaaggcaagggagccagccaggcggagaacttgcaagaaaggggaggttgccgaagcgtccgttttggcaaggcggattggctgggctatggcttaagaggccatggactgtcgcagggaaggtacctgcgttgcgcttgcaatttgacgagagaatttgattttgaatttttcgggctccagattgttaaggcaatctggagctttttctttgcctcttcgaagtaacagaaacagatgcagtttagaaagagaaagatattatggcagaattagacgcgcaaagcattatcaactacattggttcagcaccaaagaagaccccggttaaggtttacttgcgaggcgccggccttgatcaagtcactttcccagaaggcacggatccttttgtcagcggtcaagctggcgtagtcttcggcgactggcaagatctcaagccgtttttagcagaacacgaagctgactttgaatctgtccgcgtggaaaacacggcccgcaattcagctgttcctttgctggaccttaaggaaatcaatgcccggatcgaaccaggcgctattatccgtgaccaggtcttgatcggtgataacgcggttatcatgatgggggcggtaattaacattggcgcggaaatcggtgccggctcaatgatcgacatgggcgcgatcttaggcggccgggcgatcgtcggcaagaactgccacatcggtgccggtacggtcttagccggggtggttgaaccagcttctgccttgccggtccgcgttgacgatgacgttctgatcggtgccaacgcggttgtcctggaaggcgtccacgtcggtcaaggtgcagttgtagcagcgggtgcggttgtgaccaaggatgtggctccgcacacggtggttgccggcgttccagccaaggtaatcaaggaagtcgacgccaagacagaaagcaagaccggcctggaagaagacctgcgtaagctgtaaagagtcaagttaaagtaaacaaaacagacataagttagtccacattaaggaagtttttcaatggcagtattgaccgaagccgagttgcttcaaatccggcgccaactccaccagatcccggaattggctttaaaagaatatcaaacccatgcttatctcttggatgtgatcaagcagatgaagcaagactacctggaaatcagggagccagcagaattgccaaccgcgctcctggttctggtcaaggggtcaaaggctaaacggaccatcggctaccgggcggatattgatgctttgccggtaactgaagcaaccggcctgccatatgcttccaagcaccaaggcgtgatgcatgcctgcgggcacgacatccatatgacggttgctttgggtgttctcagctactttagcgagcatcagccaactgacaacctcctgttcttcttccagccggctgaagaaagcgagagcggcggcatgaaggcctaccagctgggacttttcaccggtaagtggcatgttgatgaattctacggcctgcatgataacccaagtctgccggctggggcgattggttgccgggacggcaccttgtttgccggaacgactgaagtcaacattgatattcaaggcaagggcgggcacgctgccttcccgcaattgtcaaatgacgcggttgtcgcggcagcggccttgattatgcaggtccagaccatcatttccagaaatattgatccggttcaaagcggggttatcaccttgggcaagttgactgccggcaagatcagaaacgtaatcgctgattcagccagaattgaaggcacgatccggggacttacccaaagcatgatcgaattgatcgacaaaaggctggccgaagtctgccagggaattgagctgagcttcggcgtcaaagtcaagctggaactcaaccaaggcggctactggccagttgaaaataacccggaattaactgaaaacttcattaaatacatgaagcaggctgacggggttgaatatgtcgaaacggccccggcgatgaccggggaagacttcggctacctcctggctcagatcccgggaaccatgttctggctgggtattgaggacgattcacccctgcactcagcaacattaaccccccaggaaagttcaatcagccgcggcattgcggcaattaccggctttttggaataccggatgatagaagactaaggaaacaatagaggcaaatacaatgaaccaaaacttacaaaacgcggacttactgacagcaatcattacgccttttacggaagacggacagatcgactttgccagcttgactgaattaaccaacaacttgattgaccagggctgcaacggctttgtgattggcgggacaactggtgagacgccaactttgacccatgacgaaaagatcgccttgtacacccgctttggtcagattgtaaatgggcgtgtaccggttattgccggcacgggcagtaacaacacagcggaaaccattgcttttactgaagaagttgcccagatcccgggcatcgactatgctttggttgtcgttccgccatacaacaagccaagccagcggtcaatgatcgctcactttacggcagttgctgaccaggttcacattccagtagtcatctacaacattccgggccggactggggttaaaatggaagtgtcaactattttacagctggcccagcatcccaatattgccggtatcaagcagtgcgccagcctggaagaaatcgaagagatcgtatccggccggccagtagactttgccgtctttaccggcgaagatgcccaggcgctgacggccagaattttgggcgctgacggggtcatctcagttgccagtcacctgtacaccccaagaatgcgggaaatgtacgatgaactttacgcgggcaactttgccttggccggcagcctgcagcgttggctgaccccgcggatgaacgccctgttcatgttcccgtcaccatcaccagttaaggcggctttagctgccatgggttaccaagtaggcggcttacggttgccgcttgtagctttgaacgatgaagaaaaggaagaactcgccactgctttgaagctgccgaaggatgcattagctggtcagctgacgcgtgatattttagaaggagattaagatgccaagaattttattggccggttttgccggctcaatgggccagcaagtcgttaaattagtagcaagcctgccagactttgaaataacggccggcctggcccaccgtttaaagagcagcgatccagcagactatggcctgccagcaagcgctaagttgtacaccagcctggatgaaattccagccgacgcagcagatatctgggttgactttactgtaccagcctctgtctaccaaaacgtccgctatgccttggaaaacggctaccggccaatcgtagggacgactggcttgactgaccagcaagaagccgagctgaagcaattggccaaggagaaggggattggcggcttgatcgctcctaactttggcatgtcagctgttttattgatgaagttcgcccaagaagcagctaagtacttcccagacgtggaaatcatcgaaatgcaccacgaagataagaaggatgctccatcaggcacggccttggccacagccaagctgatcgctgaagtccgcgagcctcaccaaactgcagcagacacgatagaaagcttgccaggggcaagaggcggcgattaccaaggcatcaagctgcacgcggttcgcttgccaggctacgtcgctcatgaacaggtgctttttggcggcaagggggaagccttgaccatccggcaggactcctttgaccggtcatccttcatgagcggggtcaaggttgccttggaaaaggcagctgacttagaccagctctatgtcggcctggaaaacgttttgtagacagtattctttgttttttatagaaagacgatcatcatgccagaaacagatcctaacttgcaggatttaggcaacagaaatcttgctaaaatcgcgccttcagccatccgggcttttgacgaagaaatctcccagatcccgggaatcatcaagctcaccttgggggaaccagacttcgcggtgccagatcatgttaaaagggccgctattcggggaattgaagcagacgactcccactacgggccatcaaaagggaagctggccctgcgtgaagctatcagcaagtatcttgcggcaagcagacaggttgactatgacccggaaactgaagtaattgtcactgacggggcaactgaagcaattacggcaactttactgggacttttaaatccaggtgataaggttttagtgccaacaccagtcttttccctttatttcaccaacattgaaatggcaggcggggaagtggtgatgatcgacacctcagatactggcttcaacttgacgccagagcggctggaagcggagattgaggcggccggcgaccaggttaaggcaatcatgctcaactatccatgcaacccaacagggcggacttattccaaagctgagttaactgctttagcggaagtgatcaagaagcaccatttgctggcaatctgtgatgaaatctacagcgaactgacttatgaccaagaatatttctctttggctactttactgccaggacaggtaatcttgatcagcggcttatctaagtcacatgccatgaccggctaccggcttggatatatcgcggctccggcaagtttactgccaaatgtggccaaggcccacagcttcatggtgacctgcgtggacaatatcgcccaagacgcggcaattgaggctttgaccaaggggcttgacgatccaaaggaatttaaggcagcctaccagcgccggcgggacttcatggttgataatctgaccaagctgggctttgaaatggccgtaccgcaaggggcattttacatttttgccaagattccggagaagttcggcagtgatgactttgctttcgccaaagatgtggctaagaaagccagagttggtctgattccaggcagcgtgtttggtaaaggatctgctggctatgtccgcttttcttacgcggcagccgatgacaagctggcagaagtagtcaagcggcttggtgaatacgttgctcagctctaatattttttctaagacagcagtttgctgtcttttttcagtttgctgtctttttttatgccgaatgatataatttagaaagaatctaaagaattagtatgacaaggagcatataaataatgtctgaatacccacaacttaaccttgaccaagccaagggcccaaaggcaactatcaagaccaaccacggcgacatcgccattcagcttttcccagaagaagcaccaatgactgttgaaaacttcgtccgcctggcacaaaagggctactacgacggcgtaactttccaccgggtgatcagcgacttcatgatccaaggcggggacccggaaggtactggtgccggcggtcaaagcatctggggccacaactttgaagacgaattctcaaacgaactcttcaacctgcgcggggctttgtcaatggctaatgctggtccaaacaccaacggttcacaattcttcatcgtgcaaaacaagaacatgccaaagcgcttcattcaacaattgcgcgatgcccaatacccagaagaagttgtcaaggcttacaagcaaggtggtacgccatggcttgaccacagacacactgtttttggccatgtaactgaaggcatggatgtcgttgacgaaattgccaaggtagccaaggacggcaacgacaagccacttgaagacgtggtaatcacgactgttgagattgctgactaagagtaagtaagaaaggtttgcgtgaacaagagtgaagttaaaacgggtttggctcgttaagttaatatttgtactggcttttgccgtttttttagcgccaaaggcaaagactacggcagcttcagatgctgacaaaccgttttacaagaatgccatggtcaacacttacgtgtatgacgaaaaaggcaaacggaccaaggacaagaagatcctggccggtaaagccgttggctgctacagcatgattaattatgttggtgacaagccatatatcatgatcggccaaaacaagtacgtggcatatatgaacgtggttggcttggattgccggttgaaccataacagctacatttattccagcagtggcaagcggatgaagaattccggtgtcttgctgaagaatggcccggtaactgtctatggcggcaagaaaaagatcaatggcagcaagtactgggcaatcggcgttggcttgtacgttaaggcaagcaacgttgaaacgcctaagggcgaagtcactagtgatccaaacacgcagaaccaaacaactgaaccgcaaacatcttaaacttgagcactgcaaatgcagtgcttttttgtttggaggggatacgatttcgtttttagctaatagttcgaataatacatattatgtaaagttaagctaaaaagaaacgagagaggtggcgctggtcgactggcaggatctgcttcagcatgttatatttaaagatattaaacgtacttagtttttgtttctatttattatttgacgacttactggaggaaaaatgtttagctacaaagttgatgacgaaattaaattagctctgccgcggctgagcgatgttgacgagctctacgccttgattgatgcagatcgtgacgaccttggaagatttttaccatgggttgaccacgtgcagtcaattgacgatgaattacctgctatccaaaacgacctgaacggctttgcggctgggacgtccttgaacttgttaatttggtaccacggccgcctggctggcaagatcagcttaaataagtttcataaaatgaacctggaagctgatatcggctactttttaggcaaaagtttccgcggacacgggattatgaccagagcggttcaagctctgctggacatcgcttttgacgaatacggtttgcaccgggtttacctggagtgcgcggctgacaacttgccaagcaacggcgtagctcagcgctgcggcatgcggattgaaggcactttgcacggccgcttgatcctcaaagacggctatcacgattgcaatcactacgcggtgctggctgaggaatggccagatatcaaggctagcttgcagtagttactaaaaaagtgcgactcactccaccgataccactgccggattgacaagataaatccatggcttggtttctttaaaactataattttaatgacagaagttcgaaatacccttttggctcaaggatttgctttatagcaattttactgagtttttgagcattttttatttttcttttctgcttttgatttctgttttatcaagctacaaaaaatctgtccgtattgcgacagattcactagctagtctgtcaaatgaccaagttcaaggattttggctgaacgaccagatgatacttcgctgcttccttcttttcgccatcaagattcattgcagcaggcgttgttattacgcattctctcacctgtttcactactacatccttacagctaatcaggtcctttcgcagaattttatagatataatatggtgcgaataagcggttcacttttggcaagattaccatgtcaatcagaccgtcgttgatctttgagccgtaaaaacgtccattgcagaacgcatagagcgtgacctggtcgttaaaaagcaggccattttgtggcctatgacctttactttggcaaacttatagcggctgatattgcgccgaattgaagctacatatgccgcgcttttaagcgttttaacgccaggcaatcaaggcgtcaagtccaaagcagccaacgttgacgcagtagcgctcatcattgactaaaattgtgtcaattggaatcgctggctggtctaaagtcgctagatctcgtaatctctcccctccatcaccctttcgatgtttttgatgagagaatcacttctggactgatctggacttgattagaaaaacatgcttcatgtatgatatcgacttccttttacaataatttaatgtaagcacaaactcgccggtttgtacagaagccgtagcaaaaaggaggtagcaaggtaccgcctcccctgttccctcccccgcttttggaggtgagtttttagtcgcgctactaattagtagcagaattttttgaagagatggtataatagtggtacaaaaatcaaggagatattggagcctatggaagtcgctgaagcactgacaaagttaaaatttctggtcagtcatgatagatttaaattggttgcaagacaaggcacaatgaaagtacctgtttctcgcatgttagcaaagacaatcattgagcaattgtcgtcagaagaccttgtaaaacacgagcgaaatcgcaataattatactcaatttatctgggtgtttaaaactgagtatgatcaaacgtactatattaagtttgtttttgccgaaaatggtcatcttgtagtctttatcagttttcaccttgattcgaattaacaaaaaggagatgttttctatgtcatacgtaaaagattttacgacagtctacactatcggaaaccgaaactacgaaatcacagcgccagctcgctttgatgatgaaacaaatcagccaatttacgatgctgaacttgatgaacgtgcatctgaaatggctagacaagcgtatcgcgacgacatgggtctcctctcgccaacagaactcaaaaaatatcgggctaaagttggtctttctcaacgcaatttggcagaattgacaggacttagcccaaatactattgctttgtacgaagctggtgcatttcctacaccggcaaacaataaaatgttaaagtacttgatcaatgacgatgaattgttgcgtcaatacataatggatgacactaataattactcaaatgatcttgttgctaaggtcaaagcttatcttcagcaaaaagatattgttgttattgaccaaagcttccagccaaagttcactgctgtacaattggcaaattggctaagagttgaaaattattttggccgagaattagatgaaaacgttgaaccattgacacaaatgaagctaatcaagctactgtatttcgcatatgggcgctatctagtgaaaacacacaacaaattatttacgtcttcaatagtgcacttacagtacggtccagtaattacagaagtacatagcaaattcaagggacttacggtattagatactggaaagcctagtaaagaagcatttgatgattacaacttggtttctaaagatagcgatatctctcacctgttgagattagttaatgaagactacattaattacagtgcatctggattaagccaaaagacgtatcaaccaggatccccatggtctttaactgatgacggcaggattatcaaggatcaattgatttttgatacattcagtaatggcttagaagaataatggcattttactgacaacgaaagctctacccaaactttaggtagagctttttctgttctatttaattcattgctgcataagcactagcatacctgccagcaattcgacctgaattccatgcaaaagcgttgcttaagccttcaattgttggataagatgagtcataaaggcctgatgcgtcatttccgacagcataaataccatcaattacttgcctcttcacatttagagcctcaaaatgctcattgactaatgcaccaccgacagtccccagggtagttgaattagcacgaactgcatagaaaggtccctctttgaccgacaaagtcatgaaacggtcatctttgtaaagatccatgtctttaccttctaccaccagttcattgtatcggttaactgttgcagtaagatttgctggatcaaccgcaatcttctctgctaatttttgaatgctatctgccttgaagacagcaccttggctgataccctcatttaaatcttggtctagttgcggatatggaccaacttgataagtcattggctttttatctagcaggcggaaggttctttcaaatgaacttgtccagtccaaagcttgctgacggagataatcgacagttgcttggtcaaagaggaagtagtagtacccaccgatctggtaaactgaatcaccccataatgcgaaatcatatactacgtcttcattagtaaatcgcttgccttcccggttaacccataagagtgggatgttggtcaagtcaaaaagacttgcgttgtgccactttggatccgtctttgagtagacagttgccgcatggttttcaaaaattctcttgtaatcgctaacgccgccagcttctttgagcatctgcaggccatcaccggtagctttccgttcacccattgagtacaggtcatctggatcaattgctaaagtacgcttgatttcgtccttattgccaacaaatcccccatcagccaagattttccaaggtgatttcttcgccttttctgtttgctttaacggcagttactttaccctgttcttgaacaatttcttcggctgaagtttcggtcataaggactccgccgctttctagaaatttgttcattactcgcttaaatccgttaaatttatcgataaattggtggtaggttctgggatgctcctggtggacttcttgagtgttggtcactaattcagtctccaaacctgattcagccatccaatcgattgtagctgctgattcttcaagaatggccttaaccattaacgcattagatgaatggtgagtataattgatgatttcctcataggcatcttttatgctgtacttcactccagcctctttttgagccctgctttcaaccgcaaatagtccttgggcaccaaacatccctgcaccgccaaatttatcgcctttttccaatagggctacttttgctccgcattctgatgcagttaatgctgcactgatgccagaagcaccagctcctactactacgatatcaaagttcattttggtctccttaaaatagcctaattaccttaatcactatatttacattataacacgatgcaaggataccgctttctttattgagattatactgtgttaaggttaaacttaatatcaaaaggagattaacatgtacaattctgaacttgatacatttctagcagttgcagaagctggaagttttagtaaagcagcaaaaaaattatatatatctacaccagctgtcgttcagcaaatgaatcttttggaaaaacggttaaatgtccagctttttgttaggaatacccatggtgtaacacttactccagcaggaattaaatttattcaatggagcagacagataatttttgattgccaacaggcggagaaggaattaggaaaatatcagcaaaaaattgttttcgcatccgggtatttaaatggacaaaccttaagtagtcgcctaattccacaatttcagaagaaccatcctaaagcacaaatatctttcagagagataaataattatcagcaaatacctgctgaagtagacattttagaaatggcttatgcaaaagagccactgagtgaacacgaattctctttcatatccattgttccttcgcctcttcgagtagctttgccagcaagtcatcccttagccaagaaaaagcaactatctttacaagacttggcggcacaggatttggaaatcgtagctctatctattgcaggttctgaggatgcgatgttaagaaaacttctaaatgttcgcccggcagttaaactgcactattatagcgtgtttaacaaagcagcggttaatcaagcacagctgacaaagcatctggtactaattccagaggcctattcagaattgtgccatccatatattgttaaaccggtctcttggtcctttgcaactagctacggcttctactgtcgtaaaccagtccccaaattagtacaggaatttattgatctcgcccaaaaaagttagtagatttttttacccttggcatatgcttcttttgcct

SEQ ID NO: 2192 - DNA, 7436 bp, Unknown
  gut microbiota DNA sequence
agtgcaactagcatccccctcccccatcagtcctcccagaaaggtgctataataaacatgtaaatcttagaaatacactactcataggagaaaattaccatgcgcaaagcagtaccgatgctggacaatagcttaactacagcagaatttttagacttaatcccatccgccttccaatccgtcgtctttggcacgatcgcaaatggccgcccttatactaacgttgccgatattgaactcttccttgacggtaagctctacttcgcgacgacttaccaaaagagcttctaccaacgcttgcacgcccagccctatgtttcaatcaccgctcttaagggcgaagagaccatgtccagcgttggctttaccctgaacgggacagtcaaagaagtcgacctctcctaccttgacaagatctatgaccagcatcccgaaatgctggagatcaacaagaccgactccgaacgccgggaactgctccggccatttgaaatcacccctactgacggctttgtttacgacttgcggcaaaccccgattttcgaaaaagctttcaccttctaaatccatgcaaaaagcgaccgaaactgtattatgtttcgatcgcctttcatttgctataaaaacttagtcttgcttagtctcttctaaaacaatcccctggtaaagcttaatggttaccaggtagtaaaccaggtacaagaggaagaatgctaagaatggaatccaaatcttgtagtaggggtctggcagaagaatcgtaaagatcttcaagccaaagagtacgtccaggctgccaagtaccgccggtgccacaaacaagatggcaatttcttttctaatcgctgccttcaagacgctgtttctagccccaagcttgtagagcatcttgtaccgcaatttgtcactggctgcggctgacaggatcttaaacatcagagttgaagccagcatcattaagaaggacaaaccaaggaaaaggcccataaattcaaagcctgagcacattgccgcgatttgctggtaaagaaacggcttggtgaattccaggtagccgtatgccattgagtccttgctgaacagcttcatttcttgctcagtaagcttcagcaatttcttgttgttcttggcaaaatccgtaaccttgtaaaaagtgatgaccttagtcgtcagcttctttttggcaaaagctgcatctgacaaggccacaaagcccttgctggaatcttctgggaagaggctggcggcttgagcagaatttctgaccgtagctaaagtctgcttaccagttaaggtcttggaagtaacctcaaccatgtggtaaatccgcccctccttgtcaatcgccttcttcttgtctgaagatgccgcgttatacatttggatcttgagcggcgtctggtcaatttcacttttcttgacatagaggatgccatttttctcatcagccttgtagctgtaagtaactttctcccctgtaccgatttttttaaccttgtcagccagcttcttctgcttgccaactaagacaatatcgtagtacataacgtcagtcatggcattcttcaagttgttgaagttaattccgaccgtaatggcgccaagggccagggccagcataattgagatggctgacaggattctggtatagccatgcaggcggaactttaactggcccagagtgtaaggccgcatccctttgtagaggaagctgtgtctcttccgcaaaaagtcgatgacagctatgaaaaaggcgtcaaagattaaaaagctgcccaaaacgatggttactaaagcgatcggaattgccttaagctgcaaagtagccacatgccacattgcccagtagcccgcagccaaaagcagtacacccgcgatagcctggatagtccgtaagaccggccggctcttcagcttgcttggcttctgatcttcttttaagagattgatcagagtagtcttggtcagcttgaccgtgttccaagaagcagccaggaagaacaggacgacaaagaagagcaaggtccagagaaccgctggcaggtaaagcgggttaaagtgagccagagtcagccccagctgcttgaccatcaaggatgagaccagttcagtcaagcctacgcccaagataatcccaatcccggttgccagaaggccggttaccagggtttcagcgaagatcagctggccgatcttgccgatttttgcccccagcatcatgtacatgccgtagtcccgctttctcatgctcaagaggaagctgttggcgtatgccaagtagaccagggttaagatggccaggaggacgatcccgaaggaaaaaataaacttagttgctcccatggtcagccgtcccgctacactggactttaagaaagacgggttagcggccagagtaaagaacatgtagaagatcatgctggcggcgctaaggccggaaaacaggaccaggtagtcttttagccggcttttcagcccggtcattgacaatttaaaaatcatgttaatccctttctttactcaactagtcggtattttcgctgagctggctgatcagcttcttgtaaaagtcctgccgcttcaagtccccgcgcttgatctcttcatcaatcaagccgtccctgataaagagaatccggtcagcaaatgatgcagaaaacggatcgtgagtgaccatcaagattgaaacctggtctttctcattaagcagctccatcgtgtccagcaaggccctggaagacttagaatccagggccccggttggttcatcggccatcaagattgccggttcatgaaccaaggctctggcagcagcaactctttgcttctgcccgccggaaatggctgctgggtacttttccaagacttcgctgatgttgagcttagcggcgatcttatcgaccttagaatcgatttctgagctcttgaccccttgcaaagacaaagggagggcaatgttttccctagcggtcaggttgtccaagaggttgaagtcctggaagataaagccaatttctttagcccggaagtcggccatctggttcttcttcagcttggcgatgtttttgccgttaaccgtaacctcgccgctgcttggcttgtccaaggtcgacatgatgttcaaaagagtggtcttaccagaaccggaagtccccataatggcgacgaattcgcccttggctacgctgagcgagacgccctttaaggcctggaactgcttctccccttttttaccgtaagtctttgtaacgttgttgacagtcatcactttttccatagttaccccctaaatcgtgtcggtgtattactgttgtgatacactaaataatactggagtctttaagaatcgtcaataggaattttagcgattcgcaaaaaagttgtaacaaaaaacaggtgaagctctcctttagtggaaaaaacttcgtctgtttcaggattagacgaaaaaagccactggagctgttgcttgcttcagtggctgtctggtcttcagttttcttggcttttcgggtcgataaacaagattctgaccttgcagcggatgatttaattttcccagctcattcccttccagggggcagaccgtaatctgctcgtaaggaggatttaactgcagagacaagagctgccctacttcgacttcttcaaggtgcttttgccggctctttccgacaatatcttcaccgtctgtttctaagagccagctttcaatgtgcgggatatcggctaaaacgggttcagtcattttttgatagatggccaaacccagctggatgacttgccttttttcatcgatggacttgataaaggcaaaaggctattgcgcaaggttagctagagcagccctaaccaggttcgcgatgcgcgggttaggcaaatagcccagggtctgccagtaacattgtcgccatcatctttaaagctgacttccatttctgcttggagcaggtaccactccggcgtgcacttactgcctcttaactcagctcctgcttcagctttagtaccttatcttcgatttctttaatcacctgcataaaggtctcatcatcttgtccagttggatcttctaatccccaatctacccgcttttttgtaggcaaataaggacagcggactccgcagcccatggtgatcacgtaatcaaccgccggcaggtcagcgagggtctttggtttttgcccgttggccagcatatcgatgccataatgctctttgatcagccgaaccgcgtcggggttaacctgatcttttagatccgtgccggctgaataggattcaaagacatccccggccagctttttacccaaggcttcggcgatttgactccggcaggaattatgggtgcagataaaggctacttttactttggtcatgatcttctcctgttatttcttctcaagcaggcccaggccgctgatggtaaggtcactggaatcattgacgaaagagaaagttgggatgctatccatgccttcatctaaggcttccatcaaaatcatggcaaaaaattcaaaccagctgttcgttggcacgtcattcctatcatcttgtggagtcagccagaattttgttgctgcttctctcgttttgacattaagcgtcaggcctattgcggtattatagaagtcaaaagtggctttgaaagaatgaacatctggatcatttatctcaatgcctaattcctcggggatctctgcttctgtgatcatcattctgcccgtgattttaccgtatttttcttcaaaatcttgaattgagtcatgtttcttaagttcggcttctacctcgtcaaacaaagcttcgttttctaacataccaattccttcctagcaaactgtaaccgattgctttggtctctattataaactaaaagcagcatcccctgcactaaatacagatgaatgctgctaatgtaacttagttatcttttctaaaaatcgttctaaacaagaatcttaccgcaggaccgcagaggaagatttgccagccaatcgccattggaaagttgatgacggcagtctgcagccaggtcccgatgaagccagctgcttggaagttcttgaagagcgcggtcgcgatcaagctcatcgttgggcacataaggcagacggtgattgagcaccggatcaagatgatcaacaagattggcgtttcaggtgtaatcagccgctgagtcaagtaaacgacaggcttttcaaagacgaacatctccaggatgattgcaaccggccacatgatcatcatttcgcggaaggcatccagtaagacagcatccctcatcccgccgatggtaaaagcgatgttgtagcagatcatggcgtagaccataacaaaggccatcataacagtaaagacaaaattttccagttttgattctggcattaaaaaactcccttcatgattcacgtgttgttcgttgatcactccgggagtgtgcgtttccaatcataaccgtattcaaatacagttagttattctagcatagaaaaattgattgtgtaaggatttttgatgagattttctgaaaaagcgtttgcatttttcaagggccatattaagtaaagtattttccatatctaaaattatgttaactatcctctatatttcattttgtttccgtgtcattaccaaaaccgccagcaagtagaagactaccccagtaaccagcagaactgctactgacacccaggcaggcgcggtgtggccgtcatagacgaaaacaatcccaaacatttctttgatctcttttagtacacttgccggttgattagcaaagttcgctttaattgcaggcttcatcaaaagctgccggtaaagtaccgctgaatgagcacatgggaagtactttaccagccactgaacgttgtctggcaagctgccgattggaatgtatgccccaaccaaaaagccgatcaaggtcccaactatcgtgcttgcggctgagtaggagctgttggtcttcaagaaagaaattatgaaggaagcaatcgccgatgatgcaaaggatgataagacaattacagcaaatagctttagtaaagtctctatatccagtactgccccgccggccagaccaaggtagatttccccaaaaattaaggtaaaaatggacatgatgacgctgatgataaagccggtcacgatatagccgcccgcgacctgtcttctgctgaccggagatgagtaaaagtccttgatcttcttattctcccggtcgctgatcatcaccccatatgctcctaaactcgtagtgatcgacgccgaagccagcatccctgctagcatccaagcccgcatcaaacgattgggatgcggcagaaactttaaaccgctattcaccgaatcaccaatgaataagatgtagagggcaaaaatgataatgacactcagcattgagaagaatactgaagctttgtctctaaagtaaatcttgagattccttttgaccatcgcgctcattctcttagcctcctccctgtaatattcaagaatacgtcatccatcgttccatgcaggacttcaaaactttgcaattggtcccgcattccttctacgatatcaatggcatccatggtgttcctcagttctacctcatattggtcggccgccttattccaattaagtgataaagacgacagaatattgtctaaattctgctctttcttcggatacagcttcagccggtcatagctgtagagctctttcaagctgatcggactgccctcagcgacaatcttcccgtggtccagtattaccacataatccgctacggatgcttcggccatatagtgcgtcgtcaaaaagatggtcatcccctgctctttttgcagtcgctggatcgtttcccaaatgtgctgcctggtttgcggatcaagacccgtcgtcggttcatctaggaaaaggattttcggcgtatttaagagcgctctggcgatatctacccgcctcctttgcccaccggacaattttccgtattgccgcttaagcaggtcgttaatctccgtatattcgcttgcccgggcaacagcagcttttacttctgccttgctgtgatagtaaaagccagcgcgaagagttaaattctcaagcactgtaagccgcttatccagcagtccttcttgaaagacgatcccgatcctctgcttgatctcctgtgcctgtgtcctcatgttaagcccggccaacttgatctcaccagaatcgaacttggtcaaagtcgacaggcagtcaactgttgtagatttaccggccccatttgggccaaggaaggcaaatagctcgccttcgcggactgcaaaggagatgtcattgacgactttcaagtcaccataggacttagataggtttctaacctcaatagcattcttcactattttacaacccctttctatttatctttctaagttaattctacatcttttaatattttc

SEQ ID NO: 2193 - DNA, 24451 bp, Unknown
  gut microbiota DNA sequence
gaaggatacacctgttcccatgccgaacacagtagttaagcttcttaacgccgaaagtagttggtgggaaactgcctgcgaggataggaagctgccgcgctcaatcagccagactgtctagcctggcttttatcatgcggaagtagttcagtggtagaacatcaccttgccatggtgggggtcgcgggttcgaatcccgtcttccgcttagcatcaagcgatgcttaattgaacagatgcacccatagcgcaactggatagagtgtctgactacgaatcagaaggttgtaggttcaagtcctactgggtgcattggaggattagctcagctgggagagcatctgccttacaagcagagggtcacaggttcgagccctgtatcctccatctggcccgttggtcaagtggttaagacaccgccctttcacggcggtaacatgggttcaaatcccgtacgggtcattgccggaaggcaaaacagaatatttggtccattggagcagtggtctatctcgcctccctgtcacggaggagatcgcgggttcaaatcccgcatggaccgtcactgagaagcaggtatccacctgcttcttttttttgtctttgcatttattttcgctttctgtcttattcttttctttctaaattttcttgactgcttattttactttagaaacaatctattttctttttgctaattacttgccaatttgtctttggtgtactagaataaatagcacagtagagacagctagaaaggagcgagctagtggactttattgactatttggacagccggccgatttaccagcagatcgcggacaggtacaagcagctgattctgaccggagtcatgctgccagatgagcagctgccgtctgtgcggaagttggccatggaattgtcgactaaccctaatacagtgcagaaggcatacgccgcgctggaacgggagggatacgtttacagcgtcaagggccgggggaatttcgtccgggccaatgaaacgctgaagagcaagcaaaaagaagagctgaaagggaaaatgattgatttaattaaggagattcaagcagtaggcctggatccacaggaattatttgctgaggtcatggaggaggtggcagaagatgatcgagattgatgcactaagcaaggattatgggcagacagaggccattaagaaccttaacctgaccattgaagaagaccgggtctttggcttgatcgggaccaacggggcaggcaagagcaccctcttgcggatgatcgctggcatcctgcgggcgacttctgggcatatcactattgatggcttgccagtttatgacaatccagccgcaaagaaaaagttttgcttcattccagatgacccctacttcttcccaaatgccacagcggagtctatggccagggattacgcggcggtttaccaggactttgaccaagaacgttttgccagactgctggcggactttcgcttagagccaaagcgccgcatacacgactattctaagggcatgaagcggcaattggcgatcctgctaggattatgtactaacaccaagtacctgctcttagacgaagtttttgacggcttagacccggttatgcggcagagtatgaagagcctttttgccgaagacatggaccggcggcaattgactccaatcattgcctctcacaacttgcgggaattggaagatatttgtgaccacatcggtttcctgcacagcggcggtctgcttttatcagaagacttggtcgacatgaaactggaaatccagaagctgcagtgcgtctttaaggacgaccgggacatggaggaagtcctgggcaagctgaagctggttgaccatagcagccggggccgcctgcacactttggtcgtgcgggggagccggagcgaagtcgaggcggtctttgaccatgtgccgatgaccttcttcgaaatcctgccgttgaccttggaagaaatctttattgcagaagcggaggcagttggctatgacacgcgcaaacttatccttaaataaacacggtctgccgcaaaaagaaatcctgcggcaccggaaagtacctgtagtcttggtgatcttggtcatggccatgttctatatcgttgggccgattctggttttgatcagcaacaaagatgttgagacggcttccttgctgcatgacgcccggacatattatatttttcaaaatacgagcatgtcggctgcgatggccgggatcttcggcatctacctggcctttgaaggcttccgcttcttgcacgtgccgcggcaagtggactattacgagagccagccggtcagccgcaagacccgcttcatcggaattacggtcaacagcttgcttatttatagcttgctttacttgctctttttcctggccggaatgctgatcttggctgcaggtggggctaatttcctggctgacggtgagatctggcggggctttctggccgacctctttgccttttcagcctggtacgctatcgcctctttgagcatgatgatcacaggtaatacctttgtggctggcttagccacgatctttttctcctgctttgaatttggcttgatttttctgaattcaatcttctattccaccttggcaactacggctggctatgacaatcatgattggctggcatacaccaatccttcgactcaggtatataactcaaatcactggctggggatcgggattaacctgctttggaccgtcctttacctggccttagcctactgggcttaccagaagcgggctaatgaaaaggcgggcggagctgtggcttttgcctggattgaacaggtggttaagatcatcttggttgtctatttcgcggcaattggcgggatttttggctacatgatggtcaacttaaactttgtttgtggcattattggtgccctcatcattggtttaataactgccagcttgatggaaatcatctacaagtttgacctggctgcttggaagcataattttgtccagagcttgctgttaaccgtggcgggtttagcaattttggccggcatggtttggggagccaagcgctatgatgattggctgcctgcaagcaagcaagtagccagtgtggcaatttcgcgggatgacggcatctataccaactattacatgggtaaaaaatcagctaaaggtgacgccagcgattatgccgcgaaatacatgtatttgccggtaaacagtgacctcataaatttggttaaagccggcagcaaatttactcagaaccggtcccatgaacgggaagattcagtccagatgcgctttatcttcagaatgaagaatggccgcgtcaagaccagggtctataatgtggatagaaagacgctgaagaaatactttgaaccaatcagcaagaccaaggcttacaagcaggcttacttccagatctaccacgaccagatgattatggacaatctggatagcgtgtcctttacctacacaaatggcaaggaaacgatcaagcgccaggacagccagctttacaaggacttccgggcagcctacaagcaagacttagccaagtgggactaccagcaggccagcctgcagaagccgattggccaagccgcggtttcctggacgcgggcaaatggcaagcgggctaagatctactatccggtttacagcaactacagtcagacaattgctttcttaaagaagaacaaattgtattccgcaaagaaagttaaattggagtatcaacagcccttagatttttatcttgaagatcaattcggttaaagggtgaaaatcagcctaatttgcttaataactttacttttccggctattttctctattattaaaataattatagattaatgttgctttaattatttaggaggacagatggcgaaaaaacacgaaaacgcggacggaacgctccggtccttatcgaaccggcatgtccagatgattgccatcgggggcacgatcgggactggtctcttcttaggggccggcagcacgatctcggccaccggaccgtcagtcattttgatttatgcattcatgggggtctttttcttcttcatgctgcgggcattgggagaaatgttttactcagaccccaaccaccataccttcgtctcatttattactaaatacctagggccagcagccggcaacttcgccggctggtcctactggatcggcctgctctttgcctgtatggctgaacttacagcggtcgggacctacttccagtactggttcccgcacgcgcctctttggctggttgagctgatcttcctaggagccttgaccctgctgaacttgatggcagcccgcctctttggggaaacggaattctggtttgccatgatcaagatcatcgctattatctccatgatcttgaccggggtcttcctggtggcaacccatgctaaaaccccggttggctatgcttctttagccaacctgaccaagaacttcaagctggcgccaaatggcacttacgccttctttaccgccttcccgatggtcttcttctcctttgccgggattgaattcgtgactatcacgatcggggaagctgaagatccccaccaggtgatcaaaaaggcggtcaacgagaccttgttgagaatcttgatcttctacatcgggactttgaccgtgatcatgtgcgtggttccctggcggtcagtgtctgcctcaagcagccctttcgtccaggtcttccagttagccggcttcactaccgcggcttcagttctgaacttcgtggttttgaccagtgcggcttcagccttgaactcaaccatcttctcagctggccggcacttcttccaattagcgcaagaagctaaaaagggcagctggctgaaagaaaaatttgccaagattgcgccaaacggggtaccggcaagagggatcgcgatctcagttttattcgccctgatcgcgccaattctcagcttctctaacacggcaattgaggccttcagcatggttgccggggccaccagtgacatcttcatcctggtttacgtcctggccctgctggcccaccggaagtaccgcaagtccagtgactttatggaagatggcttcaagatgcctttttaccaggtaaccagtccattgacgattgcgttcttcctggtcatcttcttcatcctcttctttgtcaaggcggatatctttggggccagcctggccacggcctgggctgtcttctttgggagtttctgttacttccaccagcgggttaaggacaagctggccggaaaataaaagtaaataaatcatacagtcatgaccgagtcatggctgttttttatgcgtaatgttaggctttctccaaaaatactgggaaaaacaagggagaaaagctagacatttttgtaaaagccgaatgcttttcttgactttgcctagtaaagagagtatcttaaatatatattaaaaattaaaaacgattgaaaggcggaaatcggatggcatataataagatgttggttctgcagacagactttggtttagtagatggggcggtcagcgccatgcacggggtggcccacacggttgccagtgacatccaggtctctgacttaactcatgaaatcccaccttacgatatttggaacgcctcttaccggctttaccaaaccatcaagtactggccagcagacacggtcttcgtctctgtcgttgacccaggcgttggctcagcccgccggtcaatcgccgtcaagaccaagtccggtcactacgtcatcaccccagacaacgggactttgacccatatctacaagtatgaaggggttgaagccgtccgggtgatcgatgaaaacaagaaccgcctgccgcactcccaggaaagcaacaccttccatggccgggacgtttacgcttataacggggccatgctggccagcgggcaggttgcttttgaagaattaggcgaagatgtcccagttgacagcctggtgactctgccggtgatcgagccccgcctgcaaggcgacacggccgtcggcaccatcgacgttttggacgtccgctttggttctttatggaccaacattccgctggaaatggtcaaagagctgtccatcgaccggggcgacagcctgctggtcaccatcttgcatcagaacgtggccgtctaccaggaacacatccctttcgtgcggtcattcgcggaagtcaacctgggccagccactcgtctacatcaactccctggtcaacatcgggattgccctcaaccaggaatccttcgccgctgtccaccacatcggcaccgggaccgactggcaggtcaagatcagcaaggttaacaagtaaaaaatgaattggagagattttttatgaataagtatatgtggaagttaagccctaagaacatcgctgccttggggatcgggtcagccgttttcgtgattgtcggccgttttgcctcaatcccaagcggtctgccaaacaccaactttgaactggtttacgccttcctggccatgattgccatgatctacgggccaactgtcggcttcggggtcggcttcatcggccacgtcctcttggacttgatgatgtacgggcagacctggtggaactggaacttcgcggccggcttcctgggcttcttcatcggcctctacgctttgcgcgtcaacatagaccaaggtgaattcagcgctaaggaaatggtgatctttaatgtggtgcaggtcgtggccaacgctattgtctggttcctcttgggggccgtgggcgacatggtcttgaacagcgaaccagcggctaaggtctttgcccaagccggcctgactaccttcatggatggtttgaccatcgcggttttgggtaccatcctgctcaaattttacgccggcagccgggtcaagaagggcagtttgcacaaggattaaggaattaatatatgacaagtctgattcagtttagagatttttcttttcagtacgacagccagcaggagccaaccctccacaatatcaatttgacgattgagcagggggaaaaagtattgctggccgggccctcagggtctggcaagtcaaccctgggcaagtgcttgaacggattgattcccaacctggataaagggacgatcacaggccagtgcttgattgatggcaaggacatcagtcagactggcctgtttgacttatcttttaccacttcaaccattctccaggatacggatgcccagtttatcggcctgacggtcggggaagacatcgctttttccctggaaaatgactgcgtgccccaggacaaaatgaagcaggtggtagaccgctgggccaaggagctggatttgggcgatttgctcaagcaggctccccagagcttgtcgggcggacagaagcagcgggtggccctggctggggtcttggttgacgagtccccgatcctgctctttgacgaacccctggccaacctggacccggcctctggctacaagaccatgcgcctcatcgaccagatgcagaagaagttcagggccacggtcatcatcatcgagcaccgcctggaagaagtcctggctgaggaagtagaccggatcgtcctggttgatgatggccagattttagctgaccaaaagccggatgacctgctcaaggctgaccgcctggaggctgtcggggtcagaaatcctctttacctggacaccatgaagacggctgggattgatttgaataagcttgaaaagctgaccccgctggaagctttgccggttgagagggatgccaaagacaagcttttggcctggcaaaacagctaccagttgccggcagaaaaggcagctggtaaggagctcttgaccttgaaaaatgttggctttgcctacagcgccgaccaaaaataccctttaaaggacgttaatgccgtcatcaaggaaggggacttcatctccatcgtcgggcaaaacggggcggggaagaccaccctctgccgcttgatctgcggctttttgcaaaacacgggcaagattgcctggcaaggcgaggacatggccggcttgtccatcaaggagcgggcgggcaagatcggctacgtgatgcaggatcccaaccagatgatcagccagaccatgatatttgacgaagtagccctgggcttgcgcttgcggaaagtaccagaagacgaggtcaaggaaagggtgggcaaggttcttaagatctgcggcctctacccattcagaaactggccggtttccgccctcagctttgggcaaaagaagcgggtcacgatcgcggcgattttggtcctggaaccggacttgttgattttggatgaaccaacagctggccaggactggaagacctacacggaaatcatgtccttcttgcagaaattaaatgcagctggcaagacgatcatgatcatcacccatgacatgcacttgatgatggaatacactgaccggtcacttgtttttgccaagggacgtttgattgccgacaccacgccggttgcgctcttgactgatgaaaagctggtcgagcaggcttctttgcggcaggtcagcctctttgacctggcccagcattacggcttgccagatccggagggctttgcccgcaagttcgcggcttatgaacgggaaagattgggggaaaacgctaatgaatgatgcagttttaggctatgcgccagggaagacctttgtccaccgcttgagcgcgaccaccaagcttttgttcttgattattacttcggtggcctgcatggtgacttatgacacccgctttttactgatcatgtgccttttgtccctggtcttgttcaaggtttcccaggtcaagtggcggcaggtgtcagttgtggtcaacctgatcataattttcgcggtcttgaacttgatcttggtttatgtctttcagcccagctacggggcggacctctatggcagcaagcacgtcctgctgggcagtggcttttttgctttaacggctgaggagactttttacctcttcaacttgctgctcaagtatatctgtgccgtgccgattgcaatcttgttcttattgacgaccaatcccagccagtttgcttccagtctgaaccagattgggatcagctaccgcttctcttatgccttttccctggccctgcgctatattccagacatccaggaaagctactgggcgatttcccatgcccagcaggcccgggggaatgagatttccaagaaggccaagctggctgaccggaccaaggggacggtcaatatcgtcatgcctttgattctgtccagtttagaccggatcacggtgatctccacggccatggaactgcgccggtttggctccaagaagaagcggacctggtacacttctcaaaagcttaaagccagcgactggctgagcttgggggtggcagttttactggttctcttgatgctctacttctggcatctgaaccagggccgcttttacaacccttttaagtagaagataaatttcaggactcgtttgagtcctttttatttgtcaaaaattaacttaaaaacagagattaagtgaaaaagttactgaactgctaaaaggaaaaaggctttttagcgggtcttttttagtgaaaaaaggagaatacaggtaagaaaatctgttttttatcggcgaaaaagctggaaaaatctccctttaacttttgtgacagaaatcgctatcttttgcaaaagtggaaaagatatataaaataatttattcacaataacaaaagtcggttaccgcttacatcgctaataaggcaaaacataaaggaaaagcagcttcttgtgtcattaagaaagggggattttaccctcttttcttttttataaatgctgttatagtagtaattgagaaattggtcacaagaaataagcaagaagcaggagacgagagaatgcctaagcaaagcaccacagaagtggaaaagtcagttcaaactgaagacgaaatctaccacaatatcgatattttggttaataaatcacatgaagccttagcccagatggacgacttcagccaggaagacgtggacaagctttgccaagtcattgaaaaagtcggtgaagacaatgcccgctacctggcccaaatggcagttgacgaaactggccggggcaaggtcgaagacaaggtgaccaagaacacctacgctgcccagactatctgggaaagcatgaaggatatgaagacggtcggggtgatcgaagaagacaagcaagaaggcttgatgaagattgctgaaccgatcggggtcatcgccggggtaacgccagtcaccaacccgacttccacggttatcttcaaggctatgatcgccatgaagagcaagaacaccatcatcttcggcttccacccgcaagcccaaaaatgctgcgtggaaacagccaagctgatcaaggaagccacggctgccgccggggcaccggaaaactggatccaatggatcgaacacccaagcctcacggccacgacggctttgatgaacaacccaaaggtgcagatggtcctggccactggcggcccaggcatggtcaaggctgcctactcaactggcaagccggctctgggcgtgggcccaggcaacggcccgtcctacatcgaaaagacagcggacattgaacagtcagttaacgacatcgtcttgtccaagacttttgacaacgggatgatctgtgcctcagaaaactccgtcgtcgttgacaaggaggtctatgaccaagtcaaggaagccttctcaaagcgccactgctacttcttaaaggctgacgaaatcaagctctttgaagaacacttcatcgacccccgccgggggacagtcgctggcccgatggccggcaagagcgcggtcaagatcgctgaaatgtgcggggtgaccgtacctgccgacacccaagtcatcgtggctgaatacagcggggttggcccgaagtacccattgtcagctgaaaagctgtccccggtcttcaccctctacaaagcagaaaacagtgcccaggccttcaagatctgcaccgacctcttgaactacggcggccggggccacactgccggcatccacacccaaaacagcaaggttatccgcaagtttgccttcgccatgtctgcctgccgtatcctggtcaacagcccggctgcccttggcgggatcggcggggtctacaacaacatgatgccatccttgaccctgggaaccggctcatacggggctaactcagtttctcacaacatcaccgccaaggacctcttgaacatcaagaccgtggctatgagaagaaagccaatcttataaaaaataccgtcattaaaaatcaagaatccgtgtcttaaattatctaagctgaggccatcgccttggctttttatttcttcttttttgtaagaaaagaacctaaaaaaatactgaaaaagtgctaaaatagaaagcaaagttacaagctggagggaaatcacatgcaaaaatcatggtcagtcaaaagagccgccgtcgtcgccgttttgatggcgatgaacgttgccttgtcttcattcagtatccctgtcccaggcggccacctctacttcaacgacgtggtcatcgtcgccgcggccttgctgctgtacccatcagaggccttcgtggtcggcggggtaggggccttcttgggcgacttccttttctacccggcgcccatgttcgtcagcctcttctcccacggctttgaagccttgatcatctcttactttgcccacaagtttgccggcgagcaaaagaaggtcatcttgggcatctttatcggcgccgccgtgatggtaactggctacactttaggccgggccttcatttatgcgaccccggctatctccttggtcaagtttccttttgaatgcctgcaggcagccgttggggcgtgcttaggctacaacctggtctaccacgccggcatcgaaaagcagttccaacaccgcttgcggtaaacagggagaaaaaagaaatacagaaagcactgcaagcaaaaatccacccagatgggtggattttttaatgctcattcagttaatatagaaggctaattatagcgcgaaggcccgccgctgatctggttgcggacattgtccttgctctggtagagcatgcggtcggcttcccggatcatttcgtagacctcgtctggggtctaggcctggccatagacatagccggcagaaatatggatgtcaaacttcaagtccagaatcttgacctgtttcaagtattcccggaccttttggtcattcctgcgcagccggtccaggagcggaaggcactgttgcagtagaccagcttggcctgctggctttggacgatgaagatggaattaggccggggattctcaaagttgttgtccagccggtcccgggtttccaagtagggatccaggacgttgatgtggttgaagccagagaaaagggctctttcttcaacgctttcaaagttatctctttcctggctcagttcttcttccggcatttctttagccaaaagccgcccctgagtcagcatgattcctaaggaccggatgaagtttagcatggcctatgtggcagagccagtggacatcgcctacctgacgggctacagcagctggacggaggagcgggtcttcgccctgctggtatccagaacaggccaggccctcttgctggctccggcgatcaatgaaggagaagtcaagcagacttcctgggcggaccgggcctgcccagccaaaagggggttcaagccggggacatagtgatttttgacttggggatcatgaaggacggctatgcttcagatgtcagcaggacggtggccctggacgaaatcagcccggcaaagcgggaaatctatgagacggtacggctagcccaggaaacggccgctagggcggccagaccagggatgacggcaggtgagctggaccaggtggcccgtggggttatcgaagaagcgggctacgggcagtactttacccactgcttgggtcacgggattgggatgcaggtccatgagccggtgaatctggagccgggaagcaagcagaagctggaagcagggatgtgcttttccattgaaccggggatctatttgccgggtgttggcggcgtcagaatcgaggactgcggctggctgggtgaagacggcttccacccctttaccaagaccaggaaagatttgttgcttttgtgaggaaacagttaaaaagtgagctatttggtcatacccaaacactttttgtgtttgagcatggccttttttctttcaaaaagaaagagcaagcaaacaaatctctaatttatacggactgtatattgcaatgaaaagctctgaaaaaatttggcgataagtaggcgatcaccttgaatgacagaagcttaaaaaaaccgaaatttaattgacaatacaatgagaaatgctactattttaaatatgtttttaatctaaaaggtaaggggtgtgctagtgaggtgaaaaatgaaattaaatgaaagagagctagctaataccgtcaagcttgtaacaagcaatagtatttccaagcttggagacatcttgttcgattatgttaattctgtctggctatcgaagctggggaacggcagtttttggatggcagtgtatcagagcagtgaaacgatcgtcagtgttttcgtcaactttataggcggaatcttgtctgatacgaagcagcggaagagcattatctggatttgcgatattattgccggtctcttgtgtattgcgctagcagtgtttgttccttctatttggttgttatacgcaattattgcggtcaatattgctttatcggttctgtcttcgatcagagatccagcctataaggcggtctttggtgaaattgtccgcaaagaacagattggccgggtcaattctttgcttgaaagctgcaagcaaactatcaaggttgctggcccagtgcttgccatggtgatcgctaaatttgttggcagtaagatggctttgctgctggacggacttacttttattatttctggtttgttgatcagacagctggatattttgtttgaaacagagccgccggtagctaagcaaagcaattttagcaagatcaaggatgcatttaagtatctgctggccgaaaaaaatattttgatcgtaattgtttttgccagcgtaatcaactttattttggcaggttacgaattgattcttccttttgccagttttgcttttagcaagaatgcttatgctttctttttaacggctgaatcagttggtggcttgctgggagcagtggcttcaaatttgattcggaaggaattatccagcaagtatctgttctggattattgctgtggctggactgccgctggcggtgatgagttcgctgtatcaagttagtcattggctttttgggccgataatctgtattaccctgtttaatttctgcgtttcggtttttaacattcagtttatgacttacattcagaccaacgcggatatgacttacattggccgggtattcagtattgtctttacggcggcaatcattttcgtgccgctcggttcctttttcttccaatttgtcatggacgtaaaggacagcgtggattatttgtggctggggggattgctgacgtttgtagcaggccttgccagtgtaatttactcgctgaatcagcggcgggcagaatagagttagggtgttactgcagatgagtacctataagaaatttgttcggatgttgcgggaaaaatggcaggttaaagaattacctgaaagtccgcttttacggcctgatgatggatacttcactttctcacctttccaagatacagaaggaaatttcgacagtttaaaaagtacgtctagcatctttgtaaaatatcagccaacaatcagaaaactgaacgcgctagatttgacgaaccctttaaatctgaattatcagacgacgtatgctgtacaaaaatatcaacgatccaatcaaatcgatttgattaagcagctaattgaagtcagccgtgaaaagctattcccacaaattgctgcttctgaagtagaaattacctacccagacatcttgcatgattactttgcacaacaaaaatttgaatttaagctcaatgaagttgaaacaactgatagatatctctgcaagttggatataccaggaaagcactattacattaaagtacgaatgaagtttaagactgggtcaatcaatgttgttgattttgtattggtcgattatgactcaagtgacttttcttcacaacttgattctatttgggtagaaaacttgatagatttgttgaccgaaaataaacgtttcatctttgatgaggctaaatatcaagcagagaaagctgcagttgctaagtatacgaatgaacctagagaccaacatgtgattattaatgatgttcgcaccgtgctaaaagtcatgtctctagggattcttccagctgccaaaggaattaatagtgaagtaaagcggaagatacgccatctctatttttactacgtctattatgtcaacaatgacgttgatgagctagtgtcagtagttgagcagatcggaaaagctgaaaaatattctgctgatattttggcgatttttactgaaaatctgcgggaaacgcaaaaaaattactgggcagcagttaaaactgttaagaaaaagaatttaactagagaagtagcacagagctctttagggttgccggatgagtattatggtgactttttacaaaactggcacagcgaatacgatttttaggaggtgagccagcaatgaaatactttatttgggcctacaatcccaaagtggtcggcattcgtcctagtcagggaatttccttcgttgttccagaaactaaaaaagaagcctatttagaattggaaatcaatcagattattcctgtcaaaaggattgattttcagaccatctatccgatttttcaacaaaagcaggctgaaggagaaaaaattgaggatatctttacccttcaagaagaaatcatggactgggtgggagtgctaaaggcaatctttattcctggaaaaacaggcgtgagcgatgtcttgttcaaggataagtactatatgcggtcggttttaaagcaggaagtaaccgagccggatttttatgaattaacggaaaattctgcagttgaaagcattcatgaagggatggtcaaaccaagacgcgcggactcaaccaaaggtatcagttattttaaagcgcctctgccgttgtcttctttaaagaatcaaagtggttatctaagcgataaagatttattggtagaaagttttgttcattatgaccggatgtttaccgttgacggctacattgattttcagggtcattcccgtttcttcagccatgagtacaataataagctgagcgattttaaaaagactggttattttaccctccataccagttcactttactatcaagatcagcagctgctacaaaagttgtttgccttaagccagaaggcacttcaagcattgaatgttgaaagggacattactccttttcactttgaatggttttattctgacaaagaccagagctttgtctttaccgaggttggcaagcgttttggcggagcgaagattccaaaattggttaagcagtcctttggcgtcgatcttctggaagaatattggaaaatgcaagaaaggcgtgcagaagagattgattgggagcaggcactttcaccgcgggtctgctcaagctcttatgttcagctgaccaatggaaagatgatgatggaaagtttagaggaaaaaattccagaccttttcacttacgagcaaaaccatcctgtaggcgtgcagtcgcaagcagctgaatctattggggatgccttctttttggcccagtatactagcaaggatgcagcagcttcagatatggtcagcgccaaaatcaacaaggcttttaatgaggtttgccgatgaaaaagattgtaattttagcccctatcagcaacaactatattaactatttcgatgctattagcggggataaggataaccgctatctgatttttgccatggaacggcaccgtgacaattatccagaaactttgccagaaaacatcaaattcgttttcttgaagatctggaatgaagaatatattgactacgtgatcagtcaaacttttggccagcagatcgactacgtttatgcttattctgaagaagagatcatctttgcggcaaaattacgaaaaaaataccaagttaccttggggcaaagcttgacgagcgcggaagaattccggaataaattaactatggtcaaggcagctgagcaagctcacgtagccgttccccgttactggccggtcgataacgtgtttgatctgatcgagacagaaaagaagctgggcttccccttcgtgttaaagccaattgccggcatggggtcgatggatacctttgtagttcatgatcatgttgagttagaaaggctggccgctgataaaattcttcgtggctatttggcagaagaatttatcccctggcccctgtaccacgtggatggttttgtaaagcaaggccattttgtctacttgatcagttctaagtattttgccaatacactagaagtgaaagacggtaaatcagttggaagcgtgcagataagcccgaccgcggtagaacagaagttgatccgctcttacgcgacagacctactcaaaggaatggatacgccggaaaactatctctttcatcttgaagtcttttgcgacggccgcgaggtaaaattgtgcgagatcgggtcaagattggggggaggacggattctgcaagagcttgagcaagggctgggctttagtcctattcaagaattgctgaagctggatctgggcctgccgaataaggtggaccttgacaaggagtataagtcagctgagattcgcggttttgtgatggttgaacctggccggggaattttacaaaaattgccggctgcagatgccgtgctagcagccaatccggaagtctatgactactatcaatatgctaagcttggccggacctataatggcgcggcaagcagcgtagaggcccttgcggcaatttccgtttgcggaaaagacagcaagaccgttgaagaaaaactaaaggatctggatgcctggatgaaaaaagcagcagtatacagctaaaaagcagggaaggctattttatagcctcccctgctttttcttatcttctctcattaagcagccgccacttgagccaggctgcttggccagccccgtgggcgaattcacccttaacgatcaaatcttccagctggtcgacagagacgatctccatcttgatttcttccagaatctctctttttggctgagccatttttgtggcccggcaggcaaaaagggtgatcttctcattggttgagccaaaagaagggtaggtgaaaccgagttctgtcaactcgctggcctcatagcccgtttcttccagcagctctcttctggctgcctgactgggctcttctccctcatcaatgccgccgctggggaattcatattgccagctgccaacgggatgccggtattccttcaagagcaagacgtggtcatcatcaacgaaggggatgatggaaatcccgaagccgatcgtaacgtaggaatatggggcgatttgcccgtccttagccaccttctcttgaatgaccgtgaagcggtccaccttgatagtttctttcttgactactttgtacattttttgcctgccaccaatctctttaaaaatcagttcaattgtagcaaaaaaaacagttaaagtacaaaaatagcagaccaggtggtctgctattttcagtgattcagtttgttagtctctagggacagacgctagttaacgtgagcgtacttgaagtcccagtggtcgcgcaggtttaccaagcccttgatttctggacggacaatccaggcactggtgcttgagtaaagtggtgaaataccaacgtccttcagcagaatgccttcagccttggacaggtcgctccagcgttcagagtctgagccagtagtctttgaagccgcgatcagcttgtcgtattccttgttggaccacttgccgccgttttgggcgttggtggaagtcagcaagtccaggaaggagatcgggtcgttgaagtcggcaccccaggcagaaacaaccatgtcgaagttaagcgcgttagttctagccagacgggtcttgaatggcaggttctgggtggtgatggagacttgcggcagagtttcctggatgtttgattgcattgcttcagtagacttcttggcaccatcggtgtcgtctgacaaaagcttgaagctcagcttggaaacgccaagttccttcataccttgcttaaggtacttttgggcttccttcttgttgtagtaagtgtaagcttcgtcactcttggaaatcaggctggtgtagtccttgccgttaaccgtggtcagcttggctggagtgaaggtgtgagcaacagtgttgctgccgcccaggaccttggtcaggctttcccggttaatagccatggaaagagccttacggatgttggcgttttgcaggtacttgttcttagcctggttgaattggatgtagaaggtagtcccacgtgggtagagagcataaccctttacgctcttaagctgcttgctttgttcagcgtccagggctacagcatcaagcttgtttgactggtagaggttgtaagcagttgacggggtcttttgcacgctgtagttgaccgcgtccagcttgacattcttcttgtcccagtagtatgggttcttcttgagcttccaggacaagcttgacccgctccagccgctcataatgtatggcccgttgtaaaccatgtacttggaggcagtaccgtacttggagccgtacttcttgactgccttttcgttttgcgggaagaagctcccgaaggccatcaggttgttgaagtaaggaatccgccggtccagggttacgaccagcttgtacttgccaacggccttaatccccaaagtttccggcttcttcttgccgttttggatgtcggtggcgttcttgatgccttcaaacaggtaagcgtattgggaagcagtctttgggtcaaccgttctgcgccatgagtagacgaagtcttgcgcggttaccgggtcaccgtttgaccacttgttgtccttacggagagtaaaggtgtaggtcttcccgtccttggataccttttcgctagttgccatggccttttcctggctgccgtcagactttgcccggtacaaaccttccatggtgttgatcaattgggtaaagctggcagagtcagtggccttggacaggtccatagtcggaatttcagctgattcttcccagttcagttcctttttgttagatgaagaagatgaagagttgccgccgcaggccgtcaaggctaatgaagccgtcaagatgctgccggcagccaaaaaggtcttagtctttttcatgttgtcctccttgaaaagtttacattatcaaacactaattgtagtctaacagaaaatacacaaaaagaaacgctctcttgcgactatgagctgaagatgagacgggactgaaatcgttgttaaagcaaccgtaaagtaattaaagataactttaagtattagttcatttgctagaaaacagtctagtctaacttaaaagcagaattggctgattatttataaggaagaaaggtaagtaaaaagcataggaaagaactaggccaaagataaagggacaaaattttgctttttctctgtttttgccttgacgaaaggcccgatccgttatacactaacagtgtattagatagctagtacggcaaaggggtgtgcaaatgaaattcaaagacaacctgccgatctacttgcagattgaagactatatctacttgcagatcgcccagggcaagctgcaggccggcgagaagctgccttcagtcagagccctggcacttgaattgacggtcaacgccaatacagtccagcgggcacttagagaaatgacggccaagggctatatttttaccaaacgcggcgaaggtaacttcgttacgaccgatgaaggccgcctggaggaaatgaagagcaaattgctgaagcaggagctggcggctttcgtcagccggatggagaaactcggagtcgaaagggaaaacctgactggactattggccagctacttagatgacacaagggaggaatagcatgaagactttggagattaaggatttaagctaccacaagaattcaaagacgattttggagagagttaacttgactttggaggccggcaagatcgtggccttagtcggggccaacggggccggcaagaccagcttgatgcgggtgatcgcgggcctggccaagcagtacaagggcagcgtggaggtatgcggggaagcagatgaagaccgccgcaagcagtacatcgccatgaccgacagcttgtccgccttccgcgactccagaaagatcaaggatgtcgctgacttttaccgcctggtctacccggactttgacgacaagcagtttgctgatattctggaattcatgaacttgaatgaagatgaaagactgggcagcctgtccaaggggatgaaggagaaattaatcatcgccctggtcttctcccgcaaggccaagctctacctgctggatgaacctttcagcggggttgatgccatgagccggaagaagattatcaagtccatgctgctttggaagccggaagaggcgaccctggtcatcagcgaccacgtcttagatgaaatcgctccggtgatcgatgaggtcgttttgatcaagaagcactcagttttagagcagcgcagtgctgaagaaatccgggctgaacaagaaagcatcgaagagtggtatgaaggattttacgagggggaagagtaatgatcggttttaagcagactttcgcggccatgttcaaggaaaagagccggacgacctggctcagcctgggcatcgaggcaatttttatcctcttgatcagcttgtactttggtatcagatacggctttggcagcgactcagctggtattggcatcgggattgccgcgacggtgatcttctgcgtgggcatctggtaccaaattgacgtgattatggcggcctaccggatcaaccggtcccagacctggcggcaagtgccggtaacagcgggcaacttcctgacggctaacgtgctgaccgggcttgtgaccgcggttatctttgccttagctaacttcttgatcttcgtaattaccttgctgccatttatttttggcggggagatgcagatcgattcgcaagcagtggcgactttccagccttacgtctccagcatcagcaactggctgctctacatgaccttgtttgccctggtcagctttgccggtggcatctgcttctggctgctcatcactgaatcagccagcgttttgggggacttcctgcctttgaaggggagaacgagcaagtttgccaaggcagttatcctgctggccctgctggctctcttgtcctggggcagcagcagcatcttgggcgcggtcatccgcatggtttcaaatttcggctttgacttcaactttgtcattgacaatactggcctgcacacgtcccagaccgacctgggcttgccggtcatcagctggctctacatgctggctgagctggtctacgtggccatcttgtgggcagcggaatacttcgtcttcaagaagggcgttgaagccaagaaataagcaaatcagattaagtgacaaatgcctgcctttggtgggcatttttgctcgccgtcagggcccgatttgccggtaaagattgaattttttccttattgctagtaaacttaataagttgaagaatagtaagaaagaggcataattttggctaataagaaaatccgcgtgagatacgctccgtcaccaactggccacttgcacattggtaacgcgcgtactgctctgtttaactatctgtttgcacgtcacaacaagggaactttggttctgagaatcgaagacactgacaccgccagaaacgttgaaggcggggctgaatctcaaatcgaaaacctgcactggctggggatcgactgggatgaaggtccggacgtcggcgggaactacggcccttacaagcagtccgaaagaaaggacatctaccaaaagtacatcgaccagctgcttgaagaaggcaaggcttactactcctttaaaactgaagaagaactggaagcccagcgtgaagaacagcgggccatggggattgctcctcactatgtctacgaatacgaaggcatgactactgacgaaatcaagcaggcacaagacgaagcccgggccaagggcttgaagccagttgtccgcattcacattccagaaggcgtgacttacgaatgggacgacatcgttaagggccacttgagctttgaatccgacactatcggcggtgacttcgtcatccaaaagcgcgacgggatgccaacttacaactttgccgtcgttatcgacgaccacttgatggaaatcagccacgtgctccggggcgatgaccacatctctaacacgccaaagcagctttgcgtatacgaagctttgggctgggaagctccagtcttcggccacatgactttgatcatcaactccgctactggcaagaagctgtccaagcgtgacgaatcagtcctgcagttcatcgaacaatacagagaacttggtttcctgccagaagccatgttcaacttcatcactttgctgggctggtcaccagttggcgaaagcgaaatcttctccaagcgcgaattcatcaagcaatttgacccggcccgtctgtccaagtccccagctgcctttgaccaaaagaagctggactgggtcaacaaccagtacatgaagacggctgacagagatgaacttttggacctggccctgcacaacctgcaagaagctggcctggttgaagctaacccggctccaggcaagatggaatgggtaagacaattggtgaacatgtacgccaaccaaatgtcctacaccaagcaaatcgttgacttgagcaagatcttcttcactgaagcagaatacctgactgacgaagaagtggaagaaatcaagaaggacgaagctcgtccggcgattgaagaattcaagaagcaactggacaagctggacaacttcacggccaagaagatcatgggcgccatcatggctacccggaaggaaactggcatcaagggccgcaagctcttcatgccaatccggatcgctactacccggtcaatggtcggccctggcatcggtgaagctatggaattgatgggcaaggacacggtcatgaagcacctggacttgaccttgaagcagcttagcgaagctggcatcgaataagctaaagaacaaaggaaaag

SEQ ID NO: 2194 - DNA, 16402 bp, Unknown
  gut microbiota DNA sequence
acagttttcaataaatccataagaataaacctccgctttactcggagatgagctgccttcacccaattcaatcagatctaattttctcaacaggactttaacagtcaacatacttagacgagattctcaattgaatggtgaagctgcccgttttacttacgacatcgtgtgtccaaagagctcacggcattggcttcatctccactttacatagtaaaagaaaaagtgttgaacgactactccgtcgagtaatcatccaacactaggttagtatgttttacttgttaaaatgcttcttgtttacagttactatggagattacagaaataaaattacttgttgaaagtgagcttggacttggttaccgaagccagcttgttggagtggacgatcaagctattgttcatggtctgccacttcttttgcgcgtagtcggcattcttctggttctgttctgtcagataggccgtcagcttgtcgccggacaaagtcttggctaccttgtcgctttgggccaggttggccttgagttgcttagttacggccttcttagtcgggttaacgtccttgtagatcaggtccgtcttcttgccagttgagctgtcgatgaacttcttgtgcttgtaggcttcaattaccatggccgtggttttgtaagtccagtaggcggacttggtattagtcgggtcctggtagtcgccgtcaaccttgtactggcttggcgtgtcactgatgttggtgtagaaaggcaggtagacgttgttagccggggaggccatggccagccactggatagccgcgtattccttaggcacattgcttctgatctgcaggatgtgggattccacgtcagttggcacgttgatcggccggtagccgcccttccacttgccgtagctggagtacttggtcccggtgaagtgggaggaaagcacctggccaaccttggccggactaaccttcttgtccggcttgaggaagagggtgtaggacttcttagtaattgactgcttcttgcttgaagtcaagattctctgcccgtcccacattcttggccggttgtagatggcgtcggtcttgtcgttggtgccaaaagccttggagtagttgaccgtgccttttacatagccagccagcttgatcttcttgttctgggaccaggccttaaccttcttgaccaggttggttgaagccatgtagttcttagagtccttgaggttgagcttgccgatcaccatttggttagggatgacggcatacttgttgtctggaactctgacagctgcccaggtgtggccggagccgatttccatgtaccagatttcgttcttgtcgctgaagatgaccccgttgttttcggcactgccttgcttttcaatgatctggcccaggcgctggacgccttccttagcggagtggatgtaaggcagaatcacgtccagcatggaagcttcggagatcccgttcttgactaagttgtcagccttcaggccctttttgttggtcgtgcctgattccgtagcactcatggccacattttcgctgttgatcccgctctcgccaaaaatccactggccattaacctgctcgccgtctggcgtgctggtatagcgtagggcagtcttcggcaagctggtcttgaagccgttgtcttcagaaacataagtggtcgggccattgctggttgcctggtgaacatagaagtgcttggaccaggcgccaacgtcttcattacgggcaaccagggttgatccgtcggtcgtggccttcttgccaactactacagtcgtgcaggccttaacaggtgtggcggtaaaagcagcggccaggcccagggcaccggcagcccaaataaacttacgcatgatatttccccctatcaaatataatcctatcaatcacacagcagtgcttgttagcgcttactaaaagaaatcataagcctcttgccattaaattacaaccctatacgaaaagagaaactactttattaagaaggagctgggcaagaaattatcggaaaatgagaaagatttttacatacgaaataggggatagctagattataccggttgaaaaaaggaccggctctttttcggagctggtccttttgcctgctaagcaggcaaaataattaattttttaccggccgctttcttcttgcagctgcaggacccggtcagcgatggtttcactagtgaccaggtgggtgatgatgcccgacttgagggcgcctaagagggcttcagacttgaagcggtcgttgaccacgacgaagcggaccggtgtcttgacgatctgctggtcagagatgccgatgatcttgtcagtaattgaactgaagaagtggccttcatggtcgtatggccggccgaagatcatgccggagatgctcttttggtggatgttcttgaagaggaggctctcgtatttttcgtgcaggaagctttcttcttcaaaggcttgcagggtgcccaggctggcgaccaggaggtccatgttgtcgtagagctcatccagctgctcgtaaaaaggttccttcttgatcaagttgaccaggtcggggttggaggagtaaaggggagcgggcagggcgcggaagtggcccccgcattgggcagcggcgatgctttccagcggattcttgcggccgttgccctggagaggatagccaaccagctggacgaaggtcaggtcatcgtttttaacttccgtaaaggagttgatgatgtcgagcatggtcgtgccccaggtgattccgacgttcttgcaggactgcatgtagctctggatctgttcagcggcaaagctgacgatcttttcgctgtcctggttcttggtctccagcttctttaagataaaggcttccttgaggccaaactgctggcggaaactcttttccaggccggaattccgcttggctccttccctgatgttgatctggacgatgccggtcttttcagcatcgcttaaggccttgtcgatgaggtagcgggacaggttgtatttggcggaaatttcggcgatgttgagtttgctgatgtagtagtcgtgtgcgatgttcgcaagctggtcgttgctgagctgcatgatttcctcccaattttagacatttaaaagactatttaaatattgtaaagcaaaaggttacttttgtaaaataagtaaaaaggtatcactttttgaaaaagaaaaaaagaactaaaaagggtaaaaaagaagggggaatcaatcgattcccccttcggcattgtctgattttagtaccagttgtgagccagccagaatctcttggcgttgacccatgaaccgtaacggccgtaaacgtagcggtcagcagtccgttcttggttcttcttggacaggtcaccgcccaggtaagaaatcaagagttggtagcggccgtaacaactgccgtttctggcagtgtagtaaccgcctgattcccgcatagcgatccagtacttagctgccttttcagctgacttcttagcagccttcttcttagcggcagctttcttcttggcagcggccttcttcttagcggcggctttcttagcagcagctttcttcttagcggcggctttcttggcagcggccttcttcttagcggcagcggccttcttggcagcagcttcagcagccttcttagccgcgtcgtcttgctggtcagttgcctggctttggtcagcactggcagttacagctgcggtagcggccttagtagtcttcttagttgacttcttgctagtcttcttggccttcttagttgccttcttcttagtagtcttcttagcaaccttcttgactgccttcttcttggaagtcttcttagtcttcttagcaaccttctttaccgtgctggttgaagtcgcgctagaagtagaagtgcttgagctttggttagcagcgctagactggcttgcggcttggtcttggctggcttgttggtcttgactagttgcagttgctgattgttgggtagaacttgcgtcattagtagccgctgaaacgttagcggcgggagcaaccacgagggcagctgcaaaagcagttgctgataaaactttcttgaaattgtgtttgaacgtcatatagtagaaactcctcacatgcttctcttaaaaactaagtctatgctactaaaggaatatgacaggactgttacaaaacgaccacagctcgttaacaatcgggtaaaatgaacatttctttggcaaaaagatcataaaaaagacggaaacagggctgaaattatcattttaagcgctttaaattagctatgcagataagtaacattagtaacaattgtcaagagaatgaaataaaaggaattaatttttgttagaaactgaactggctgatcgagtccaaggggctgaggtagacgaaaaaaagatattttgcgttaaatggctttatttggcctttttttgctagaatagagaagtgtgaatataatatacgcgaggaaaaatcagacgcggattataggaggaaacaatggctgttaagcgcttttacgaaacattccatccagatcactacgatctgtacatcgacgttgaccgggcagcaagatctttctcagggacttccaccatccatggtgaaatccaggaagaaactgtcttggtccaccaaaagcacatgaccatcagcaaggtcactgttgacggcaaggaagtgccgtttacttttggcgacgactttgaaggcatcaagatcgaagccggtaagactggggaagcggtcatcgcgatcgactactcagcgcctttgactgacactatgatggggatctacccgtcctactaccaagttgatggcgtcaagaaggaactgatcgggacccagtttgaaactacttttgcccgggaagccttcccatgtgttgacgaaccagaagctaaggcaaccttctccctcgccctcaagttcgacgaacacgaaggcgaaactgttttggccaacatgccagaagaccgggtagaaaacggcgtgcactactttaaggaaactgtccgcatgtccagctacctggttgcttttgcctttggtgaaatgcggtcattgaccacccacaccaagagcggggtcttgatcggggtttactcaactcaagcccacactgaaaaggaactgaccttctccttggacattgccaagcgggcaattgaattctacgaagacttttaccaaactccatatccgctgccgcaatcactgcagctggccctgcctgacttctcagccggtgccatggaaaactggggtctggtaacctaccgggaagcttacctgcttttggacccggacaacaccactttggaaatgaagaagctggttgcgactgtggtgacccacgaactggcccaccaatggttcggtgacctggtaaccatggaatggtgggacaacctctggctgaacgaaagtttcgccaacatgatggaatacctgtcagttgaccacctggaacctaactggcacatctgggaaatgttccagacttctgaagcagcggctgccttgacccgggatgcaaccgacggggtacagtcagtgcacgtggaagttaatgacccggctgaaatcgacgccctctttgacggggccatcgtttacgccaaggggtcaagaatgctggtcatggtccggtcacttttgggcgatgaagccttgagaaagggcttgaagcgctactttgacgagcacaagtttggcaacgcggcaggtgacgacctctgggatgccttgtcaacggccactgacttgaacattggggaaatcatgcacacttggctggaccagccaggctacccagtggtgaatgcttttgttgaggacggccacttgaagctgactcagaagcaattcttcatcggtgaaggcaaggaagtcggccgcaagtgggaaattccgcttaacgctaacttcaaggcaccgaagatcatgtcagacgttgaacttgacctgggcgactaccaggctctgcgggcagaagccggccacgctctgcgcttgaacgtgggcaacaactcccacttcatcgtgaagtacgaccagaccttgatggacgacatcatgaaggaagccaaggacttggatccagtttcccaattgcaattgctgcaagacctgcggcttttggcagaaggcaagcaggcttcatacgctgacgtggtaccagttctggaactcttcaagaactcagaaagccacattgtcaacgatgctctgtacacgactgctgctaagctgcggcaatttgccccagccggcagtgaagctgacaagaacctgcgggccctgtacaacgacttgtccaaggaccaagttgcccgtttgggctggctgcctaaggcaggggaaagcgatgaagacattcagacccggccatacgttttgtctgctagcctttacggtcgcaacgctgattcagaaaagcaagcccacgaaatctacgtggaatacgctgataagttggcagaactgtccgctgacatccggccatacgttttgatcaacgaagttgaaaactacgggtcaagcgaattgactgacaagctgatcggtttgtaccaggcaaccagtgacccatcattcaagatggacctggaagccgcgatcgtgaagagcaaggacgaaggcgaactgaagaagatcgtttcctggttcaaaaacgctgaaatcgttaagccgcaggacttgcgcggctggttcagcggcgttttgtccaacccggcaggtgaacagctggcctggaactggatcagagacgaatgggcatggttggaaaagacggtcggcggcgacatggaattcgctaccttcatcactgtcatctcccgcgtcttcaagaccaaggaacgctacgacgaatacaacgccttctttactgacaaggaaagcaacatgctgctgaaccgggaaatcaagatggaccggaaggtcatcgctaaccgggtagacttgattgccagcgaacaagctgacgtcaacgccgcggttgctgctgctttgcaaaagtaattgaatagagcataagaaaactgtttccggtaagagctggaaacagttttttgtatgtattcagactaagtttaggcgaattccgtcacgtctttgacatcataacggacagtatctggaataacttcacttgggtccggtttgccaatggagatggccatcactggaatgtattgttctgggtccaggccaaattctgctgcagccttgcttgcatcatagccagccattgggttggtttcgtagccgtgttcacgggcaaccagcatcagttgcatggcaacgagtgaggcatcaaccattgcgtctgcaactaacatttgccggtcagccttttcataaagtggaaggaaggtgttaaccgcggcatcgcgtgcttctggagttaccttcttttcttctaccatgccattccacaggtcacgatacttcagatatgacttagtgttaccgaaaaccatgatcgtggctggagcagtgtcaacttgagggtaattgaacggcattaagaaatcgtgaagcttcttcttgccttctggagtgtcgacaataacaaagtgccaggactgcaggttgcaggcacttggagcagagatagattcattgatgatttccagcaattcgtcacgggaaatcttcacgctggaatcatagtgccggatagactttctgttttgcatgatatctttaaaatcgttgttcattttattacctcaaagaatgtacgattacatctacatttacattgtaaccgattgcacataataaacaaccatgttttactgaaaatattttgtatcatccgaaccggagaaagcgctataatataagtagtaagaaatggtcagagatgggtgagaaataaggtgagcaaaatgaagatgaagcatgctaagagaatcgtccttttgctggctttaggctatgctggtggtcaggctttgaagcggtcagcgccattcttgaagggcgtgcaggcagggatcctcatggataaggggaagagaaagctcaaggagagcgaacctgtccagaaacttaaggaattagctgataaatagaaaataatgtacgcgtggttctagttgaaacacatctccattcttagactagtgccacgcgtattttgtggaatgtaattgaggattaggaatatgaaaatgaaacttagtcgtattctgacgcttatagtagcgttaggtttattaggtagtgctgttgaaacgatacctagttcagtacagccagttaaagttgcagcggctcaaaagaagactgctaagaagaaaaagacaaagaaaactacttcaaaatctaagaagaagtcaaagaagacgacaaagaaggccacttcaaaatcgaagaagaagtcagtaaagaaggccacttcaaaatcgaagaagaagtcagtaaagaagactacttcaaagccaaagaagaagccggcaaataagactacttcaaagtcgaagaagactacttcaaagccaaagaagaagactttagcagaccgttacaaaccatcagtcagaaactttaagaagataaaagtaggtgtgagagcatcaagtgatatttttataaagaataaagaatcacttcctgcaaatactacgtttaaatttagtaaagaacctaattttaataaagctggatcatatactacaactatcattgctcgttattcagatggatcaaaatctatttcaaaaccatttgttgtagtagttataccaaaaactgacgctgatttatatgaacctactgttaaagatggggaagcctttactggagttagatttgaaagtggttctttagtcactaataaaggtgagcttccaaaggatacctggttcagtataaaaacatctggagacttcaataaggttggtatgtattcagctcaagtgataactcattaccccgactattctaaagatacttcaaagccagtgaaagttagagtgtctgaaggcttttcggttgaaacttctgaagatcaatattcaccaaatagcagatatttaatggctaaagttacaaacaagtccaataaaacattaaattttagagaaagcgtagtaggaaaagatagtcatggcaataatcttgatggtctagcaggtgtggaacgtggtccagttgcaccaaatcagacagttgtgttatgggaaaacctttatgatgaaaaaccatattactacgaccatattgattatgaaatacatgcaacagacactacgcatgaatctgcaaattctaatttaaaggtacaaattgttcaaaaagaagatagtggtttttgcatacagacaacaaacataggatctaagaagatttactatccggaagtatatgtgtttgtctataagaatggtaaagtattttatgaacaggagagactgttagcaggcgacgataaagatggattggagccaggtgagtcacatactataggatttaatgttagtgattatgacgatatagagttttcttacacgtcatcatatgacaaatagttttcggtgatcaacccactaaccttaacttaaccaaaaaaggatctaccttctcgatgaaggtagatccttttttatatgtaatttacttcttagtaaacgatcacaggcatgtgcaccttaaccgcgttccaaacggacttgatttcactaggccggatgttgacgcagccgtgtgacccgcctttcaggtaggccgtgcttgaccagtcggtccgccatgacgcgtcgtgcagcccgcagccgctcatcgtaaacggcatccagtagctgaccttagaagcgtagttcgacccgttgtcgttctgccctcttaaagtagcgtcctgctgcttgtacatgatgtaccaaaccccagtaggcgtagcgttgtcgcccttgttggccgtccccgtaaccacgtcagatacagttacgaccgccttgccgttgacaaccacccacatgtcctggctggcgattgacacaaccacatagctgttgcccagcccattgttgctcttgccgtagcccagaccttgcgtggtgtagccttcaccatagatgtggttcttcccgtcaatggtcttcttgccagtctcataagctgacagaaccgccttcttggcgctggccgtccagatcccccagccgtagctctggttggtaacggtgatggttgacccggctggcgtcttgaacttgtagctcttgcccaaagtcttgacttccttgtccatggcgttcagtttcgccgtcagcttgcttgcgtcgtcgtagtggacagcgccgctgtagtagctgacttgggtcaagtagtctttagctgccagggtaaaagtcttccccgccacagagtagtccacgctggccgcagtaatggccttcagcttgctcttgcccttcttcagagccgtgttctcgtaattgtagctctggtcagtcggcagctgggtgtactgcttgtcaaagtacttctggacctgctccttgctgatagtcgtcagcttgctgtcacgaacagcactgatcttgccgtccttgtagaccagcttgttgacagccttggcctggatcttttcgaccgcttggtcaaccgtcagcttgcccaccttgacgccatagatagtgacgttagcgttgaagtgcttcttgttgtatgccacctgcttcttgttttccgccagaacggttgcctggtgctgttggtaggcattgtggccccaaatacccgcgcaggccaggacgataaccgccacacccgcgataatcaggtatttgctgccttgagtatttttcttccggtagtctttgcgagaaatcattaataactccaatctgttcattcaaaagattgtgttcagtataatacgaatctcttagcgattaaaatgtacggagagatctttaatatgaatttaaaattttgtctccgcgatatcgtcctccggccggtggccttgaatccgcaccagttgccaggcaaaaggactttcttgcttctttaactgaaccgtcaggactccgttttcaaaaacaaattcacattcttcccggccgtcgagccattcgatccggtttggcgcttccgtcaagccagtcaccttgacctctgtaggataagggacttttaagaaaaggtaggcctggtagggcgcgtgccggttggtcaagacaaaagcctctgccgcgtcagctgacaagtcactttcctggccttcattaaccgcgtggccaaacttgtgcatccaggcgttcaaagcgtctaaagccgcttggtcagcttcgtcttcgccgtccacgtcaacgactaaggcctgaccggcctttctggcagctagcaaagcgtccacgacttcatctgccttgtagtgctggccagcttggtctggcaggtaggcgatggtgtacttttcgcaggccgcttttaattcttcccggccgctgacggcgcgggcaccgatgtcccttgcccggcggaccagagcatccgcgtttacatttgccccagttgggttaaaatttaagataatcgcaaaatcagggttgatcatgcttgctcctccttattgttaaacacatgttttattttactagattattaataggatgtaaaaaatgaagattgtaatttcccccgctaaaaaaatgcagacagacggcggctttttgccgaaaagccagcccgtcttcctcgaccaggctgaggagctttggtcctatttgcattccttagatcaagctcatctggaaaaagtctggcgggccaatgccaaaatcactgaagaagcccggcagatgctggctgctgacctaactcagccgcaagtaccagccctctttgcctacagtggcctgcagtaccagtacctggccgccgatgttttagaccaagccgggctagactacctggatcagcacctgcgcgttttgtccggtctttacggcagccttcgcccctttgacgggatcgtgccctaccgcctggaaatgaagagccccctgcctgcctttaagtataagagcctttatgaattctggggagaaaaagtttaccaagagctataccaagatgattccgtggtcctcaacctggcttccaaggaatacagctatctcctgactccgttcttaaaagagggagaccgcttgcttgaggtcgtcttccaggaagagaaaaacggcaaatggcggacccaggcaactcatgctaagatggcccggggccgtttagtccgttggctggcggaagggggccgggacttgtccgacctgccggacttcaccgacttcggctatgcctttgcccctgaccaaagcggggaagaccgggtcgttttccggaagaaggcatgacaatttttcacaaagtgcgaaaaaagaaaaaattttacacttttaaagggctggaaagcgcttgctgaccggccttttttcttttgtgcaataaatcataaaattgacaacgctttcagatgtgatttaatagaaacggagattgaaacacaaaaaagaaaactgtaaggtgagctagaatggaatatcataagttaactgctgaagacattgaaaacttgcggccaatgattgccgacccagaacgttttattactgaagtaactgaacactgggaccacgaccaattcaagactgtccgggctatgcctgacctggtaatccagccaaccacggctgaagaagtagccagcgtcttgaagtatgccagcgaccacgaaattgccttgactccacggggcaactcaactggtttgatgggggctaacttgactgtgcacggcgggatctccctggacatggttaagatgaacaaggttatcgactacgacccagccagcttgactatcactgttcaaccaggcatccgtttgaaccaactggaagaatttttggcagacaagccatttacctacatgccagcaccagccatgcactgggctactgtagccggcaacatcagcaccaacgccggcggcttgaaggctatcaagtacggggtaacccgtgaacacatccgggaagtcaaggttgccttgactgacggcaaggtctacaagttcggttccaagtcagttaagtcatcatccggctactccttgaaggacctgattatcggttctgaagggactttgggcgtgatcactgaagctgttctccgtctttacccaagaccaaagcacgctttgaacgccatcattcctttcccgactttggacgatgccattcagtcagtgccagctatcctggcttccggcgttgtgccaaccactgttgaatacatgggccgcaaggtcttgaacctgtgggaaaagtactacgacgctactttcccaatcaaggaaggcgacggcttcatcatcctgggcatcgattccttcacggccagcgacgctgaagcccaattggctcaagctttggaagcagtcaagccattccacgctttgaaggaaactgtcttgaacgctgaatcagacgaagccaagaccatctgggacgcccgtgaaaagctgcttttggctatccaaaagtcaactcctaagatggacgaagtcgacgtttccgtgccgatcaacaagattccgctggttctgcaccggatcgaagaactggaaaaggaagaagacatgcggattcctaacttcggccacgccggcgacggtaacctgcacatctacctttgctcagacgatatgactgacgaagaattcgccaagaagggcgacaccgttatctccgaactctacaagaccgccaagtcagtggacggcaacatgtccggtgaacacggggttggctacgcccgccagaactactacgaagacttctacggcaaggactacaccgacttgctcagaaaggtcaagggcctcttcgatcctaagggcatccttaacccagacaagatcttcccgttagactaaagcacggctccctccgcgcggcaagctttaaaaatccaaagtaaaaataatcaagaactaatcaactaagcaaatcaagaattaaccaaaaaccgaaaagaacaagtacctaacagtaagtacataaaaacaacaaaacaacattttaatttttaagcttcacaaattaattatcacagggaagggctgctccggcagcccttttttgtgcaagaaaaatgacactgcgtcactttttatgttgacacggtgtcacttcaggcatatactggaaaacagttgagggtgacacggtgtcacggaggtgaaaaatggtcaaggcaacttttgagaatttaagtaaagacaagcaggaccgggtaacagaggccctgctcaaggaattcagcgcccatactttggctagcgcccaggtggcgcggatcgtcaaggaagccgggattgcccggggggccttttacaagtactttgaggatttgacggatgcttaccagtacctgttcaagctggctatgcgggacctgcacacgggcctgaccggccggatgggggcagacgagctctatcagatgaccaaggactttgtgaccaaggccactggcagccagtactatgacttgatccgcctgcactacgcggctaacgaggcgcttttgccaagtagcaggcccaacaagcaaatgccggcctgtgcctgggcggccatggccctgtcacacgaggcgatcaaggaagccttgctggacccggacaaggcagatttttacttagaccgggagcatgaggctttagagaagctctttagccaacataaataggcaagctgggaaaagacataagaaaggaagaaagcagaaaaaatgtttttagcactaaaagagatcaagcatgaaaagatgcggtacggcttgatcgtcttcatgatctttctgatcgcgtacatgattttggcaacctggggcctggcatatggcctggcccgggaaaacacggtggctttggaaggctggcagaccaagagcgtggtcttgaacaagaacgccaacctgtttatgaacagttcgattttgaccaaggacgacttgaagaagatcgacctgactgacaaggaagccgtggtcggcgaactgcaggtagtggccaagaagaagggcaagaccgggattaacgcccagtacatgggggttaagaagggcgaatttatctacaaggaccaggatgtaattgctggccgacgggctaagagcaagtacgaagtcacggctgacagcagctttaaggacaagggctacaagctgggcgacaaggtgaccttgaacgggtcagaccacaagtacacgatcgtcggcttcgtcaaggatgccaagattaatattgaaccgatcatgtgtggctttttgccggcatggaaggaattaaagaacgtggcaccggggattgaagcttccgggatcatttcccagcggaagctgtctgttaatgggaagaacttcaagacttacgggattaaggaatttacgcaaaaactgccgggccactctgaacagaacctgacttttgaattgatgattgctttcatgttcatcatttccctggccatcgtggcagtcttcctgtacattttgactatccagaagctgccgaactacgcggttctgcgggcacagggcgtgccggccaagactttgatctgggccacggtcagtcagagtctgcttttggtaacgagcgctttggtcctggctcttttggcaatctggggcacggcggccgcgataccggcatctgttccgatggcctttacgccagggattttcgtggcaacgatcggcgggatgttggtaatggctctgctgggcgggcttaacccagttagaacgattttgaagattgacccggtacaggcaattggaggctaagatggcagcgattgaaattaagaacgtgaaaaaagtttacgggcagggggatgcagcgacggttgccctcaagggggtcgacttcagcgcggatactggcaacgtggttctgttgatgggaccaagcggggccgggaagagcaccctgctgacgattatgggtgccttgcagaccgcgacgagcgggaaggtggaaatcgacggccaggacatcagccggttgaaggaaaaggaccgcagccgcctgcgtttgaacaaattgggctttattttgcaggcctacaacctggtgccttacttgacggttaaggaacagttccagctggtggacaaggtgaagaagaccggcaacttgcgccaggaagaattaaaggatcttttggctgacctggggattgagaacctgctcaagaagtatccggagaacttgtcaggcgggcagaagcagcgggtggcaatcgcccgggccatgtacgccaacccgaagattttactggctgatgagccaacg

SEQ ID NO: 2195 - DNA, 4572 bp, Unknown
  gut microbiota DNA sequence
gtcaagaagtatccggagaacttgtcaggcgggcagaagcagcgggtggcaatcgcccgggccatgtacgccaacccgaagattttactggctgatgagccaacggcatcactggacagtgaacgggtggaagaagtcggccgcttgtttaagaagctggccaaggatgacgggaaggcgatcattttggtcacccacgacccgcggctggaaaaatacgctgaccacatctatgacatgatggacgggcagttgtcacaaagaaaataacagaagaaggctccgctcaggcggggccttttttgaccggatacgcagaaaaatgaccggatttgaatttttggcagcgtgaactatgaagaggagtattctaagtaaatgtaaacaggtaataaaaaattaatgacaggaggagtataatgttgattaagagtaaatttatgaaaagtgcaatagttgcattggcagctgggatggttggtagtgttgccgcacctgtagccaatgccgctgttgatagcaacagttacactattcaacctaattctgtatactcaaagagttcaaaccaagtaggacagaatgacggagaagatatgtctaaggcaacaaatgacagtaataaagtcattgttaccaaccgtgatgtaaccattaatggcaagactatttcaaagtcagaattcaaaaaggctctgaagtcggctacgtttgaagatacgaatacagttgagaatagtgatccgacatttggagtttcactttttgtggctccagcagctgtagcaccgttattcattcctggtatcggcgaagcgtacattacagcagcaggcacagtggttgtcgctggcgctgcggttgtagcgggaacgtggctgtcaaatacggttattgcttacttcaaagcacatagaaaggatcaaacccgttctaattacaataagcataccaagccacgccctggacgttctacgactaaaaatagatcaaaaaaaggatataaatcaagaagcaataaacgaggtcgttagggatggaaaaattatacgaaatctacacagacgctgctgaggacagttttgaagtcggtcgcctcttgtttgaagaaaacggctggcagctctacttgactttggatgagctgggccgggatgattccttgctcttgatcagaaagtcagcggtcacgcggctgttggatcaatcggattatttggcagagatccagcgccggcggaagctgctaacgcaaaaaggactggcagatcctttcaagctggaagacaaagttaccttaatcaagtcagtcggaagctttatggacttattgcccgggcaggttgtatatttttgcctggaaggcgaagattaccagcaatggggatatattgatgaaatttctgccgggcaagttaattttgcggcatatccttctggcaagtaccagcctttcgcaggaaaagttgctgtcagtcaactccggcggctagccgctttctccggtgaatggttgctggacaatcctaagttgcgggatactgaagatacaactgtagatggtttgtgcgaagttcatctgaaagaagatccagcttcattcgcggttggtcggctcttgtgtgctgatgacgacttcagcttgtatttgactgttgacgaaattggccgggatgactcattgctgctggttaagaagaaggccgttgacagagtaattgatcgatcagagtatttgcaagatatcagccgctgccggcgccagcttaaggaaagaggattagaagatccctttgaagttcaagataaagcagcagaaatcaagcagatgcaggacttctggcaattagctgccgggcaagtcgtgtcctttgtcatgaaagatgaggaagaagcagaatatggcatcttgaagagcaaggaaggggatgccttaagctttgagcaatatccgtctggcaagtacgagacttttgctggccagatcaacctggctgaagtcgatcgcttggaagcttttggcggtgaattgactttgaaaaataacaattgttagcgggaaagattgaagatcagactgtctcttcaatctttttcatttccataatttagtttatatcggagggaagcaccatgaagaagggtaaaagagttctttttatagcaatacttgtagtgacgttagctgctgagattccagtggcaaatacatatgcgcacagtgagaggctaagttttcagcaggggatttgtctcatcagaggaacgcatggtaagaaaggcaatcaatttatcgatacgcttattaagaacctatttcgtcaccggaaaaattaatgcaggatattattatttatcttacaaccatcatcctttctgctttgtttgacctttatttggttaatttgttaggtggagtaaaaatcgaacgaagacagttgcttgtcgtttcttcagttctcgtattagcaactattattgccttgtacgatgtttgggcgacttttctagccaatttgtttgaagcgttatttttctataaatacttctctaaaagcaataaactattgcttttgaattcattgctactagccttttttaccgatatttttctagatagtatcgacaattttttagaaagtagttttgctgggtactcgcagatattttcattggggatgtcattgttggcatacttcttgattattattgctattcaaaaaaatagggagagattaataaaaaatttcactagcaaaaagacaggacagccattattctgcttacttgtatacttatatgtctcaacttttcttttaaatttggcggtactgtataataaatggttttactctccaacgattactttgagcgttctgatcgtgatccaaactcttttcgcggtgattatgttttggtttgatttccatattcaaaaaggcttgctcaaccagcaggaagaagaattgcgggaaaagtatctgcaggatttggaagctagtgaagacaaagtgcgggagtttaagcatgattacttgaacctcttggcatctttgcgagaaagtgctcaaagcagccgggacaaagctttgctagaagagttagctgactattctgataccgaaattaacgatcctaagctctggaagtataagagcttaaaccatatcaacaatcacgcgctgaaggggctaattattgataagctagaccgtatgaatgcaaggaaaattagctacagtttggaatgtgcccaggaaattactgatctgccagcagaagtcaagatcttcgatttgattagagtcatcggaattgcccttgataacgcgattgaagagagtgagcttttacttcaagagacaggtgatgctggacgggtgagaattgacattatgctgtaccaagcccagcctcaagagctggaatttgttgtaaagaatagatgcagccagggaaataagatcaagctgaatgaaattggtcaaaagggaacgagcagcaagacaggccataagggatatggcttagcaaacgtacatgagatacaggaaaagtatgagaacatgtttgttgagtatggcgtctctgatgactactttactttttctatggcggttagttaggacagataatggcagaatacacgataataatttgcgatgatgaccctaagcaagcagtgaacctttccttaaaagttggcattgcttttgcaatggctcctgtagatgatcatgatatcgagtacgaagttggcaagcttgccacgaaatatcaagcagtgctcgactatttggacgaaaacagtcttgatggcggaatatattttttagacatcgaactggacaacgatcacaatggggttgatttggcagctgaaattaaaaaaagggatgaacgggcgcagatcatttttgtgacggcatatagcgaatacatgccaatgacttttgaaaggcgcattggcgcggtagattatatcaataaaaatgacgctgatttgcaggcgaggatgaacgagaccgtgagggatgcattgacgagactgggtaaaagcaacttttctaagaggctgactttttcctatcgctttggccggcagatcaataacatcaacgtagaagacgtgctatatatccatacgactcaagcggcgcataagctactgctagtcgccgcaaataagcggagcgagtttgtcggggatatcaaagcagttgatgaagaaaatgatttcttggctaagatatcccagtcttgtctgataaaccccaaaaatgtagcggcgatcaacttgcgcaaacggactattgtcatgctaaatggtgagagcctcagcttttcacggaggttccggcatgaaatggacaaattggttgacgaatataattggaaggtcgaaacggcggcaaaacggctgctccgttaggaaaatggcaattgttagcgggaacatgtagtaaatctaccatcaaaatgataaactagacagtgatgattccgcttacatattttagtctgaatatcattttgaggttgatttatgtttagaatttttgatttgctaaa

SEQ ID NO: 2196 - DNA, 2851 bp, Unknown
  gut microbiota DNA sequence
atgaaagatgaggaagaagcggaatatggcgtcttgaagagcaaggaagggggtgccttaagccttgagcaatacccgtctggcaagtacgagacttttgctggccagatcaacctggctgaagttgaccgcttggaagcctttggcggagaattgactttggaaaacagcaattgttaaaagaaaaagattgaaatatagtccaattaggggctttttagctgtattggtcaagtatggcagccagccgctctttaaagctccttcttagctcttctggcgtgatgattttcgcattcagtccaaaagtcaagagatagtcaattaagtactcaaaggtgcgtggcgtatatgaaccggtcaaataagtagtcccgccttcatgctcaagctgcatatttgggtagagatttttcaaaaaatgttcctggccccggtggttgaggagaattttaaatttctggcctgaattgtcgtgctcaaactctagctgcttttgcttcaattcagccaaactaagcttattaggaacggcagcctgctcagtacaatcttgcaattggtcgcagcggtagttccaaaaggcctggcccagcaagtcataggccgcaaacaaccagttgccatccctaaaaaagagttggcagggttgcagcaggacttgctggcccttgaagttggcccggaccagggagtcgtgcaggattgactccatcagcaggcgcaagtaagggttgtggtgaactgccggggtgttgaagaaggaaaccgctgcttgtgaggctaaggcctgctgctgccggctcgctgccaggttcttgagcagcttttggctgatcatctggaaagattcgttaaacggggtttcttttagctgctccatggctttgagcgcgaaaaatatcgcggcaacctcatccgaattgaagtatatcttggtcagcaggtcctcttgaatcagtgaatagccgccagcccggcctgcttcggcgtataaggccaagccaagttcctccaggctggcaacgtcccttagggccgtccgcttggaaatctgaaagttgtccatcaggtcctgcaggttaaagcgcttcttgtcacttaaaaaaatcagctcttgattaagccgctcagattttttcaattttttctccttatttttgctaaaaggtgccgtaaattgtcaccttttcattttatgatatctacaacaagaagaaaaggagaatttaaatatgttagaagaaagcactactttaacccaaaactttttggaggtaatcagcgatccgcaaccagtaacgatcgtttcctaccaagccagtccagctcatgtggtcaacacctggagcagctacatcaaggtggttgatgactcaaccttcctcgtgcctgctgctgggatgcggtcgattgaagcagatattgcggctcaaaacagccagctgatcctgaccttcggctccatgaagtttgaaggcactgaaggtccaggccgtggctaccacgtttatgctactggcgaattcgttgaagccggcgagtactttgacctcatgaaagccgatctgccttggttgcggaaggtcctggttgtccacgtgcaagaagttaagcaaaaaatctaaactaaataactgacaagaaaaccccctggttagatgaaaatcaaccagggggttagtgtttaggagctttttggccatctccggcttgggctgaatgaactgtcgacatgtttccagcttgtatcaccatacggccggatgattggcaaggctttgcagcagcttaatgtagctgcttgatgcaaacgatacgaagacactgaacggtctaagcagcaccagcttggactatcaaaagatcttgcagtccaaattaagttggcaaggcattgctaaagaaacaggaatcccctattctacagttaggacgatggcccagcccgactagacctctggaataccagcattgtcctaaatggcaagctgttcactgatgaaaagtaccaagacatgtcaaccacggccaagcttatttatggctatctgattcgccctgcgcaaaagcgctacaaggatgaagcgggaagagttgatgaagaaaatgattttttggctaagatatcccagtcttgtctgataaacccaaaaaatgtagcggcgatcaacttgcgcaaacggactattgtcatgctaaatggtgagagcctcagcttttcacggaggttccggcatgagatggacaaattggttgacgaatataattggaaggtcgaaacggcggcaaaacggctgctccgttaagaaaatagcaattgttagcgggaacatgtagtaaatctaccatcaaaatgataaactagacagtgatgattgcgcttacatattttagtctgaatatcattttgaggttgatttatgtttagaatttttgatttgctaaagagtagggcccggctgagcaaggttctggctccggtccagggcaggttgttcccgctcgaggacgtcaacgatgagatttttgctagcaagggactgggcgggggcttcgcggttcagccgtccagcgacttgatctacgctcccttgaacggcacggttacttctttgtttccgaccaaccatgagattggcatccggaccaaggaaggactggatctcttgatccacctgggtttgaatacggtagagctaggcggggtcggctgcgacattttagttgaagccggtcaggaagtaaaaaaggggcagctattggcgaccatgaaccgtaagttgctccgcgggctcggctacgacgatacggtgatcgtgacttataccaacgaccagatcctcaaagg

SEQ ID NO: 2197 - DNA, 31964 bp, Unknown
  gut microbiota DNA sequence
taaaaaggggcagctattggcgaccatgaaccgtaagttgctccgcgggctcggctacgacgatacggtgatcgtgacttataccaacgaccagatcctcaaaggggtctcggcaccggtcttctttagggagatcaatgccaaaagagcggtccagacgatcagctaccattaatttagatgaagaaaaaggcgcgaaagcagcaatggtgcactttcacgccttttttaatatgcttttttacaagttcgggtccatctggaagctgagcggggaatcactcgtctgctgggtaatcaagctgctgatcagcttgttgtagatgtccgtcaccgtcttggccatcttggcattggcctcatccgcgatcgccgtggcctggcttgggtcagcatgcagcttctggtcgtattcatggcggaggcgcaggaccttttccttggcttccgtctgggcgttggccagttccttgccgtacttgccccagttccggtcaaccagaaccccggccagcttgaagatccagtaggcagagttcgggctgtagtcgaccttgccattgccccacatgtaaggcaccttggtcccctgcgggaagaagggaatgtagacgctctgcgccgtaacccccatggccagccagtggtacatgtcctcgcccttaagctgcaagaggtgggattcctgggtcgtcgccaccccgatcggccggaagcttgcctggcccgcgttcttcgggttggtcaagtcatattccgtatcgctgtagtggctggccagtaccgtctgggcgtcctggacgctgagcggccggtccgccttttgaataaatggcaggtcaaaagattgcggctcctgcttaactgacggggtcagcagcttttgcccgtaccaaacccgcggggtgttgtagtgcaggtcgctctcgcttctcgtgccaaaaatttcccgccagttgaacttggcttcctttggccacagctggtgctcataaacgaattcctgcaggccggctgaataaaggaagttggccggagcgttaaagtcgatctcctgaattgacagttggttggcaaccaccgtgtaggagtcgtccgggattctctgggcaacccagtggtggccggacccgatttccaagtaccaggcctcgtctctgtccgcaaacagaatcccgtttgattcagccgccccgtacttttccacgatttcgcccaagcgcttgaccccttcttgggccgtcttgacgtaaggcaaaacaatagtcaccatggcttcttccagcaggcccttttcagcgtcaaaggggtcgatggccagaacccgctcgttggcataagcactttccgtagcactcattgccacatggtactcattgatcccgtcttcttcaaaaagcccgtactttttcgtccattctggagtggatgaatatgcaaaggcctcctctggcaaatcaattgtgaacttgttatcatgtgacttgaaagtctgggctcctgcttgccgctggtggaaggccaggtgcttgggccaggccgtccgtgagtcttcattgcggccaataatcacgctgccgtcaaggctggcctttttcccgatcaagattgaagtgcaggatgaacgtccgtgtgttgtcataatttgtcctcttttctccttttgctcttgtttagattttaccttattttgcctccgcccgcagggacggggtttatctgcttaactttttactaaaaatacgccgttggtttgatattgtgctaatatattaattggtacgaataagagttttttataggctgattgccgataattcattagtctaagctaatagaatcagctggaaaagcttggtctggttaggaatgaaatattaaagtgctttcagaatatgatgaaattaggtggagcagatgatggccagaaggaaagaaattgatcgcgagcgaatattggacatcgcctacaagaaggccttgaccgacgggatcgagaatctgactgcccgcagcattgcccagactggccacttttcaactcagccgatctatttggaattcaagaacatggatggcctgcgcaaggaagtgcttaagcgcgtctcctgcaccttgcgcgatgaaatcctgcagaagaaatttattggcgagcccttatacgatgttgacctctcctacctgcaatttgcccgcgaccaccggagcctgttctcaacgattttcgtcaatggggaatttggtgacgacttaatccgcgataccttgatggacctgggccacaccaagctccgcgaacagtaccagcgcgaccttgacccggaactggagaagtggctcatcgccctcaactggattatcgtcaacggcctggccgtaatgctggtcgatggcctgattgactatgaccaggacaacttcgtccggatcatcaaacggcagctggaaagcctttttgaccgctgatccatttaaaaaatcaaactatcaatcgggcatttctatccttgtaattttttcacaaaaaccctgctgaaatccctttaatttgggtataatagggaagtaatggaaaatctgaaaggtggtttttatgaaagttttagctcttaacggatctaacgctgacaagtcttacaacgaaatgctgctgaagttcattgccaagcacttcgctgataagtatgattttgaattcgcaaccgtgaaggggttgccgatgtttaaggaaggccaggaagacccggctgacgtggccaaattgagtgaccaagttgccgctgctgacctggttttgatcgggtcaccggaacaacagcactcagtaaccagcgctttgaagagcgccctggaatggctgtcaaccaacactcaccccttcaacggcaagccagtcgttatcgtgtcaacttcaccgctggcccaagggggtgcccggtcacagaccaagctgaagacaattttggcttccccaggcctgcacccggttgtcttcaacgacgatgaattcatgatgggcggggcagctactgcctttgacgaaaatggcgatttgaagattcccggtaccgttgacttcctggaacacttctttgacgaagtcgacgcctggtacgcacaaatcacgaagtaagtggggggattgccaaatgaaattattagctattgtcggaactaatgccgatttttctttcaaccgtctgctctgccagttcatcgccaagcgctttggcgataaggcggaaatcgaagtcgctgaaattggcgacctgccagccttctacaaggaagggcaagctgatgcccgcgttgcggcatggcgggaaaaggttgaccaggctgacggcttgatcatcgctactccagaatacgaccacgctattccagctgctttgaagagcgctttggaatggctgggcagccacgctggcagcaaggttatggcctacaagccagtctgcgttgtaggcgtgtccttgggcggccaaggcgcttcccgcgcccaggaagatgcccgggaaatcctgctgtctccggacatgacggccaacgttttgccaggcaacgaattgctgatcggccaggcttccagcagctttgacaaggaaagcggcgacctggttgacgaagcttcaatcgctcagctggacaaggttatggaagccttctttgctttcgttgcccaagccaagaagtaatgtaaaagaaaaactgcaaaataaggcggatagcttggcgcttccgccttgttttgttttaaaattgtagggagaagtgaaggaggagaaaagatggcagaggagcttttacccttgaaaacagtccgcaatccccgggaccttggcggctataccggctttgccggcaggaagatcaaggccggacttttgctgcggaccgggacggtcgcaacgatcagtgaagaagatggcaattatttgcgggcccgcggggtgaaaaccatcatcgacctccgttctccgcaagaatgccgcaagcgtccggataaaaagctagccgggatccagaacgtcaatatccccgttaacagccgggaccagaccaaggccggagccagcctggcggaattagccaggcagtacggcctagaccccctggcgggcttccgccatatggtggaaagctaccggctgatggtgacggaagagcacgcccaggcggcttttggccaggttttagcctatctggctgaaactgaaggcggaactatttaccattgctcggaaggcaaggacaggacgggcctggtgactgtctttttgctgacagttttgggggttgacccggaaaccatccgccaggactatcttttatccgctccctaccttaacggctaccgggccaaaagggacaaggaagcccgggaaaacggggaaagcctggtgcagcgggccaaccttaggtctctgggcacggtcaacaatgagtacttagacagcgccttgatcaccatcgaccaggaatatggcggcatggaagcctttttgacccggcaattgggcgtaacgcccgtccttcgtgaccagctccgggccaagtatctagaagagtaaggatttaaaaaatgggaatcatcaaatacatatcaactgaccaagtcatggcccagcacaaggccatggggacccacatcagcctgcagatctacggggcaagggaagacccggaaaagatcctggaccagaccaaggtcctaatcgaccactttgaagacctgctgacggtcaaccgcaagccggaccacccccgctacggcctgtccgaagtaactcgggtcaacgaccaggcgggcaaggaggccgtgcaagtctccagcagcgtttacggcttgatcaagctggccgttgagaccagccgggaaaacttcggcttcaacgccttaatcggccccctggttaagctctggtccatcggctttcaggatgcccgcgtgccaagtgacgcggaaatccaggagaaaatgaagctgatcgacccctggatggtcgaattaaatgacgatgaccacacggtctttttgaagcaggaaggcatggagctggacctgggcgggatcgccaagggctggacggccgaccggatcagggacctctggcgggcttacggggtcgaagccggcatcatcaacctgggcggcaatgtcctcttcgtcaacccttgcccgaagcggaccaacgggatgtggacggtaggcgtccaggatcctttgaagccgcggggagaaaacatcacggccatgatgatcccggaatgctccgtggtcaccagcgggacttacgagcgctttttggaagtggacgggcacaagtaccaccacttgatcgactcccggaccggctacccggtggaaaccaacatcgccggggtgacgaccttcaccaagaattccgttgacgcggaaatcgagtgcaagcgctgcttctttgccggccagccaattgccaactgggtcaatgaccgccgcttaggcgccatttacgtgtataacgatgaacgggtggaaaaagtcggcctggattactaaagtaaagcaaaagcagcctcaccttctggtgaagctgctttttccttaggccgtggtccggctgacgctgaagagagtcttgaagaccccggtcgacagacctggcgtgtcgttgacgatgaaactgagcagctgtgaatcgctgatcagctggctcagctggctgatgccgactgagttgaggatggacaagaccacgtacatgaagaagtaggaggccacgaaagaaacgatggccccggccatgtggtccaaagtggccgtgaaaccagtcttggtctcctgggcgggcagccaggccttgaagatcttggatatctgcttgaggatgaagaagagggcgaagaaggccccgaagcggcaggcatgcaggaccaggctggagtcgcccgcctgcccctggacgaactgggtgtagatcaggtcgccgaccggattctgcagcatgatggccagcatgaagaccagaccggcgaagatcaaattgacgatccgcttggagaaacccacatggtagcctttgtaggtctgccaggcgatgtagagaatgacgaaaataactaagagcatctttataacctttatatcctttgtttttagctgtaattttccatggattctttttgaccttcaagcaaaaataatccataattgttaagatagtttgtgtaacatttttttgcgcaagattgctttttgcgttacatttaagggtgtgaaacacggtttcacaggtgaaagaatgaatcctgaactttttgcagaaacattgtcaaaatataattttaagttgtctcctgtccaagagcaacaatttaaaacatattttaaggaattggtccgggtcaatgaacacgtcaaccttacccggatcacggacgaagacgaggtctacctcaagcacttctacgacagcgtgactccgctcctgctctggccagaggtctttgcagaaggagccaagctctgcgatgtcggggccggagccggctttccgtcactgccgatcaagatcctccgcccggacctggaagtcaccatcgttgactctttaggcaagcggctgaacttcttgtctgacttgctggagaagcttggcatcgaaggcgtgaacctggtgcacggccgggctgaagatgtggggcaaaacccggactaccgggagaagtttgacctggtaactgcccgggccgtggccagaatgagcgttttgagcgaatactgcctgcccctggccaaagtcggcggcaagttcctggctttaaaggggccgcgggctgacgaagaattggaagacgccaagggtgccctggagaaattgggcggcaaagctgtcttcagccgggtcatcaccctgccaggcagcgctgaagagcggatcctcgtcctggttgacaaggtcaaggcaactccgggcaagtacccgcgccaggcaggcacgccaagccggaaacccttgtagttttttggaggtgcccaaatggcttttggtttttttcatcgaaatgaaattccccaaaacaagcaggtccaggacctgcctttagcggaaatccatccgaaccgctaccagccaagaaggacttttagcgatgattccatccagcaactcgcccagaccttgcaagaagaagggctcttgcagccgatcatcgtccgccaggaccagggcggctacgaaatcattgccggcgagcgccgcttccgcgcggccaagagcctgggctgggagaagatcccggctatcgtgaacaatctcgatgaccagcagaccgcttctttggccttaatcgaaaacctgcaaagggaaaacctgaatccgatcgatgaggcccaggcttatgagcagctgatgcagctcaacgacttgacccagacccagctggcgcaggatatcggcaagtcccagtcctacgtggctaacaagctccgcctgctcaagctggctgaacctgtgcaagagtatctggccaaaggcggactcagcgcccgccatggccgggccattttgggcttaagcgaagaggaccaggttaaattggctgaagagattgtcgaaaaaggtctcagcgtgaaagagacggaagagcgggcggccaagctggccaatcctaagccagccgttaagaagaaggcggtggtccgctatggccgggacatgcagctgcagatcaacacgatcaagcaggcggttaaactggccaaggagtccggcgtgaaagtcaaggttaccgaggcgaagagcccggatgagtaccagattactatcgtgatgaagaatcagagaaagaagaaggaggactagcatgggcagcgtcatcgcagtcgccaaccagaagggcggcgttggcaaaaccacgacgaccatcaatttggccgcttccattgctaaaagaggctacaaggtattgattgtcgacattgacccgcagggcaatgccacctcaggcttggggattgagaagtcgaccatcgagtatgatatctacaatgttctgatcgatgaaatcccgatcgcctcagccatcaagccgactagcagcaagaagctggacatcctgccggccacgatcaatctggccggggcggaaaccgagctgatcagcatgatggcccgggaaacccgcttgaagggggccattgaagacttgggcgacaagtacgacttcgtctttatcgactgtcctccttctttggggcagttgtccatcaatgcctttacggccagccagtcgattttgattccggtccaaagcgaatactacgctatggaaggattgagccagctgctcaacaccatccgcttagtccagaagcactttaacaaggacctgggcgtggagggggtcttgctgaccatgctggatgcccggaccaacctgggggccgacgtggtccagcaggtcaaggaatatttcggcgaccgggtctacaagacgatcattccgcggatcaccaagctggctgaagcgccaagctacggggaggcaatcacggaatacgcgccaagttcgcgcggggccaaggtttatgatgacttagcaaaagaggtgctgaaggctcatggcaagagactcaagaaataagaaacaggaaaagaagaagggcggcctgggccggggcttggaggcgctttttgaagaagaaccccaggtaaagccggccgaagaaatcgaagacctgcctttggcagaagtccggcccaacccttaccagccgcggaagaattttgatgaaaagaagctggccgaactggctgaatccatcaaggaaaacggggtcctgcagccgatcatcgtccgccggtcagtcggcggctacgagatcatcgccggtgagcgccgctgccgggcttccgaattagccggccaggccaccatcccggccatcatccgccagtttgatgaaagccagatgatggaagtggccatcttggaaaacctgcagcgggaagacctgactcctttggaagaagcccaggcttatgaaatgctgcaaaagaacctgggcttgacccaggaagaggtttccaagaagatgggcaagtcccgcccttacatcaccaactacctccgcctgctcaccctgccgcagaagaccaagggccttttgcaaagaggggaattgtccatgggccaggccagaacccttctgggcttaaaggacaaggacaggatcgatgaactggccaagcgggtggttaaggaagggatgccggtccgcaaggtcgaggcgctggtcgccaagatgaacgagcgcgggcagaagcagaagaaaaagaatgccggcaagtcagccttcgtgcgggccagcgaaagccagctggccgccaagttcggctcgccggtaagcattacggaaaacaagacggggaaggggcacttgtcaattgactttgcttccccggatgaactgaaccggattctggatttgttaggtgtgaatctcgatgactaaaaacattacttttgacttggcggacacggttgaaatgaagaagccccacgcttgccagaccaacaactgggaggtcctgcgcctgggcgccgacatccgcttgaaatgcatgggctgcgggcacgtggtcatgatgccgcgggctgatttcaacaagaaggtcaagaagctcctggccaagagcaatgatcccgtcaacttgaagaacgatttttacgtggccaaggaagacatcgcccggccaaatttcggctaggcattgactaatctggccaaaaggccaagaattaaacacgcaagcaagaaaaaacaagaaagaggaattacaaaatatggctttaactgctggtatcgtcggtttgccaaacgtcggcaagtcaactctttttaacgcaattaccaaggcgggcgcggaaatggctaactacccattcgcgaccattgaaccgaacgtggggatggttgaagtgccggacaagcgcctggccagaatccaggaactgatcccggccaagaaggttgtccacacgacttttgaattcaccgacattgccggtttggtcaagggggcttccaagggtgaaggcctgggcaacaagttcctggaaaacatccgtcagaccgacgctatcgtgcacgtggtccgggcttttgacgatgaaaacatcacttccgtctccggcaaggttgacccggaagaagacatcgacaccatcaacctggaactgatctacgctgacctggactcagttgaccgccggatcggcaaggtgcagaagatggcccagcaaaaggacaaggaatccatggctgaatacaatgtcctgcaaaagatcaagccagttctggaagccggcgacccggtccggtccatcaagttcactgatgacgaagccaagatcgtcaagggcctcttcctcctgacttccaagccggtcatctacgtggccaacatcgcggaagaatccatggctgatccggaaagcgacaagtactaccaaatcgtcaaggcccacgctgacaaggaaggggctggctgcctgggcatctccgcggctatcgaagaagaaattgccggcctggacgatgaagaaaaggcagaaatgctggcggctgaaggggttgaagaatccggtttggaccgcttgatccgggctgcctaccacctgctgggcctcagaaccttctttacggccgggggcaaggaaacccgggcctggaccttccaccagggcatgaaggcgccgcaagtcgccggggtcatccactccgactttgaacggggcttcatccgggccgaagtcgtttccttcgaagacctggacaagtacgaaagcatgcagaagatcaaggaagccggcagagtccgcctggaaggcaaggaatacgaagtccaggacggcgacatcatcgaatttagatttaacgtataaggcaggagacagaagtgagcgaagaaaagcaagttaagaacgcttctcaagccgagctgcaaaagcaggggcaggcagaagccaagacggaaagcatcaagcaggagaacccggaagaactccgggggaaattgtccaacaagaacaaggactacatctaccgcttgaagaaggaactggttgccggcggcatgagcgaaggcgacgctgacgcccagatcgacggccttttgccggaaatctacgacgcccagatcaaggggcagccggccaacgttttgtttggcgccgcgcctaagctgaaggccagccagatcctgcacccggtcgttaagccggaaagggtgccggacaagctggtagccctggacggggccctcttctacacggccatgctgacggttctgtttggggtcttgcaattgttcacggacaacagcaagtccacttcctccggctccgggatcctgaccttgatcgtgatgggtctggccatgggctggtacttcaccaaatacaacacctggatgcagcctgacccgaagaccggcaagccggcctggggcaaggtgatctggggccttctggggtcacttttgatcatcatgctgatcgtctttgtcctctcaattccggccctgtccgtcatcaacccggttctgccaggctgggctgacatcctggtggccgcagccgcttacgggattcgctggctggttcgccgtcactacgggattgaagggacttctctcagcccggacaagctgaccatgaagaaaaagtaaatcaatagcgtgctttttaatcctaatgggtgtaaaataagctgataagtataaaacaaatagatgctcagcatctatttgtttttgtttgacgatttttttataaaaagcgatgagcagtaaagagggaggtcattaatgcttaaaactttattgaagtccgtccgccagtacaaaaaagagacgctcttgtctcctttgtgcgtggtcgtcgaggtcttcattgaaatgtatatcccatatatcatgggtctcttgattgacaacgggatcaacaagggggacatggactacgtgcgcaagatgggtctgttcaccatcctgctgactctggtctccctggtcctgggggccagtgccagctacttctcagcccatgcggcagccggctttaccgccaacctccgccaggacatgttctaccacatacaggacttttcatttgaaaacattgacaagttctccagcgccagtctggtgacccggctaacgaccgacgccaacaacatccagcaggcctaccagatgagcatcagaatggccgtccgggccccgttcatgatgatcatttccctgttcatggcagtttcgatcagctggagactgaccctgatcttcctcgtggctgttccggttttggctcttgccatgatcttgatcattaagaatgcccggccatacttcccgagaatcttccgggcctatgacgaactgaaccggaaggtccgggaaaacatccgcgggatccgggaagtcaagacctatgtccatgaagaagagcagatcgagaactttaaaaagtccaccagcaagatctacaagctcttcagacgggccatgttcatcatggccttcaacggcccggtcatgaccatgatgatcgacgctgtcatgctggccctgtcctggtttggggcaaaactgatcgtgggccatcaactagcaaccggccagctggtttccatgttctcttacaccatgtccatcttgatgtccttgatgatcctgtccatgatcttcacccagctgatgatggctcagtcaagcgggcgccgggtggctgacgtcttgacggccaagccaactattgtcaacccggccaagtcacctttgaccagcgtgaccaacggggaagtcgtttttgaccacgttgacttcaagtacaacaaggaagatgcccactatgccttaaaggacattgacctgcggatcaagtccggggaaactttggggattatcggggaaaccgggtcttccaagtcaaccttgatttccatgattcctcgcctttacgacgtgaccggcggggcagtcagagtcggcggccacaacgtgcgctcttacgaccttaagaccctgcgcgacaacgtggcggtcgttttgcaaaagaacgtcctcttctccggcactatcaaggacaacctcaagtgggggaatgaaaaggccagcgacgaggaaatcgtctgggcagccaagattgcccacgctgacggctttatccgggaaatgccggacggctatgacaccatggtcgaacaaggcggcaacaatgtttccggggggcaaaagcagcggatcacgatcgctcgggccctgttgaagaagccgaagatcctgatcctggacgactccaccagtgctgtcgacaccaagactgaacgggaaatccgggaagccttgaagcgggacctgccggaaacgaccaagatcatcatttcccagcggatcgtctccatcaaggatgccgaccggatcgtggtcatgaaccacgggaagatcgaagacgtcggaactcacgatgaattgatcaagcgcaacgacttgtactcatccatcgccaagttccaggaagaaaacagcaagtaggtgataatcgatgactaaaaaacaagctcagcaaccatcacaaatgcagaccttgacccgcctgctgaaatacgtctaccgggttagcccggcggctttgatcgtttccctggtctccgtgatcatcagcgcggcagcttccgttgtcggctccttgttcattgaacaggttatcgaccgctacatcacgcccatgctcaagcaaaagagcccggactttggccccttggctcacgctgttttgctcatggccggcgtttacgccatcggtctggtcgccaactaccttttcaccttgctgatgatggtcttgtcccagcaggtgcaaaagcaaatcagaaatgaaatgtttacccacatgcagcggctgccgatcgccttttttgaccagaacgaatacggcgacatcatgtcccgctacactaacgacatcgacaccttgatgcagatgatctcccaggccctgccgatgttcgctaactctgtcttttcagtagtcttcgttttggcggggatgttctatctcagctggcaattgaccctggtttccctggtagtggttctcctgtccttaggcgttgtccgctacttgaccggcaagtccagctactactttgaccagcagcagaagactatggggacggtcaacggctacaacgaagaaatgcttaacggcttgaaggtcatcaaggtcttctcccatgaaccggaagccaaggccgactttgaccgctacaatgaccagctgcggattgcctcaagcaaggccaacacctatgccaccatcttgttcccaatcatgggcaatatcggcaacctgctctatgtcttgatcgccttgctcggcggggcggcaatcttagccggcaacattccactgaccttgggggctctggcttccttcatgcagctgtccaaggccttcatcatgccgatcgcccagatttcccagcagctgaacgccatcgttctggctattgccggggcccggcggattttccaggtcctggatgaaaaagttgaagtcgacgacggccaggtaactatcgaagaaaagccgggcgtcaagaatgcctggcagtggaagctgccgaccgaaaacggctttaagtacgtgccagtcaagggtcacatcgtttttgaccacgtcagcttcggctatgtaccaggcaagcagatcctgcacgacatttcccttgaagccaagccgggcatgaaggtggccctggtcggggaaacgggggccgggaagaccaccatttccagcatgatcaaccgcttctatgaaatcaattccggcacgatcacttacgacgggatcgacatcaaggacatcaagaaggatgacctccgcaagtctgtttccatcgtcttgcaggaaactcacatgtttaccggcaacatcatggaaaacatccgcttcggccggcctgacgcttcagatgacgacgtctaccaggcagcccgcctggcccgggccgatgagttcatccatgacctggatgatggctatgaaacggtgatcgacgggggcggcggtgacctctctcaagggcagctgcagctgctctccattgcccgggccatgatcgctgacaagccggtcatgatcctggacgaagccaccagttccatcgacacccggactgagcgcctggtgcaagccgggatggacaaccttttggctggccgtaccagcttcgtcattgcccaccgtctgtccaccatcgtcaactccgacttgatcatagtcctagaccacggccggatactggaagccggcaaccacgaccagcttctggccaagcagggctactactacgagctctacaccggcaaaaaagaaatccaataagagcgaatcttattttttactaaaatccaagtcagagcgtacgtcaaagtacgctctttttggtatattggttaaaataaaaggtacaatataggatagataagtttggaatagaagaggttttgcaaatgaaaattctcgttgtcgatgatgaccacgaaatcgtggaactcttaagcatttatttgaagaacgaaggctatgagccgattgccgcctacaatggcaaggaagctttgaccaagctctcaaccacgccagatatcgccttgatgattctggacgtgatgatgccgaacctgtcaggcatcgatgtggtcaaggaagttcgcaaggattctgacattccgatcatcatcgtcagcgccaagaccggcgacatggacaagatccagggcttgatcaccggggccgacgactacgtgtccaagcctttcaaccccctggaagtcatggcccgggtccggtcccttttgcgccgcagccgcaagcaggtcaaggaagagcagcctgacgttttggaagtcgggcctttgatcatcaacaaggactcccatgaggtcaagacggttgaaggcaaggaaatccagctgacagccctggaattcggcattctttaccttttggctagccaccccaaccgggtcttctcagctgatgagatcttcgagcgggtttggcagcaagagtccattgtcagcgccaagacggtcatggttcacgtttcccacttgcgggacaagatccagaaggccaccgacggcgaagaagtcatcaagactgtgtggggtgtaggttacaaggttgaagcctaagcaagacaaagaaaaacaagtcgtccagggcaagcggccccgggtcaagctgaccgcggctgagaagagcgagctttttgccgaaggcgtggtgacggtcatcatcatgctgctcttgaatatgtccgtcatcatcctctaccatttggcggtcctgcaggacaagagcctggtcaacggcatttattttttgaaaaagaccatgacgatcggaccgggctaccatatctggtcctgggaaagaatcgggatcattttgatggggatcgctgacgtcatcgtcttgtactggcgcttaatccgccgctaccaccaaatgcagctgcggcacatcatttccgaattgcactatattgctaacggccactttgaccaccggatttccttcagcgtcaacaacgacatgcagaaggtgatcgattcgatcaactccctggtcgactcaaccgtgggggcgatcaatgaagaaaaggcgatcgagcagtcgaaagacgaactgatcaccaatgtttcccacgatatccggacccctttgaccagcatcatcggctacctgggcctgctgaagaacggggccgtgaccagccaggaggacatgctcaagtacatcaatatcgcctatgacaaggctgagcagatgaagtccctggccaatgaccttttcgagtacaccaccttgaagtcgaccaagaccaagctgaacgtgaccccgatcaatatcaagggcatgatggagcaggtggcggccggctttgagctggaagcggagaagaagggcattgcctttagcgtcaaggcccggccggatgacttgatcgtcaacgccgacgtggaaaagctggtccgggtctacaacaacctgatctccaatgccttaaagtacgcggctggggccagccggatcaacctggtggccaacctgatcaactacgagcaggttgagctgcgggttgagaataacggggaaccgattcccaaggacaaattgaagaagatttttgaccgcttctaccgggtggaaagctcgcgcaataccaagaccgggggcacgggcttaggcctgtccatcgtccaggggggcgtcgagctgcacggggggacgatccgctgtgaatcaaacaaggattggaccagtttcatcattctcttgccccgggatccccaggcaaatcttagacctgtggtataatttgaactgaaacttaattgacagtgaggagtaaaaatgaacatctcattaaacacttgtattttaatcttaaaagaacaccacctgctcaagtctagtgccgtccaggacactgtccagaccagaatggaggctgtttcttatgactcacgcgatgtccagaacaacagcctcttcttctgcaagggggcgggcttccggccaacctacctgaccatggccaaggaaaacggggcaattgcctacgtggctgagcagccatacccggaaggcacggggatgcacgccttgatcgtccgcaacgtgtccaaggcgatggcccttttgtcagctgccttctaccgcttcccgcaagacgacctcttcctggttggctttaccgggaccaagggcaagaccacttccgcctacttcttaaaggggatgctggaccagctcaacgggggccggactgctcttttgtcctcagtcgacaacatcctcgggccggctccggaagacaccttcaagtccagcctgaccacgccggaatcactggacttgttcagagacatgcggcgggcagttgacaacggcatgacccacatggttatggaagtgtcatcccaagcctacaagaagaaccgggtctttggcctgacctacgacctgggcttcttcctgaacatcaccccggaccacatcggggtcaacgagcacccgaactttgaggactacctccactgcaagctgcagcttttggttaactcccgcaagtgcatcatcaacgcggaaaccgaccgtttcgctgatgtttacgcggcagcaacgaccacgaccaacccggacagcatctacctgtttgcccgggacggctttgaaaatccggatctgaagaagccgatcgacttccgctacaagtccgtggaaactgacctggctgaaaccaagttcaccttgactacggcttcaagcaaggcccacaagctgccaatctctggtgaatacactctgcagatgatcggcgacttcaacgaaaccaacgctaccggcgccatcatcggggctggcctggccgggatgagctatgaagactgcgccaaggggatccggcacgtgaccatcccaggccggatggaaaccgtcacgacccaaaagcacggcttgattgtggtggactatgcccacaacaaggcctccatgctggccttgatgcggttcatgcgccgggaattcaccaacccccgggttatcgtcgtggtcggggcgcctggggacaagggaatttcccgccggccgggcttcagtgaaagcttgacggcggaagctgacaaggcctacctgaccacggacgaccctggctttgaaaatgcccaggacatctgcgaggaaatcgatgccgggatcgaccactccaagtgtgaaacggttatcgaactggaccgggagaaggccatcaaggaagccatttccgaagctggcccgaacgacgtggtcctgctctgcggcaagggggctgacgccttccagaagatccgcggggtagacaccccatatgccggcgatattgttatcgcccggcaggtggtccaggaattagaaaagtaaggattgatatttagtgaagcatttctttagcattattggcgggatggggaccattgcgaccgaaagctatgtccgcttgatcaaccaccgggtcaagatcagtaaggaccaggactacttgaactacatcctagtcaatgatgcccaggtgccagaccggacggcctacatcaaggaccacagccagccgaattttttcaatgcgcttaaagaagatgttttaggccaggccaagctggggccggacttcatggtcatgccttgcaacacggcccactacttttatgacgacctggcggccttgaccgacattcccttcctgcacatgatgcggattgccgtgcaccaatatgtcgaccagttcccaaacagtcccaagatcggcttgatcgcgactgaagggtcaatttacgaccatctttatgaagacgagatccaccgggtgggccgggaagtcgaattcggcggccccgagatccagccgatggtgacggaattgatctaccgggacgtcaaggagaaggggatcgtcgacaaggaactctaccatgagatcctccgcaagatgcacgacgaatatggctgcgacgtgatcctgctgggttgcacggaactttccttagcccaggagcaggcgccggaccacccctaccaggttatcgacccccagtcgatcatcgctgacgtgtcgatcgaactggctctggcgatcagaaacgggcaagatccccgccaagcctgccagaaatatctatatgactaaataaaagaccagggtttcctggtcttttttgcttgcctggctaattttaaacatgtttcagtcaaaaacagtcaattttttaggaaaatcgctcatttttgacggaaaatgattgcttttgactgagaaagccttcacaatagataacgaggtaagataaagatgctgacggaagagcggcaacaaatgattgcccattatgtagacgaacatcagatttgccgcgtaacggaactttgccgcttgacctcgacatccgagtcgacgatcagacgcgatctgagtgaaatggaagaccggggcctgattaaacgggttcacggcggagcgcagagcctgcagacttttggccaggatgtggcccagcagatccgcttcaatctgaacaaggatgacaagctggctattgcccgcctggccgccaggaaggtccacccgcacgactatctctttttagacgcggggacgaccgtttacgaaatggttccctttttaaaagagatcagcggcctgcacgtggtgaccaacgggctggaaacggctctggccttgactgacgctggaattgactcctgccttttaggcggccatgtcaagcggcagacccacgcggccattggcgcgaccactgtctcccgcctgcaggagctgaacttcaacgcggctttcattggggccaacgccctgagcccgtcaggctttttaaccacgccggacactgaggaagctgccgtgaaaagggcggctatccagcaaagccagcaggctttcgttttaatcgaccgcagcaaatttaacgcggtaacttttgccgaattcgccaagaccgatcaggtgaccatcatcagccgcctggaggctggcgaccgggagaaattgccagtaaatattcaacttgaggaggctaaataatgatttacaccgtgactgtcaacccagctttggactacgttctgcaactgccagaagtcaaggacggggagaccaaccggtcaagcgacacccagttcttagctgggggcaaggggatcaacgtttcccagattcttaaccaattaggcgtggacaatactgcctggggctttgtcggcggctttaccggcgaagaattgatccgccaattgaacgtcaagaagatcagcagcgacttcgtaagaatcagcgacgacacccgggtgaacgttaagatccacgcccaggaagaaactgaaatcaacgcggctggcccggacattaccgaccaggaagtcgcagccttcaagtcccgcctggacgacctggaagcaggtgatgtcgttgttttgagcggcagcctggctccaagcctgccaactgacttctacgaaagccttttgccgctgatccgggaaaagggggcggaattcgtcgttgacacgactggcgaagccctgctgcgtactttgaagttcaatccattggttatcaagccaaaccaccacgaactggctgacctctttgacaccagcttctcatcaactgccgacatgctggaagcagccaagaagctgcagaagctgggcgcgcaaaacgtcatgatctccatggctggcgaaggtgcttacctggtaactgctgaccacgtctaccacgccaacgcggccacgggcacggcggtcaactcagttggcgccggggactccatgattgccggtttcgtcggcacctggtttgaaaagcacgacgcggctgaaggcctccgggtcggcagcgcctgcggcggggcaacggctttcactgaagacatcgcgatcaagagccaaatcgacgccgtattgccgcaaatcaagattgacgtcgttgaataaagggaataagaagtaacagagtattttttagtaactgaggaaaacaagatgcggattaaagatattttgaacccagagtccatgattatggatttgcaggctaccaccaaggatgaagccatcaacgaaatggccgacttggaagtagctacgggtatcgtcaacaacaaggaaaagttcgttgaatctatctgggcccgggaaaaggaatccactaccgggatcggcggcgggattgccatgcctcacgccagaaacgaatacattaacaaggcccgggtgctttttgccaagagtgaaaagggcgtggactacgactcattagaccagcagccagtccacctcttcttcatgatcactgccccagccggtgcggacaacacccacttgcaagccctggctaagctgagcagcctcttgatcaaccctgacctggttgaaaagctgaaggcagctaagacggctgacgaagttatcgacctcttcagccaggcagaagctgacaaggacaaggaagacgctgaacgcgaagccaagctggccgctaagaaggaagcggaagctaaggcagctagtgacgaaaagccattgatcgtcggcgttactgcctgcatcaacgggatcgcccacacttacatggctgaagaagccctgatcaaggccggtgaaaagcgcggcgttgaagtccggattgaaaccaacggttcagaaggcgttaagcacgaactgactgctgacgaaatcaagcgggctaagggtgttatcatcgcttccgacaagcaggtcaagatggcccgctttgacggcaagcaactggtcaagcacccggttgttgacgggatcaacaagccagaccaactgattgacgagatcctgtccggcaagggcagcgtttaccatgcagaagctggtgaagccagtgaaagctcagctgcaagcgacggcagcgtatggtcaaccatctaccggcacttaatgagcggtatttcccacatgcttccgttcgttatcggtggcggtatcttgatggccatctccttcctggttgaacaatacatgggtggcgccaagagcccggccttcatcttcttgaacagtgctggtaacctggctttcgccttcatggttccggttctggccggctacatcgctgaatcaatcggtgacctgccagccttgatgccaggtttcgtcggtggtttcatggcctcaatcgccaactcttccttgggtggctcttacgctgttaacgccaacgccaaggctgcttcaccagccggcttcctgggcgggattgccatcggtttcatcgccggttacctgatcttgggcctcaagaagctcttcgctaagctgccgaagaacgttgaaggtatgaagccaatgttgctctacccaatctttggtctgctcttcgtagccttgatcatgtactacatcatcaacccggtcttcggtgccttgaacggggttatcaccaacttcttgaacggcatgggcactggcaacctggttctcttgaccacgatcctggccggcatgatgagtatcgacatgggtggtcctttcaacaaggccgcttacgtcttcgcttcaggtgccttcgccaacgacccgacttccaagacctcagctatcttgatggctgccgttatggttggtggtatggtagcaccattcgcgactgctatcgcgactactttcttcaagaacaagtttactgaagatgaacgccgggccggtgtttccaactggatcctgggcttctccttcatcactgaaggggctatcccattcgccagtgctgacccgctgcacgttatcgtttcatcaatcgtcggcagtgctgtcggcggggccctggtaggtctgtggcacgtcggcgtgccagcacctcacggtggtttctgggttattgctttgtccagcaactggctgggctacctgggcgccgtagctgtcggctcaatcgtggctgctttgatgatgggcttctggaagaaaccaattgaaaagtaaacaaataagttaaaatgcaaaacaggagggaattaagtccctcctgtttttgtgtttagccctaaattttctttttagaaaaaatactggcattctcctggaagatttgttatattctactgttacagattttttaaatgcggacaaaaagcaagtaatagcgggcaaaattctgtaagatagatagtggaaaaagcaaaagaaagcaaaagttttatacttactgaaaaatgagacgatttattacgagaatggagcagaaaagatgatcaagttaatcgcgaccgacatggatggtacctggctcaactccaagaaggagtacgacctggacaagttcaagcagatcatggacctggccagggaaaagggggtcaagttcgtcatcgccagcggcaaccagtatgaaaacctggttacccgttttccaaaagaataccttagccagctctacttcgtggctgaaaacggggcctatgtcttgaaggggcgggaaatcctcaacatcgtggacttaaacagcgatgaactggccacgatccacgagatcaaggaaaagtacggccaggaccacccgactgtcttggccggggtgaatagcgcctacaccttgcagagctacggggaagagttttacaactacctccaccttttttaccaggaactgaaagccgtggacgactacgaaagcgtcaaggaccggatcttcaagttcactgtggcgaccggggaaggggaatcatcagcctttgctcagcagctcaagcgggaattcccgagcctggacatggtggccggcagcgactcagccgttgacatcagcaagctgggcatgaacaaggcggtaggcctcaagcttttgggcaagcgctacgggatcccggctgacgaaatggtggccttcggcgacgggggcaacgacgtggccatgctccaatacgtgggccagagctacgcgacagctacggctttgccggaagccaagcggtcggctaacgggatcatcggctcaagcgatgaaagtgccgtccaggacaaggtcctggacttgctgaagaagctatagagatactgagactagaggtaagtaaatgagtaaagctttgcaggtcgtgaacttgagcatgaagttcgacgaccaggagatttttaaaaagctcaatttcagcctggagaccgggtccatgacggctcttttgggccctaacggggccgggaagaccaccctggtcagaatactgatagggatgctgagccccagccacggctattttgagctggctgacgacgtgaaggtgggctatgtgccccagttccgcaatatcgacccggactatcccttgtcgatcaagtcttttatcgaattaaacacgcctttttggaagagccagaaggttaaggaccaggtcaaccatattttgcaggagacccacttgaaaggcctggcggacaccaggatgggggaggcttccggcgggcagaagcagcgggcctacctggcccaggccctcttggaccagccgaacttcatcattttggatgaagccacggccagcctggaccctaaggccaaggaagaattgatgagcctgatcgcccacctcaaccatgaacacaagatgacggtcttgttcgtcacccacgacattcctttggccaagcgctatatgaaggactatctttacttaagcgacgggacggtcagccaggggaagatggaagattttaaggagagtttcaactgatgtttgcctacgaattcatgcgcaatgctttttgggcggccacctttatcgcgattacctgcggggtggtgggcgtctatgtcgtggcccgcaatttcagtttcctggcccacaccctgtcggaaatcggctttgccggggcggcttttgccattttgatgggactgaagcctttgacggggatgctgatttttgccctcctgggttcaatcggggtcggggaattgtccatgcagactgagcagaaggagtcatcgatttccgcgatttccgccttcttcgtcggcctggggatcctctttttgtccctgtccagctcagccagcagctacgcgaccaacattttgttcggatccattatcggggtgtccagatccagcgtctatcagctggtcggcctgtcagtggttgtcttattgatcatttttgccatccagcggcccctaaactatgattcctttgaccatatcggggcagcggcccaccacatcaataccggctttgtcggggtggtcttcctggtggctttggccatggcggtttccattggctcacaagtggtcgggtccatgctggtctttgtccttttgaccatgccgtcatcaacggcccgttatttgggcaagtcgattccgagcatgctggcctggtcggtcggcctggccctgttgggggtctgggccgggctgtgcctgggctacatcaccaactggccggtaacctttttcatttcggtaattgaggtaacggcttacctgctggtttacttcacccaagccagaaagaagcgggcgtagtcaaatatggaattttaggagctcttgagctccttttcttttgcctaaaattgtatttttctatgcaatactgggcttgagagcattttttgccagttaaaccaaccacgagaattccacgattaagatgaacgggaaaaacgtgggcaagctgtctgcctccggggactactaccaaaagaagctggacccggtaatcgccggccgctatactttctcagtttcaagcatcaagaagctgcacgacaactgggatgactctgactcagtcgctaattacagcgaagtcgtcagcgtcctgtctaccagcccagccggcagcggcaagacttacgtcaactacacggtcacccacaacctctcttacatcggtgacaaggatgacaccagcgtgactgacacttaccaaaacgggatcatcagccaggacagtgacagcgactacgttttggaaaaatcaggtacgcctaacgctaaatagcaaaattttttaaatcttttttgacgatcaatagaggcaaccttgttaacaaacaagtttgtgaaaaaatatatagagccccgcaatagcggggcttttttggatccttcttttagcaaacgaaaatattgtgaaataaattcaagtacgagcgctaatatatcaacgttttaaatcaatattcacgtgattttttaagcgctttcatgtacaataatccttgtgaaaaatacttatagaaggagttatctgaatgtgggttaaattcatttttgccttgatcccgatcgtctggctgatcatctctctgacagccttgaagatgcctgcggccaaggcagccgttatttctcttatcctggcaatcattttggccattacggccttccagttgccagtcgttgacactttgaccgggaccttggaagggatcctgggcggcttgttcccgattgtctacatcatcgtggccgccatgttcacctccaaggtaacttttaaatccggcgccatgcaaaaaatccaggacatgctctgtggtctgacgaccgacaagcgggtcctggtcctcttgattgcctggggcttcgggggcttcctggaagccatcgccggcttcgggaccgctgttgccatcccggccagcatcttgatgaccttcgggatcaacccgattgaagcttccgttatctgcctggtggccaacaccaccccaactgccttcggggcggtcggcctgccagtcattaccttggcccagactgccggcctggacgtgatgaacacggccttcgtggtatctctgcagctgggcgttttgatcctggtcatcccttacatcttggttggcctggtcggcgggggcgtcaaggctatcaagggggtaggcttcattaccttcatgtctggtctggcttttgccttgccgcaaatcttagtggctaagtacgttggggcggaattaccagccatcgctggttccatcgtctgcatcctggttacggccctcttggccaagcggcacaaggacgtgccggaatactccgcttctaccggggacattgccaagcactcagctggtgaactgctgcaagcctgcgcgccattcatcttagttttcgtcttcgttttggccgcttcatcattgttcccagccgttaacagcctgctcaactccgcgactttgaagttccaggtttacactggcaaaaatgctggtcagttcagcctcaactggctgtcttcaccagggaccttgatcttggtggctaccttcatcggggccatgatccagggcttgagcgttaaggaaacttttggcatcctctgggacctgattaaggggatcggcaagacggcggtgactatttccgctatcgtggccctggctaaggttatgggctatgccggcatgaccagtgccatcgcggttgttttggtcaaggtcatgggtccggtttacccattgatcgcgccaatcatcggtgccctggggactttcgtgactgggtcagacaccagttccaacatccttttcgccaaattgcaggcctcagctgcccaaagcctgggcgtgagtcagacttgggtcgtggccaacaacatggtcggggctactgccgggaagatgatttccccgcaatccatcacggttgcgtctaccgctatcggccaggaaggcagcgaaggcacgatcttgaagcaggccttcaagtggtgcgggatctacactgcaatcatctgtatcttcctgtacctggtcggcttggctacgggccagctgcacttctagtacttctaattttttgagcagattctaaaaagtaaaagattggcccaaaagtaagcgattaaatgctatgataatccttgtaagttaatagtaattgatagtaattttttaatgattgaggagatttccatgacacattacatcaagggcttcccgcaaagcgaagcagatgaagacttaaaatttgttaacgttgatgagcttgaagaaaaggccaaggaagtaatgccggaaggggcttactactacgtagcctcaggttcagaatatgaatggacttggagaaacaacactactgccttcaaccactaccagattgttccccgggccttgaccgggatggacaacccgtcaactgaaactgaattcctgggcatgaagctgaagacgccgatcatgatctcaccaatcgcttgtcatgggatctcccatgctgacgctgaagttgctacccaaaagggggcagctttggctggggccatgtttacttccagcacttacggcaacaagccggttgaagaaatcgctgctgctgcgccagatgctccgcggatgttccagctttacctttcaaagaactgggacttcaacaagatggtctttgacgcgatcaacgctgctggctacaaggcaatcctgttgacggttgacgctttggtatcaggctaccgggaagccaacctgcggaccaactttgccttcccggtaccgctggacttcttcgcccgtttccaaggcgccaagggcgaagggcaaacggttgcgcaaatgtacgcttccagcgcccagaacatcggtccggatgacatcaagcggatcaaggaaatgtccggcttgccagtcatcgttaagggtgtcaactgtgctgaagacgttgaagttgctttgactgccggcgcagacggcgtttacgtgactaaccacggtggtcgggaaatcgacggtgctcctgcaactatcgacgtattgccagaagttgttgaagcagtcaacggccgctgcccggttatcttcgacggtggtgtccgccggggctcccatgtcttcaaggctttggctttaggggctgacctggttggtattggccgtccttacctttacggcctggctttgggtggcccgcacggggttgcttcagtcatcaacgaattgaacgatgaattgaagatcgacatgcaactgactggctgcaagacgattgaagacgttaagcacgcccgcttgactgacttccagtacgctggcgacactaagccatccagcactgacccgcgggtgcgcaagccatacccagttaccgcggtcaaccaaatcaagtctgaaccagacgcggctactggtgcttcacaccactaagattgaacatgtgtcaagtttaatagcaaaaaacgaagctactcactttgagcagcttcgttttcttttctacaattttttgattaagtcagtaaattcgtccagtctttccgcaaagaccttgaaggcatcttccaggtagtcggacttggtcatgtcgacgccggccttctgcatgatgttgatcgggtagtcgctggagccggacttaaggaagtccaggtaattctccttgtcttcctggctgccgtaagtaatcttgttagccagggcagtcgccgcggcaaagccggtcgcgtactggtagacgtagaagttgtaatagaagtgggggatccgggcccattccaggtcgatgtcgctgcccaggctgatcgccggtccgtagtactgctggttgagccggtcgtagaagccgcacaggtagtcagccgtcaaggcttcacccgcctggtcgctttcatgaatgaacttctcgaattccgcgaactgggtctgccggtagaccgttcccttaaaggagctcaagtagtagttgagcaggaaggcccgggtctttggatccgtcactcggtccaggaagtagttggtcagcaggttttcattggtcgttgaggcaatttccgcgacaaaaatcggatagtccccgtacacgtatggctggttttcccgggtgtacatgctgtggactgagtggccggtctcgtggaccagggtgtagagggaatccaggtccccctgccagttcaagagctcataggcgtcggtgtcataagctccgccggagtaggccccgctttgcttgtgcatgttagcgacgtggtcgatgcagcggttattgaagaggtagtcgacgtgtttgacatagtcctcgcccaaaacctgcagggcctctctggcctgggccttggcttcagcgaaagtgtagctgaggcttggcttgcccgtgatcggcacgtacatgtcccacatttgcaggtcgcccttcaggtccaggatctcttcgcgcaagttgacatagcggtggaggaggtccaggtgcttgtggacgctagtcaaaagctggttgtagacgtcaacagggatgttgttttctgacagagccgcggctaaggcgtcctggtagtggtgggtctgggcatcaaagttgtgggccttaacattgccggccaaggttgaggcaaaagttgacgcgaactggccgtagccagcgtaaagggcgtcaaaggcgtcctctctgacttcccggttctgggactggatcaagatgtcgtagttggcttccgtcagttccactgcttccccgtcttcatcttcaatgtaagggaattgcaaatcggagttggtcaagacgttgaaggtgttggccgaagctgacagggcatccccggccgccgataccagcttctcctcttcagctggcaaaacgtgctcttcctgcttgacgatctgttccaaatagtgccggtagttttccagtcttggctcttccttgaaaaaggcgtccaggccctctttccccaaggctaaaacagccggctgaatgaaggcaacagccgcctggtattcagcggccaggctctgggcgcgggaattgagggccagcttcttctggttgctggtgtcgacgtcgctggccatgctggcatagacgtagatcttggacaggcggcggtcaacggcgaaaatctgggtcaagcggtcatagaggacggccgcgctctccgtaaagccgtcttccaaggccggcagggccttgacttcctgcttgacagctttaaaggcggcctcccagtccgcctcagtcttgaagatccgggtcaagtcccaggtctgttctttgggaacctcactgcgataagggatttccatacgatacctcttctttttctcattactttacgttctattttacgatacttgatattctactgctgcaaaaaaacgtgtgcaatgtagccaaaccgtaatctttgactatgtattgtccgaagacatgaatacagacatttttcttattgccgtcatcaccggtattccgatatcccaaacaagggggtaaccgcattgaccagcgcaggtaccgaagcaccactcttgcaacttcagggaaaggctctcaccaatcctcgggtacagccaacccgcatgac

SEQ ID NO: 2198 - DNA, 50787 bp, Unknown
  gut microbiota DNA sequence
tctaaaagggcagtcccgattctggccgcgaagaagctggcgatttcactggcgtattccttaaaggtggatgcctggctgtggaaaacccacttgcggttggtcaagtaggcaaaaacgatggacaggaactgagccatgatcgtcgctggcatgatgtcccacttgaagacgctgttgcagagccagtaggagaagatgttgactagggtggtcatgacgccccagaagacataggggatgatatccttgtacttgtcccataattcattgattttttctttgtccatgtttgatactccaattttatgtattgttgtaattgaaagcactaatataaagaatagcacagagcagaactttagaaaaatgatcttgtgatattgataataaaattaataatcacaacttttgttgataagtcgactaatggtataaaatatgtagaaaggaattcgtaaggggaagtgaaaaagaatgtattatgaactggctttgctgatccgctttgtggtcattggcgcctgtgttttggcaggctactgggctatccgcacggggaactcctttttgcggctggtagtaacggttatctatggctgtgctttgatctactatgtgtttgcctcaagaatgctgacggctgctgtctactactggcagcagccggcccaaatggccgccggctcagaggttttgaaagacccggccttttggaagtgggggctgaaaaaagtctttgccagctcaaactatggcggccgctacggctttttgatgaatgttctgctcttcgtgcccttgggttacattattccatcctggtccaagtggctgcatagcatcatgatcaccacatttatggccttctgcctgtcctggtttattgaacatttccagcggatgacagggctgggcacatatgatgttaacgacatgatcgccaacaccatgggtgccttcttaggagccgtagcaatcatgccgaccttgtggatgtgggacatccaggccagaaaactccgcaaggcccgggaacacgcggaagctgaagccaagggggaagcagaagctgcccgtttggaccgggtcagccggcaactggccaacccaactgaaaaggtaccgaaggttaagatgagccggaaggactaccggaaaagacacggcgacgaagccgattaaggagcaaatcatgttgctgcgcgcggttgagctgcataactttcgcggttatcgcaattttaagctgaaatttgcccccttgaccagtctcttaggtgaaggggaagtgggcaagaagaccatcctgcgggctctggacatttttttcaacggccctttggctaagcggcctttgaagctgcaagacttaaacgagaaagccctcaaggccggggactggcaaattgccatcacttgctatttcgatgattttgctatcaaaaagtcctttgaccttaagcaatatttggaagaaagcgacagcttcgcggaagaaggcggggactttcagccagttacggaccaaaaccggggccgctaccggcagctttcagccagcatgcccctgtatgtcttttttgatgaagagtcaaaggcgaccagccccttgaacttcgtggcccgcagcgctattagggacaaggcagcggaaatcaaggaaattcaggactacctggacgaccgcctgggccgcagtctctcccagcttctggccaactaccgggacttgggtgaaccagctccccagtttgtcttccaggatcccaacctggctgaactaatcaagcagcgggaaaaggtcggggtgacgggaacggccaaggtcagccggattattctggcctttcttttagcccaaagtgaaaatgccagcatcgacaacgtggtctatgcctttgaagcgaatgatttgtcggaggaagatgaatctttgctggcccaggccctgcttaaactggtcgctaagaacaaacaggtcatcttgattccgcgcacgccgcacttgatgggtcttctgcctttggaagggatcaagatcatcaagaaggttgctggccagcagcaacttttgagtgacagccagatcttggcggaagtgtctagcagcttgggcctggcggctgaccagcgggcggtcaagtcccgctgcgttctcttggtcgaagggcaggaagacgtccgttttgtgaccaagatcaaccagtggatgtatgaagaaaagctggtggacgcgacttttgctgaaaaagggctttttatcctgcctgtcgggggatgcggcagtctgctggcctggctgaattttgaccttttttctaaactgaatgaaccttggttcatcttgatcgactcagacaaggggacggatgaagctaagcagagccagcggcacttgcaccggatcagggcaaaatatccagggatgcaggcacatattcacgcgacttttaagcgggagattgagaactacctggtctttaaagagggcaagaagacacatgcctttgcgccatacgaagacgttaagcagcacatgtatgacttgatgcagcaacgccaccaaagctggagcaaggataagacggcatctaagttgatggagcagatggatttggctgatctgcaggactactatgaaaaagacgggcagaagcaccgggaattagtagaatacttcttgcagattgaccattttatcgatgggttggcataagccgctaaaaacaagttaagagctatttttaccaatggacaaaaggcaatttgttcattggctttttgttttatttagcaaaaacgtgctagaatagggatgctaatctaatatacaggataagaaaatggagtgtgtttttttgaagaaacggaaagatatcaaaaagttgctgctggcctctattatggctccagaagtagcggctacgcttgttggaacggctgctaaactattaccagcgacattcattgctgcttagcttttaaggaggcgattaattggggttgttacaattaatgcttggtgtgcttggattcacagtgttattaagttctctttttttgacaatgttggtacggcgacaagctgcgcatcaaaagcgtagtgaagcctatatagaagtagctaaatatctgggtgaaaatccaactttatttaagaaggtgaaccaattagtcaaattggaaagcacaacaaagattttatcattggtgtttttcttaggtggctggatagtctattcaataaacgattttctgataatttctttggacgatagtgtccgtgtaatgattttgtggacatcaattgtcttgtttgttatcttaaccattgtgcagatgatgctagaatttcggcacaaaaaattgttggcttttcctctgtctaatatttctccagtagagaatactgcaggagagaaacgctggattctcagcaagatactgttaatgattgggacggcgatattgacaacatggctacagcttgtggctcaatgattactaactgatttaccaatggacaaaaggcaatttgttcattggctttttgttttatttagcaaaaaagcgctagaatagagatgttaatctaatatacaggaaaagaaaatggagtgaatttctttgaagaaacggaaagatatcaaaaagttgctgctggcctcagcagtcttgctgacttttgggattggacagcagctggaaccgctgcagccagtgcacgccgcccggcacgttaagaagagtaggaaggccaagaaaggcaaaaaagctaaggtttctataaataagaaaaagctgagtctgctgcaggggaaaacagcccgcttgtatctgaagaacagcaagaaaaagacgacatggagaagttccaacaagaaggtagcgacagtatcttctaagggcaaggtcaaggcagtcaaggccggggcagccaagattactgctaaaaatggcaaaaagagctacgcctgcatggttaaagttactgcagctaagggaacgctgacttttgcttccaatgacgggtctggccgccggcaaaagaagatttttaccttaggcaagaaagttactctgccaaagactggctttaaccgggaaggctacaagttcttaaactataccgttgccacaaacggaaaggggaagaagtaccggctcggcaaggcctatacttttaagaagagcacgactttgtgggcccagtaccgcaagctggaaaattacactattcaaattgctgccaaccagggctttgggaaaaatatcattctgcatgaattggaaggcgacaaaatcaccttgccagagacaggattcagtaaacctggctatgttctcgattcctttaacactcaagcggatgggagtggcgaaaagtatgatctgggggctagctatgccttaaagaatgttactttgtacgcccagtaccgtaagccgccggtaagtgagaagccggaaagggacttgggcttgtggggcctggatagcgcggggaatttttaccaaagcaagaatgagctgacaacggttgactatatcaaggctgaccaaactaagtatctggctttggacaattattttgactaccagatcaaggcccttaagtacacagatgatgaaaagccaagttatgtcggcgtgcaggccaactggtcaaagcaggggattatcctggaccctggctacaagtacctaatcatggtgagaaagagcaaccaggcagcaattgaagaaagcgagattgctgatattgccaagctgatccggatggaaaatgttgatgtaaagatgcagagtacttctggcctggctaaggcggcggtcaagtttatcgcccaccggggctatagcactaagtatccggaaaacacgaccctggcttttgaaaaggctggcgaggaagccggagtttgggggattgaaaccgacgtagataatacgtcagacaacaagctggttatcatgcacgataatactttggcccggacgaccaatatcagtgcggatgatccaaactacagaaagaacatcaacgatattccttttgaccaggtggaaaactacaagatcaagggtgtgctggatggcgtcgataaggataaggtttatgaagatcttcgcgtgccaactttgcgtcagtacttagaaatctgtaagaagtatggcaaggaagcttttttggagttgaagtacatcaacaatatggaagccttgaaagaggtagttaaggaaattaacgaagcagggatgcagaagcagacgaccttgatttcctttaatattggtgagttggaagaagttagaaacgtgattccgggtggcaaagaaattgccatgatggggatttacaaccgccatttgactgataacgactatattttcctgtcccacttaaaggccggtgctgaccgcaataaggatacgacaacgcttgatgatattctcgcggctcgtaagtatggcgtagactatggaatctggacggtttaccagaatgatgacgctgttgcggatatgattaaaaatggtgtggacaaggttaccttgaatgacgcgggcttgattgaatcgatgagtgctatcgttaataactagaaaaacagggataaactagaggagaagctatgaaactgataaagaagacgatcagcaacattccgtttgacttgcatgacagtcggattgtaaaaatggaagttaacgatggcaatctcactttgcatttagatcaagtgtatgagtaccacaaagattcctagaagttttacccggcaaagttaacgttcaccgatatcgacttggaagaatgccatgccttagtttttgacaaggggatggaaaacggggctttttcgggcgtaagatataacttgcaagagtatttggaaaagtacccggatgctgaatttgagattatcacggacacttacaacatgacgataacagtcatggaaggatacatctacagagatgggcaggaagccgtggctggaattatctcgctttggacattaggcgaggttatcgctgatttttaagaataaagtatacgataaagtaaaaaaactatcccgcaagggatagtttttgtttggaatcaggttggatttttagattaacgagtttttacagtcttggcctttgtccaggcagagtagtaggtcttattggagagcttgcggtaggagcggagttgtacgtagtacttcttcttgctcttcaagccggaaaccttgagcttggttgccttggtgctcttagtcttggccttcttcattgaggaagccgtactgtagcgaacttggtagccggaaacggacttagccttcttccatttgccgacaaaagccttcttgctgcccttcaagctagtaaacttgctgcttgcgacaactactttcttggccttctttaccttcttggcaaccttcttcttagtggtcttcttggttgactttgctttctttgaggacttcttaatagtcttcttggtcaacttcttagtggccttcttcttggtagtcttcttcttagctgtagctttcttcgttgacttcttcttggtagtagtctgcttaccagtagttgaacttgatgacttggagttattagcgtccttcttggtattggagttatctgacttttgcttgttgtcagtgttttgcttagtttgagcaagaactaattcagctttagcatgtgcaagcttctttttagcagtttccaattgttgctttaaggagtctacattctttgaagcatcactttgtgccttagatgcagaatcataagcttgttgagctgcttgaagtttttgctttacattgtttaaatcagattctgctttatctaattctgcctttgtcgaatcaaccccttgttttgcggatgccaatgttgattgggcagtgttcaaccaagtttgagcactttgaactttagcggcagttaattgagcggcagattgttcttgagttaagttagcgtttgccacgtttacatccagttgagcaaagcgatcatcttcaatttgacttcttaaatcgttaatcgagttttgagcatcattgattttcgcttgcaagtcactgatctgttgatccagttcttggttttgagattggagttgatcgtaggtgctttgttctggacttgcatcatttttggcttggtctaaagcagtttgagcttttttaactgcatcttctttagcaacaatttcgtctggtaacacttctttagtaccaaaactgcttgggaggccagaagagtagattgtcaaaaggcagacgtgaaacttgtcgtcccgggtagttacggcaactgagaaatagcagttgtggtcaatgatattcttgtagctgcttggatcagctaattgttgagtaatcaaatcaaaggcggctttggcgatttcgctcattttagtggttccgtactcataggaagtttgtacattcccgttggatatggaaacggacttactaataacttgtctatcggcggcaatgtcatatccaataacagcatagtctacaaggcccatattggctgaggttaactcgattgcatctgaatctgattgtaagagttcgttaatgctttggaatctttgtgtgtagcgcttagcgtattcaagagagccatcagtaacagtcatcttgttggttgatccaacttgcgaattaattgaatcaatcagattcttgacataaaggttcagacgcttacggtcagagtctgacagagcggatggatcatcgtaaacattatcgcttgcatccccatcagcaaatggggaagtgtaactagctgcggcttcttgtaaatctttcgtggcagtatcccaatcaattgacttgccagttacatagtcaatgtagctttgaggcagggggaactgttcattagtagaagttgcttcacccaaatctttttgagctttttgcaggtcttgcgtggcagcgtcaattttttgctgcttggcgttaagagcttcttgagcagcatccagtttaggagtcagttcatccttcttcttttgtaagtcggagatttggctttggtaattattgatatctgaattagtagagtcgatttgtgcgtttatatcgctgttcttcttataaatttcatcaagccggccttgcttatccttcaattcactttcagcatcagcaactttttgctgctgatccttatcttcttttacagcatcttggtaatcgctgttggcagagtcaacattagattgtgctttgtccagctggctttgagcggatgaattgtcgctacttgcactagccaccttgctgtttgcattatcaacggcttccttggccttttgcagatcagcattcttttgatccaaattattgttagccgtgctcagttggccttcagccgcattcaactgactttgcgtttggtcaacttctttttgtgcttcgttcacttgagtttgagcactggcaacatcctggcttgagttcgcgttagtagccgcattgtttgccgcaaataccgggtgggtattagtaaccgcgaatgcagacccagctaaaccaacggatgacacgagcagaacatttttcgaaattttcttcataatcacacattccttaattcattaacacatattggacaagtcgattttagcacttgctggaaccgaatacaacacttgatatagtgtttaacttatgttgcaccgcgcaaaaaagagctgcccactaaggcaactctcctcatatattcgcgttagtaatttgccacccgcttgcgcaggtccatcatatcttcgaacttgttggtgaaaaagccggccgcgccgtactcaataatcttcttggcccgcaggggactgtccaccgtccagatccgctccggcgtgtccgtgtcgagcaagcgcttggggtggacccccttaaagccgtgctccttgacaaaagctgccgggtccttgatccgcttgtcggtcaagaaattgtagttttcctccggccggatcttctgcgcgtggatcaaggtctgcaaattaaaggaggagtagatgatctcctgcttgaacttgaactggtccgccagggcaaaaatcttctccggcaagcctggataatcgaacttattggtcttcatctccagattcagctggccttcatagccagattcttcagtcagctggaagaggtccttcaaacgggggatccgctcgccattggccaggtggaactggtccaattccgccaagctgaaatccttgatcaggcccttgccattagtggtccgcttgatgttctcatcatgcatgatcactggcaccccgtcacgggttaagtggacatcgaattcgatcccctcagctccgtgatgcatgcagtagtcaaagccctccagggaattctccgggaacttggctggataaccgcggtgaccaaaaatcttcgttctcatatatttaattgcgctccatccttaaactggaatcttgtctcttgccggctcatattatagtagctctatgctaacttgcaagccttttgtccgtaaaaattacagctgcaatttgttgtaactggtcatctgcaaattgccagcttcatccatcactaaagtcgaaattgatgaatttctcgggtgaacggtcgtgtcgatcccgtccaccgcaaatttctgggccagggtcttgatagcaaaaccgtggctgaccagcaggacattttctgccccgtccaattgctggatcaagtcaaaacctttctgccagcgggcccaaaattccttgctgtcttcagcatcgtggtaggggtcagcctccttggtccagtcagctatctggtcgcaagtcgcgtgttcagccaaatcagcagcgttagtaaagccgtgggccgcgccgaccatccgccaggccacgtcattgtccatcccctcaaagtagccgtagaaatgctctctgaagtaagggtaggccaggtgctggagcaggtccctgttgcagttcttctccatgatgatttcacaggtctcgctggcccgtaaagtgttgctagacagggcaatgtccaagggcagctcctgcaaggcctcagcggccttttctgcgccttcccggccttcgtcagtcaaaggggtgtcgcaccagccctgcatcttgttgtacttgttgataaaagttttcccgtgtctaaccagataaatccgtttcatttttctaacttgccttatgacttgctcttgtaaatcttcttaaccagcttgatgtcctttggctggatcgtgtagatggatccggtcgggtacatgacagtaaccccggttcggtggtctaagccgatcgcgtggcctaattcgtgttcaaccgtgttgacgattctggcctgcgtgtagttgtaatagtcgttttccagatagtaggtattcagagccacctgggctgagtagagccggttggtgtggctgagatacttgtaggtagtcaggcccgctgccccgttgttcttggagttggccacgaccacgatctgggcgttcttcttgtttttagtctgcttaaaggtaaaagctcccgtctggttccaggctgccatggcattgaccgtggcgttgtagaggtcggtttgcttgaccccgatgtagaccttggccgtcgcctttggccagtggtagccggtcgtgttcttagtgaccttcttattgctttcagcaacgatgccgccgcttaaatccagagtcttgctctttaagcctttctgctccagataagtgctggccgtgcccgctgcttccagcaggaaagtctgtatttgctcatggtagttgaccacggccgcggccatgatcgctaagatgagcaggttcttgatgaaattaaaaaatcgtcgcatcaattttctcctttgcgctaattattataagatttgccagctctttttcctagcaaaaaggccgctgaaactgcttaagcttttcctaaggaggtctggctttagttttaagctgaaaaatggtagaatattaggcaagttttttcaaagaaaagctgttggagtttatttttttagaaaaggtgcatatattacatggtagaaaactcagaccgcaaagcagaacaagcccacctggaccaggtcctgcaaaagattgatcaaaagggggaccagctcaagcaggctatcgctaaagacaaggccgaagcccgcaacatcagcgcccacttctatgatgatattcgcctggactatgacgactactcgacctcaatggacacggccctgtcgattcagcagcagcagcaaatgctcaaagaacgcgacactgcctggcaggtcaacgcccgcgaactggctactttaaagcggctgcatgtccatccttacttcgcccgggtagactttgaggaggctggcgaagagccggaaagcatctatattggcctggcctccttcatggacgagaacaatgagcttttgatctatgactggcgggccccgatctcctcaatctactacgatggcaagatcggcaaggtaacctactactcaccagaagggccggttgaagtcgacatgagcaagaagcggcagttcatgatcgaagacggaaccatcatcaacatgttcgacactgacgaaaccatcggcgaccagatgctgatggaagttctgtcagaaaagtcctccatccagatgaagtccatcgtcaagaccatccaaaaggagcaaaacaagattatccgggatacgaccagcgacctgctctttgtccagggggcggccgggtctggtaagaccagtgccatcctgcagcggatcgccttcctcttgtaccgctaccggggcaacctcaagagcgggaacgtgatcatgttcagtcctaaccagctttttaacgactacatcgaaaacgtcctgccggaaatgggcgagcagaacatggtccagatgacctactggcagtttatcgcccgccgcttgccgaagatgaaggtgcagaacctctttgaccagtttgaagaccggcaggctgacacagcaatcggccgcttcaaggattcgctggccttctacaagctggctacccgctacggccagcacctgaaccagtccggcatgatcttccgcaatatctatttccggaccaaaaagaagccgtttttcagcaaggaagaaattaaggagctctactactccttcaatgaaaactacaagctgggcaaccggattgacgctacccgcgaggaactgatccgccgcttgaacaaacgggtggccagtgaagcccgcaaggtctgggtcagccgggaaatcgaagggctcagccacgagcagatgctggacatgtacgaccggccggaccaggaattctcttcagaaaaggctgaacgggccttcctgggcaaaaagatcgttatcaagcacctgtccaagcttgcccgccggatcaaccacaacggcttcttgaacctgcggggtcagtacctggcctttttgcgggccgtgccgaagatgacggacctggccaagtacgggatcagcgaagaagaatggctggcccatgttgaagaagttaaggctaagttcaaagagcaggaaattgacctccgggatgcttcagcctatctttacctttacgaccagatcattgcccgccagactaacctggaaatgcgctactgctttatcgacgaaatccaggactactcagccttccagctggcctatctgcgctacaacttcccccgggccaagttcaccatgctgggcgacttgaaccaggcgatttttaccaaagacgagagcagcagcctcttaaagcagatctccggcctctttgacccggaaaagaccaagctggttcagttgaccaagtcctaccggtcaaccaagcagctgactgactacaccaagcagatccttcgccatggtgaaaaaatcgaaagcttcaaccggcaggggcctttgccgcaagtctggggcagaagtgatgaagcagaagctttagcggctttgaaagcagctttagcggaaaatgacgcccaaaagctgacgactgccatcatcactaaggacctggaggcggctaaaaagctggctgaccagcttgagggggtccaccttatctccagcgccaaccagcgcctggtggaagggaacctggtcttgccgtcctacctggccaaggggctggaatttgacgccgtaatcatgtgggatgcctctaaagcggcctaccacgaagaagacgagacccagctggtctacacgatcgcttcccgggccatgtacaagctggacctggtttacgctggtgaaaagagtccgcttttgccaactaatgaagcaacttttgtaaaaaagtaaaagaaaagcttgacggctttttaatattagtttaatattactgaaaacagacttagagtcggttatatttcacgcgatgaacagaagaagtaggcctgcctggacagatagagacttcccgccggtggaaaggggagcgagggctggctgaacacacgtctgtgagcaggaggggtgaaggcttagtagctccttccggatcagcccgttaccgctgcagcttgaaggctttctcaagctggtgaggccggttgccgcgagggaccggtgaacacgaggtggaatcacgctgacgcgtcctcttggccctttggggccaggaggacttttttattttctttttctaggaagcgggtaaaacgaatgaaatatgttatggaaatacttccctcccttttcagcggggcggggatgaccttgcaaatcttttttgaaacattgatcttatccctgcctttggggatcctggtctccttcggcttaagcagccgctttgccccattgaagtggctactcaacttctacgtttggctgatgcgggggaccccacttttgctgcagctgatctttgttttctacggcctgccgatcgtcggcttgaccttcccccgctatatggcggctttggtggcctttgtcctgaactacacggcctactttgctgaaatcttccggggcggcaaccaggccatcgaccggggacagtttgaggcagccaaggtcctgcaattgacttacgggcagacccttagaaagatcgttattccccaggtaataaaaatcgtcctgccctcaatcggcaatgaagtgatcaacctggtcaaggactcctccctggtctacgtgatcggtttgggcgacttgctcagagccggcaacctggctacggcccgggacgtgactttagtgccgctggttttggtagccttgatctacctgcttttgatcggcctgtgcactttgcttttgcggcagctggaaaagcactactcatactacagataggaggactaaacatgcttgaagtaaaaaacttagccaagtcttttggcaaccggcagattttgcaaaatatgaacttcagcctgaaggacggggaaatcctcacggtggttggtccttccggtgccgggaagacgacccttctgcggatcgtggccggccttgaaacagctgacgcgggcagcatgagactggacggggaaaaatacgagcttagccaggaagagcggggcgccgtgggcgtggtcttccaggactttaaccttttccccaacatgtcagttttggaaaacatcaccctggctccccagctggcgctaaaagaagacaaggcaacagcggaagccaaggccaaggagcttttgacgaagctgcagatggcggacaagggcggcctttacccttaccagctctccggcgggcagaagcagcgggtagccatcgcccgggctttggccatgcagccgaagatgctctgctacgatgaaccgaccagtgctttggacccggccttgcgggaccaggtggccgacctcatcttgagcttgaaggagtcaggcctgacccaattgattatcacccacgacatggactttgccaaaaaggtggccgaccaggtcctagaggttaagacattggagcataatactagtggcgaaaaaagcacttaatgtgtttgattatatgcaagagagaataggtaggttctaagttgaattagcgtagggaaatccaaaacttttctttaggttagagcccaaatttccgttacacttcagaaacatatgtttggaaaaacgtaggaatacgtgctaaaatattcctcgaaaaaagattgagatgatatggttctgaaaggcggtgaaattaaatggcggaacagatagaagaagtaccggcggaattaattcagacaagagtctatgaattacatcccaacgagactatgagaagagttctggatgaagcttgtgactatcgccgctattgctggaaccaaggccttgccttgtggaatgaaatgtacaaggcaagacaagcacttaaatcttctttggcctccgactccaaaaagctgactgaagagcagaaagtgttgcttaaagaaaagccttcgccgagtgagcgaagagttcgtaatatgttagttgccgataaaaaagactggcagtatacacagtcagcccggattttgcaactggcaatttccgacctgggcaaggcttggaacaatttctttgataaggcccaaccagactggggcaaaccaaaatttcggtcaaagcgggaagccagacaaggtttcaaaagcgaccgaagcaagatcaaagaaggaattctttatttggaacgggcaagaggaagcagcgttccaaaagatcaatggcgtggctttaagctgagcgaaaagcctttgtcagatgaatttggtgttgtcagctacttcaaagaaaaaggccgttattacgttgctatcccttataagatcaaggttgaagatgttaagcagccagacaaaacaggtaaagctaccgcggttgacgtcaatgttggtcactttgattacacgggtggccgggtgaacgtactgcctaagaagcttgatagaacttataaaaaaatcaagcactatcaaaggcagcttgccaaaaagcgagtccaaaatggagaagctgcttgcgaaagcaagaactacttgaagacgaaagccaagcttcaagcatactatcgcaaggcaagcaatatccaaaacgacttgatgcagaagtttacgactgaactggtcaaggactacgacaagatcgtgatcgaaaacctgtcggttaagggcatgcttatgagccacgtggcttcaaagggtgttcatcggtcgatgtttggcaagtttaagcaattcttgacttacaagtgcgattggtacggcaaagaccttatcctggcaaacaagctgtacccgtctactcagcgttgcgcggcttgtggcaatgtcaaaaaaggtgatgacaagatcaccctttacggagacaagaaacatggtaccaagcacaacgagtacgtctgctataacgaaaaatgcccgaactacaataaagtcgtagatcgggacaagaatgcgatgcttagtcttttagcgctgactgagtatccagaattaaatcatgcgctataaatattaaagaaaggaaagttaatggctaaggccctggccttagtcatgcgggttggctgtacccgaggattggcgagagtctttccatgaagttgcaagagtggtgcttcggtacctgcgctggtcaatgcggttacccccttgttgggatatcggaataccggtgatgacggcaataagaaaaatgtctgtatttatgtcttcggacaatacgtagtcaaagattactatttggctacattgcacacgttttttgcagcagggttagagatgaaatggtttaagagaatcctgctgctgggcctggtcttgtcctgctttttgacaacagcctgcagcaatttaactaaagaagccaaccaaaaagacacctgggctaagattaaaaagcggggcagcctggtgatcggtttagacgacaccttcgtgcccatggacttccggcaaaaagacggccagctggtcggctatgacgtcgacttagccaaggccgtgtgcaagaagctgggccttaaggcagactttcagactatcgactggtccatgaaggaaacagaactgagaaacgggacgatcgacgtcctttggaacggctacagcgtgaccagccagcggaagaaaaaagtcgccttcagccgcagctacttgcgaaaccggcaggttttggtcgtgaagaagtccagcgggatcaagtcttttgcccagatgaaggggcaggcaatcggcgcccagagcgggtcaaccgcccagatctggctggatggcagccaaaaggtcattaagccgaagagcaaggtcctttacgacactattccgtcagccttcctggacctcaacgccggcagaattaaggggatcctcctggatgaaacctacgcggaatactacatcaagcacgaggcagactcaaagtcttaccaggtcatcttgaacaaagaggtgccagaagacttgttcgcggtagggatgcggaagggcgacaagaacttgaaaaagaagatcaaccaggccctggctgagctgcaggccgacgggactttggccaagatcaaccagaagtggttcggacaaaagtcaaattacttgggcaaggttgattaaaacaaaatagaataaaagaaaaactgttcagccttattaaataaggaactgaacagtttttttagacccggtgaatggtgacttggctgaagaccaggtcagcatcaatttttaaaaggggtgaatccgctgttaaaccgctggggttaagggcggtgaagcgggagaagaccgggctggagtcggcttggacctcccattctctgggaatgtagatatcaactttggagaagaccgcatccaaatccagcttgccgcgtccatccttgagctgggtctggtccaagtagatggttaccggactcataacggtggagacggataatttgcgcaaggcctggctgtgaacgtagcggacgcatttggagaagacggattcgatggaaactttttcgccattttcgccgattgattcgctgtagctaaggctagtgccgtcatcgtcttttttgccagtttttacattcatcttgacctccagctggcttcctccggccaaaagctggcagcccagggcgattaggaagagggccaggtacatgtagccggtccatttaaagaagtggctagcttcgctgacggttttgacgatcaagccgctggcaaaaattccaaagaagagggcccggttcttgaagctggtccaggcgatccaggctaagaggagggcccagaagacctggccccaacttaagttgaagagcttaaaaagggtaaagtagtctggaaaaagctggcttaaaatcaaggggatggcgatagcgatcaggatcaagccccatctgaccgcggactttctgttcttgttcattgtgcttacctcatttcgtgcaaatggctgatcagggtttggtagtagcggcgggagacgaagaccttcttgtaagaagcggtaaagccaagctcgcagcccgtaatggaccgcttgacggcattgatttgccggcagttgaccagggcactcttggaagcccggtcaaagtcgctgggcaggctggcttccagctgccgcaaggtctgcttgaccaggtagctgccttcccggtcatgagcccagacgtgccggtcactggtctcaaaaaagagaatgctggttaggggcaggatgatttcatcgctgccttgatagaccgtgatcttctgggccagtttttcttccaaaaaggccagagccgcttcgatttccggcgtcagtttcttggccttgatgatgagctgatcttcttttagctgctcgtcttgtttaaactctacctgcatcttttctccccccttttcagatcttattatgaagaagattaagcaaaaatgaaagagcagacgcgcaagcggtcatttttcctgtttaagcggcatgcaaaaagcgcccgggtaaccggacgcttttcctatgccatcttattgatttggtcagccaggacatcggccagccaggagatccctttttcgctgtagtggaggccgtctgcaatcatgaaggaaggcaggtccttcagcttttccatcttgtgggtcaagtcgaagaagaaggagttggtcttgccggcgtctctttgcgcaatgtcgacgtactcgtccagcttctccaaggagtaggccgcggccatttccgggttcgtcaaatccggcatggacggagctaaaactagggtatcgctggccccggttaccttctgggcctgcttgatcaagctttccagcccttcttggtagtcataggcgctgcagccccagctggcggcgtcgttggtcccgtactctacgaccaaaatgtcgcaggcaggcagactaccgactctgggcaggacgtcctgggcgcaggcaccgctgaccgagatgttcacgacctcgtaagcgtctcccagccgcttggccaaggccttggtcaaacggtcggtatccttttgcccgtcatacgcgttaaaaattgaatcgccaaaaagcacgactttcttcatctgtttcactcatttctttgaaaaatgaagctggcatttgccagtttctcctgctttttctactataatagataaagaatgagaaaaggacaagtaaaaagaatgcgaaactatactgaattcagccggcaggcctgggcggctttaacccccaagaccaagctggcggtgactaatgaagagctggccaaggtcaagtctttgggcgaccagctggacgtcaaggacgtcgatgaaatctaccagaccctgctgaactatatccacctggcctaccaggccaagcaggcgacagccgctaagaaggcagaatttttgcagctgccggaaagcaaggtgccttatattatcggcatttccggctcagttgccgtgggtaagtccacgactgcccgccttttgcagctgctcttgacccggtattacccggacttaaagacccagatgatgaccactgatggcttcatctaccccaaccaggagctggagaagcggaagctgatgcccaggaagggtttcccggaaagctacaacatgcagatgctcagagacttcctccaggacgtggtcagcggaaaaaatgacgtcgtttatcccctgtattcccaggaattaagtgacatcgtcccgggccgctatggccatgtggaaaagcccgacatcttgatcatcgaagggatcaacaccctgcagctgccggaaagcggccagctggtgaccagcgacttttttgacttttcaatttatatcgatgcggaagaagacttgattgaaaagtggtatatgcaacgcttcaagaagatcatgaaaatgaagaagaatgacccaagcaacttctactacaagctggccaacgggccggaagacgaggccctgcgcctggcggaagaaacctggcagatggtcaacctggtcaacctccgccagtacatcgccccgaccaaggagcgggccaatttgatcctgcataaggttgaggggcacttgattgacaaaatttaccttcgcggcttttaagtcaatggtataatgaagaacagtgataaaaaatttattagggagatttttttatgcaagcaattgaattgaaaaaaggcatgatttttgacgatggcggcaagctgatgctggttatggcggctaaccaccacaagccaggcaagggcaacaccgttatgcaaatggacctgcgtgacgtccgggccggcagcgtgatccacaagaccatgcggccaagtgaaaagatcgagctggtcgaagtcgtcaagaagaacgcccaatacctgtacgctgaaggcgacagctacaacttcatggacacggaaacctacgaacaatacgcgatttccggcgaccaactgggtgacgacgtcaagtacctgatgccaaatatcgaagttatcctggaattcactgaagacggggaacttttggctgtgcaattgccatcaactgtcaacatgaaggtagtagaaacccagccaggcattaagggggcaaccgcagcttccggcggcaagccagccactatggaaaccggcctggttgtgactgtgcctgacttcatcaacgaaggcgatgaactggtcatcaacaccctggaagggacttacaagggccgggcttaaggccaaaaaaagtaaacgaaaagcgtccggttacccgggcgctttttgcatgcactttattcgtttgtatcagtcgtcgtgtcagtgcttgactggctgctagaggaagaggcctggctgctctgttcttggctagatgagctggccacggaactagaagagctggcttcactggaagagctgacctgcttttcattactttggctttggctctgctggctctgctggtcatcatggcttggcttgttttcatcaggcttagcggaatcatcttgagctggcttagatgaagaagatgatgatgacgaggagctagaagagctggatgagtgggtagtgctggtgggtttagaagccagggcattgaagccgccggctacggacccgaccacggccaggcctaggatgacccagatcccgatctttaagagcttgtccaagttgatggcgtcaaagaatttaaaaattgccttgaagccatgcggcaccttgctcttgtccaaaatttccttggccttgccggccgggctggcctccttaactggcgccggattagcagcccggacttcagttacattctctttaactggactggctggcttagcagccggaatgtccttgccggcggcggccggctcagtaaactggtcgagcagctgtgccccgtctaaccccagcagactggcatattgccggatgcagcttctgaccatgaccgggtttaagccttgaaaatcatcggcttcaatcttttgcagagtcgcttggtcgacccgcagggtttgactaacggcttccaggctgagctgcttggcgcggcgctgtttctgtaattctttaccgattgtcaaagttttgcctcctaaacgcttctgattagtcttagcctattttacttgaaaatggctaaaagctaaaggcagaagtctttggatcttttaccaaaggttaagatttcttttacaaaaaagccctcaaaaataaggacttcataatcttattcgccttggaaagtgccggcttcaacttccctaatgaagtcagccaggtgcttgtagtagacatcggggttgtcgaccatgtggtggtggccgccgtcaggagtagtgaccaggcgggagttaggaatcagtttctgcatggttttggccgtttccagaggcatggtttccacttcgccaaaagtaagcaaggttggcaccttgatctttggcagttcgcttctgaagtgccagtccttcaatttgcccgtgatgacgaattcgttgtcgccctggaaggcgttgtagacagccgtgccgcccaggttgcccaggtggtagagcttggaaggctgcttgcggtcaacaaagttgatgttcagaatctgcacgtcgtcctggtagcgctggttggcgtaatcgttcttggcttcgcattcgtgcatgaagtcgatttcggtctgcggcaggacttcttgccggcggcggttgaccgcggccacgtattcgtcgatgtcgtcaaccatggaggagatgatggcccccttcaagtggtcaccgtacttaaccgcgtattcctggaccaaaaggccgccccagctttgcccgatcaagtagaagttatcgatgcccagcttttgccggacttcttcaacttcgtccaggaagtattcgtaagtcaggtacttgtccgcgatctttgggtcgttgtagtccggctggtcagagtaaagggagcccagctggtcgtacatgtggacctggacgttcaagccctgcttctttaattgttcagccgtatcttcccagtattcgtggttgccgcccgggcccccgtgcaggcagagcaggtggatgtcacctgtcccttgggtgttggtccaaagatggtagccattgtccaaagtcaaaatcgttgttccttgtttcattggaaaaatctcctaactataactatctagttcattatatgcctttatctattatattccttatttgcctactggttttgggctgccaggaattctcgcattttttccagttcggtgctggctaagtccaaggcgcagacgttttcaaaaaggtggctgacttcctgcccgctttccgggtcctcaatggtgaagcctgcttcgtctaccgcggtcacgtagcccaggttttccccggctaattcatagtcgtcaacgctgaccagttgcttgccggctttttcaatcacttcccgggcagttgggacatggtctaaggactgggctaatttgcccaagtggcccggatcaaaaatttcatttttctggttgtaggcgaccaggaagctggagaagtcgatagccgcggaatttactgattcatgaaccacgtcttctctgttgaccaggcagatggattctaattgcccatagtcattcaagctttcaaaaagcaggaactggtcactttggtccaggaccaggcccaaaaggcagctgccaaagcgggcgtcatccagccagtccaggtaaagttcaactaagccgtagggattctggccggcaaactgctctttaaccgcctggtactttttccagagcttgtttaaaggagcgtttaattccaggctggagatggcagacagggggatgaccaggcagagagggtccagctcgtagtcgtccccgatctgcttcagctgaatttcggttggaccggctaaggcgatgatgccggtgtagacgatcccgctggttaaggtgatattgacgaccaggtccttctccagtgcggcttggctggccgcgctaaggctggtcaaaggcgtcttcaggagctcctggttgaggggcatgagggcgaaggggtcggtcgacttgccttcatcgatcaggtgctggcagtaggccaggctgggggattcgtcgacgctggtcaggatgtcctggttattgatgaccaagaccccgccggcattggcgtcgtcgtccaggctgatgagggtggccgcgtccgcgctttggtagaccaggtagcccagatagtagctgccggataattggtcggctttggtatgcagttcaactaatttcatttattttgtcttctcgtttctttctagtttttattctttgtttttcccgctagtctttccggtctttttctcttttttaaaaaattgtcacgctttgccaagaatcagactttagcaagattttactttcttaggattatcttaattatatcaatgctggcggcaaaaataggaaagattgctataatgtttatgaaagagagggattatccaatgagtctcaaatacgcacggaaaagccaggtagccctgttcagcttcctggccgccatcaaggcctgcaatgttttgttcgtggcctacatgctcaaggtcatgctgaacattgcctcttccggcaaggctgattacagccgcctggtcggcttcgcggccttgacggccgggggccagcttttgttcatggccagcaatttcttctatgaaacgaccaaaatgaacatcatcagaagcgtgaacatgaccttgaaagaggccaacctccgttacctgatcgaccaaaacagcctggacaccaaggacgggctgagtttcatgaccaacgacttaaagcagatcgaaaccaaccgggtcacggcccagctggacatcatctaccaaagtttgaccttcgtgggctctttggcctttgctttatataactcctgggaaatgaccctggtctttatcgtggcgactctggctccggccggcgtgcagatgattaccagcaagatcatcaccaagaagtccaagatctgggcccagaagaacgccgtttacacccagtacgtgtctgacagcttgaacggggcccagtcagcccgcctctacaacgtccgcactaatatcgtcaagcgggcggtgggtgctgccggggatatggaaacggcccttcggagcatgaccttgacccaggcctgggccctggaattgatctactcagcagcggaacttttctgcttcatcattccctgcacgatcggcgggatcatgatgatgcaggggcggctggcggttgggaccctggttatgatggtcgacttggccatcaacttcatcagcccggtggtcaccttgtttaacgaattcaaccaggtcaagtcaaccgtgccgatgtggcagagaacccagcgggccctcaattacgtgcaaaaagacgacaattacccggtcgaccactttgacggcatggaaatccgggacgtggcctacgtgaccaagcacagcaagcggcagatttttgaacacgtgaacatcaagatcaatccgggggaaaagatcctcttgatggcgccgtccggctgggggaagaccaccctcttgcgcctcatgctgggcatctacacgccaagccatggtaaaattttaatcaacggtgaagaagtgacgggggactggtacaaggcccacaacttctactcctacgtcaaccagaagcctttcatgtttgacgacaccctccgctttaacgtgactctgggccggcaggtggatgaagaacagctgctcatggcctgccatgaagcgggcctggatgacctgatccaggaaaacggcctggactacccggtcggggagaacggcaacaacctctccggcgggcagatccagcgggtggaaattgcccgggccctcttgtctggccggccgatcctgctggctgacgaagccaccagtgccctggatccccgcctgtctttggagatccatgagactttgctgggcaatccgaaggtagcggtgatcgaagtcgcccacaagatttcggacgtggaaaaggccatgttcgaccagattattgttttagacaaagttaagccagcctaagctggctttttttattacttttatacagcaaaatatatgttaaaaagctttttgacttagtaaaagcaaaatatatatttttgcacatataagaaatatgatatattgctcttgcaaagtaagcgcttacaggatacaatggacagtgtaagtaagaaaacaagaaaataaagaaaatagtttgttgtaagactgaaggagactgaattatggcagaaccaaaatggctgcaggacatgaaccctgaagaatacttgaaggaagattttgaagcaactggccacagccgctacactgttgacggcttggaaaagaacgaccctgaatggctggacaaggcagctgccaaggttaatgctgctgaaggcgatgactacgttaagctggactcaggtttgctgacggttaaccaaatcaactggatgctccgcaacactttcggtgaaatgacttacgtggacgacaacaaccaattcctgtggtacaaccgtccgcaagaccctaactacaagatgaaggccggccgtgtgccagcccaagtcggtaacactatgggcgccgttcacccggacatccgtgacgttatcccaactgccaagaaggttgttcacgccctgcggaccaaggaaggcggccatgacgaagtttggatgccagtaccaactggtaacttgactgaactcgttttgcactactacaagagagtggaagacgaagaaggtaactacatggggatctacgaatgggttcaagacatctacccattcgtgaagtacttctgcgaatcaactggccagaagctggttgttgacccagacgctgcaactggcgcaacttaccgccgcaactctgacccagacgctaagactggtccttcaaccaaggcagctgctgccaaggaagaagcaaagccagctgaaccagaagcaactagcggtgcatcccaccactaatcaaagcattttttgcgatcatactagtattaaagaccagctcaaggctggcctttttttggtcaatttttggcatggaagcagcggctgcaaacacttatactagtagttatagatgcttttttggatgtgaggataaaaaacgatgcaatacttagtttttgacattggcggaaccaacgtgaagtacgccttgatggatactgaagggcagctgctggaaaaggggaagcggacaagcgcggacaatctggacgactttgtcgccgccctgtatgaagtcggcgaccagtacaagggcaagtttaccgggatcgcggtctgcgcgccagggaagatcgacacggagaaaatgagcatccactatggcggggctttgacctttttggacggcttaaacctggaagagacgctggggtccagatacggggtagcggttagcgcggaaaatgatgcaaaggcggcagccttgtgcgagcagtggctgggcgaactcaagggagttgatatcggagcggtgatgactctgggcactggcgttggcggcgggatcgtcgttggcggcaagcttctgcacgggagcagcttccaggctggggaacttagctggatgatcacgaaccaggaagctgggcttaaggaaatggctgcctatactggtgcccgctgctcagctgtcagaatggtggaaagggtcaaccaggagctgggcaatgaagaccttgctgacggtttggcggcttttgcagccatcaagtccggcaatgaagaggaaggcaagatcttccgccagtactgcttggatgtagccgtgatgattttgaacctgcagaccgtgatcaacggggaaaaggttgtgatcggcggcgggatcagcgcccaggaaatcttgatcgaggagatccgccgacagttcggggaaatcttgcaggacaacccgattttgggccagcaggtaattccgccggaaatcgtggcggccaaattcagaaatgataccaacctctatggtgctctttttggcttattgcaaaagaccgagaagtagcagggaaatttttagctgaatatagaaaaaactgagctcatattaatgtgagctcagttttgttattgtcggatgattagattttttacttcgtaaaccagtaattaaagaaccagttataaggaacggataaaagatagatgtaggttaagttgatagcaacaaccataataggtcctgcatatggcttagtgaatttgccatagcgcaatataagaagaattatggctgaaccaaacacatcgaaagctaaacctgcagtcatcacccgtaaaagggttaaagcaatgaatccggcaactaggacaacttcagtgatccagaagaggactgaaaacttgctcgtccagattaggatggcagccaacaaaagggcaatagacacaatgattagagcccaaccaatggtaaggctttcgaaatcggtttgaaagccaacggagtgtgctcccatgaaccagattagaactgcctcgatcagaaacatcaagcagttgaccgctttaataattgttgaaagaactttttctgtttttgtcatcatggtgcctccaagtttaaaaagctatattctgtatatatgataccgcttcctgtagggggaggctatgtgacatattggacttggcttttttgaaaaattagattattttttgcttatttccactgcttaaaattcctggtgctggttagggtcgcggtcgggccggcggccatctgccttgtccaagtccgtcaaggcggtcacttcttcttcagttaagctgaagtcaaaaatgtccaggttactcaactggtgctggctggaggaagcttttggaattggcactacccccagttggacttcccagcgcaaaattacttgagccgggctcttgccatacttagcggccagcttttgaatcaaatcttcctggaaaacttccccggcccgcatgagcggactccaggcttccgtaacgatcccatgctcatcgtcataagcccggacggcgcggctggaccagtagggatgcagctcaacctggttgacggctggcgtaaccccggtttccttgatcaagcggtcgatatgccctggttcaaaattcgacaccccaatcgaccggaccaagccaaatctttgcgcgtcgatcaaggcctgccaggcttctacgtagtggtcttccaaaggatttggccagtggatcaggtagaggtcaaaatagtccaagccgcttcttaaaagtccttcttccagttcgttgatcgcggccttgtattcgtggtgggctcccggcagttttgaggtcacaaagagctgacttctggcaacagagctgcttctgattgccttgcccagggccccttcgttttcatagcgggcggctgagtccaggagccggtagccattttcaatcgcctggctgatggcccgggccccttggtagcccttgatcttgtatgtgccaaagccgatctttggaatctggtttccgtcatttagcttgaattcttccataattttttccctttgcctttctattagataagtattgcttgctttttctctcaattatagtttaaatcttttggtttccgggaaaaatcctctaaaatagttttagtttaaaaagcgaggaaaagaaatggcaaaaaaacgcaggcgcaagaagcgtcaaaataccagcctgctgtcggtcgctatcgccgcggcggcaatcatttggggcgtctacaccaagggcggccagggaaatttaactagttccagttcaaataccagtacttcatcaagtgcggtcagctcggcccaaacggctaaaaccgtctacgggggattagccaagagcgactaccagaaattagcccaggaaacttttaaatccggaggcaagggctggcactatgttaacaataaccactccaccttggtgaaaagcgcctggaaggtcaaccgggtcatttactccaacctggatagccagaaccggacttccagctccaacaccgcctttttggagaagcggaacgtggctaacgactctttaagagtcaggcagtacgtccagccaaccggctggcactccaaccggcaaaacgggacccagatctacaaccggggccacctgattgcctactcagtttccgccggcatcgaccaggacggcaactacaaccccaagaaccagtccggtgaccagaacaaccccaagaacctctttacccagtcagccttttctaaccagaagatccagacgatttttgaaagcaaggtccggtcggctttaagaagcgggaaaaaggtcatctaccaggcaacgccaattttcagaggccgggaactcatggcccgggggatcaacctccaggcagtttccaccgatggcagcctggatttcaacgtttatatctacaatgtgcagccgggctaccagtttgactacgaaaccggccgggcaaagatcgaccgcggcatgcaggtcagcgaataggaagaaaaatgcgcgacaactgtacaaccatgctggtggcccaagaaggccagccttgacgggtccacgatcgtggccagagatgaagactacgaccagggctttaacgaccagcgctttgtctactatccagctaaagattatgatgagctctttgtctccaaaggaactggcgttgaaattcccttaaagggagaaggctgcggcttcaccgccgtccgcgacgccgtagaagactacggccgctttgacgagcaggggatcaacagctacaacatggccatgagttcaacggaaagcgaagccagcaaccgccgggtctttgacggaagccaatgatcaaattgccgcggcgattacggccaagggcaagggaatttttgaccagctggtcaaggacaatctcaacaactcgatttacaagtaccggccctaatttcctgcaaaaaatagtacaataggaatgttgtaagttttttaatgtaaagtaagaaatcgtaaggagttttttatggaaaaagagatgaccttaatcagcgccaagggcaagttaaagggaatttggggcgaagccgtcaacccgatcgaagggatgacccctttggtaattttggctaagaccggcgataaggaccaggcctattggctcagccgctacttaaacgacgccggcatcctgaccttcacctttgaagcagaagatgcagccagcgccatcagaggctaccacctggcctttgacgaacttagaaacgatgaccgggtggccagcgaatacatcgtctttgccggctacggggaagcgggcaacgctgcagctgttgcggctagtgaaatcggccggtcagtccgggggatctttttaatgtcaccagtcatcaaggactgggacaagatcaagggctaccaaggccgcagctacattgttgccggcagcgatgacgaccaagcgcctttggccagcctggaaatgatggccaagaagctgaagcaaggcgaacttttgcaaatgcggggcgctggccacgactaccgggaagaagactgggaaagagcagggatactgctcaggacctgggtcttgaccggccttaactaagaaactgtaaagcagaaaaagagaaaaaggcaaagcatgacagaagtaaaaattgtgcaagttagtgagaaagatttgccagagttgattgctatcagccgggaaactttcgcggaaacttttggcaaagacaacagcccggaagatatggccaagtttttggacgaaaactacaatgaagacaagcttgggggagaaatggcaactccgggcggcttcttttacttcttaaaagcggacggggaagttgccggctacttgaagctggacgttgacgacgcccaaaacgaagaggtcgacccaaacggcctggaaatcgagcggatctacctgcggaaaagtttccagcaccggggactgggcaagcagctctttgagttcgcggaagaaaagggccgggaatggggcaagtctgtcctctggctgggcgtttgggagcacaacgaaaacgccaagaacttctatgccagccgtggtttgacccggttcagcgagcatgtcttcgttcttggcgatgaccgtcagacagattttttgttaaagaaggctctggtttagtcctggctgattaaccagtcagacaagagcttttggtacttggcattttcctggacaaaaggcatgtggccgcagccggcaaagagctcccagcgggagtttggcaagtggtcgtacatgcttttagccactaggggagtgcacaagtcgtcagtgccgctggtaatcaaggccggcaagtgcaggtcctttaagcggtcagtgtactcatagccgtgcaggttgccaatcggcgtatattcattagggccccagccggtcaagtaggccaggttgccgcccttttttttgcgcaaaactggctccggcaggtccggcatgagcttgatggcgtgctggtccatgaagtgggcattggccgcctggtaggccggggagtcgtagttgccagttgtttcagcttccttgatagcggcctgctcgcccttgggcaggtacttgattaagcggtgcagttcctggctccaaagcttggcggaggctaaagtggaggagaggattaggctcttgaccccttcaggctggtagtcgcacaggtagatcaaagccagcatcccgccccagctttgccccaaaaggtggatctggtcaaggcccagctgctctctgacattttccagctccttgacccaggtttgggccgtgtaggccgtttccgcctggtcgtcggggatgctggagttgccgcagcctaattggtcatacatgatgacctggcggccgcttttttcagcgacttggtcgaggacttcaaaatagttgtgactgctgccgggcccgccgtggagaaggaggagcggggcgcggtcagtagcctcgcccacgatccggcagtaggtttgccaatttccaaatggaagatatttttctgtgatttgcatctttttttcctacttttaaagaaacttcatttcaaaaaaatggtatcatgaataatgagtaaaattaaggtggggacagcaatgattaagcaacaaatttttccaattgaaacagactttaactggtatgacgtcaatggcttgaacgaagctgacagccggcgcctgcagacagagttttattttacaccggaaatcatttcctacgtttccgaccggcatgaacggccccactacgactacgaccaatataccgacacccacctgctagtctatgacgtgccagtctggccaacgacgaccatcaagcacttcacttcccggccaatcacttttttgctacaggacaagaacctcttttctttccatacgattgagaccagctatgtttttgacgagttcaatgatcccaaggttttgcgccggctctcacacgcccaggatgtgacggaactgctggtgacttttttgatgtatgcttcccagtacttccagcgggccatcacccagctggatgctgaacgcaacgacctagacgtcaagctgagcgatgacatcgacaataaggacctggtggagttgtccaatattgaaaagagtctggtctacctgtccagttcaattcagactgaccagatgatgctgcgcagcctgcagcactcccggctgactttttccaaagcggccaaggaaatgctggacgacgttttgattgaatccagccagtcttcagaaatggtgcagatttcccggcaggttaccaagactttgtcatcgacttccaacaacatgatgaacaacaacctgaatgacaccatgaagttcctgacggtctggtccatcgttttgaccatcccgaccattttgactggtttttacgggatgaacgtgaatctgccggttctcggggccagctatgactggataatcattattttgatcaccgtccttttgatggtctggctgatcttcttcatgcgtaagcaccatcttttctaaaggaattaagagctagaaacaaggagctttaatgaagaacaatattgtagtcggggctttgatcgcctccctactggcttttgtcgtgtacaccaggaccaacaaggatgctgaaatgcggaaagtcacggtggtgcaggtaaagaagtccggcaaggtcaaaaagatcatttcttccactgacaaggaaccgaatgtcaattccattgaatatgacaaccaggtcaagagcagcaagggcagtgacaagcagctggtcaaggcaattaagaaggctatgggccaggacgtcagctaccaggtggcggcttatgacttgaataagagcagccatttcgcggaagtgaccaacaccaagagcggccaggattcccagaagattttttacctctatcttttgctcgccctttacgcccaagaaaagtccggcaagatcggggccagcacgactatcaaggttaccaaggctgacaaggccgggacaagtacggcgatcgcggtcgggatcagctatgggccaagctacttgcgcgagcagatgctgaagggcaacaagaccgcggctaacgcgcttttgcggacgatcgggactaagcaggtcaacaagatccttaagcagctgggggctagccagactaaagtaacggggaccttctctaaatccgtggtcggcaagacgacagccagtgacctggccaagatcatggtttccatctaccaaggcaagctggtcggcagctacaaccagcaggttctgactgctatgacagggaagaccaagctggccagcaaggccaaggggaccatctaccagtatgctgatgacaatttagaggtcgccttgatcagcaataacggccacaattacgtggttagcgcctggtccagcaagactgatgactttgcttccttggggcaagccgttaagcaagtcatcgaaaagtaaagacggagcaaactgaacagaagaaatgaaaaacgactctacagccagacagtagagtcgttttgtgttttcttgcgtttacgtggtttataagttttcgtagccagccacatataccaggcgaattggaattccccgaccataatgcagatagccagcagcaggaaggttactacgaaaggattgatgctgctgccgtcagcgtaatgaaaattgaacatgaaaacatttagataaatcagtaaactgaaccagtaaaagtttgcgaaccaccagattttcatttttagttttcatctcctatctgaatatatgatagcgcttttaggaaccgttttcaatagaaaatggaattaatttacagagtgtagattgaaatcttcagttagtagttatataattgctacagttgaaaggaaaagggtagtaattatgactcaaaaaagaactttggacttggacaaggtcctggccaaagccacggaaatgattgaaagccggggcttaagcgagatgaccatgccaaatcttgccaaggctctgggcgttcgcagccagtcactctatcattacgtgaagaaccgctcgcaacttctgtcgctggtcgcggccagccggattcgcctgctctaccaggacctgctcaagcagctggtcggtttgtcaggccacgaagcattgtttaagtttgctgacgtggtccgcgatcgccttttggaagaccaggccctggcgaccctcctttaccacgtagatgaattttctgatgatttagaagtggttaaagaggtggtcaagatcctggacttaggggaccagctgcaggtggacactgaacacgtggtttcccagcacgccttggttggcgcggtcctgggctatgtcttcctggaccggtttatagatggccaggaaaaggtggaaagtccgcgagaagcagaggagaactatcacgaaatgatctggcggctggtttcgcccaacgtccagcagtcaaatgcctagtttagtagactgattgtaaaagacaaagaaaggaaaaagaacattgaagaagttactgaagaaccatctcggcgctttgatcgcctgggtgctcattctggtgatttctttggttgccctgccaaacgttgaatcactgacgagagcacacagcgaaatctccctgccaagcaacgtggaaagcgaagcagccaaactaatcaagaacgaatggggcagtaagaaaaagaatacttatgaagtcgcggttgttttcaacaagaaatccggtaagctgaccgagaccgaccagggcaacatcgaagcctcaatcgaccgcttgactagcaaccagaagaaatacggcatcaaggactacctggcgccgcaagacaacatcgcgaccaagaagctgctcaagtctaaagacggaacgacttgggtcatgcagatgaacatcgccaagagccacgggaccatctcccgggttaacgacgagatcaacaaggctgtcaagaccagtggggtaagaacctacgtcactggtgcagacgtcctcaacaatgactttaccagctcgatccgagaagggatcaagaagacggaactgatcacggtggttttcatcttcatcgtgttgatcatcgtcttccggtcaccggttgtcccgctcgtgtcacttttgacggttggggtttccttcctggtttccttctcaatcgtgaccaacctggtcaaccaggtgaacttcccgttctccaacttcacccaggtcttcatggtgattgttttgttcgggatcgggaccgactacaacattctgctatataaccactttaaggaggacctgggcaatggcctgggggtggctgaagccacgaaggactcgatcaagaaggccggccggactattctttactccggctcctcaattctgatcggtttctccgctttgggcttagccaacttctccgtttaccggtctgcttccggcgttgctgtcggcgttctggtcctcttgatcgtcctcttgactttgaaccccttcttcatggccactttgggcaagaagatgttctggccaagcaaggaattcgccggggaaaacccaagcaagatgtggcatgggatttccagcgctactttgaagcggccagttgtcttcttggcagctgtagcggttgtcgttgcaccattcttcgttacttactctaacgttttgaactacgacgacacggcggaaatttcagattcagtaccttccaagcaagggctgaacctggtgcaaaagcacttctctgaagggatggccatgccgtcatacctttacatcaagagtgaccacacgctcgacaatgagaaggacttgaagctgatcgacgaattgacgcggaaattgcgcaattctgaaggcgtggacaaggttatgtccgcgactgagccatacaacgaaaagatcaagctactctacgttaagaagcagctgaagtcagttaccgacgggaccgccaagttggaaaagggtgtcggcaaattgactaagggcagcgagcaggtgaccagcggggccaagaaactggctaacggggctgaccagctcgacgaaggcactggcactttgagtgacggggccaaggacctgtacacggggacggttaagctttacaacggttcaatcgctctctacgacggggcaggcaccctctttaacgggaccaagaccctgtcagttggggcagacgccctttactccggcactagaaagctgtccagcggggccaacaccttgtctgctggtacccagaagctgaagagcgggaccagctccctggccagtggttcaaagactctggctaacgggaccggctctctggcaacaggtgctaacgacttgtctgctggtacccagaaactagttgacaatacttctaaattgaatagctacatgtctcagttaactcaaggcttggatgaaatgaaatctcaattatctgcccaaatgcagtcattggatgcaagccagcttgagtctctgtctaatgggctaaagctgattgatcaaggcttgactcagcttaataactcagtaagtgctatgtcagtgccaagcattgatactaattctttgaataacttgaacagcgtcattagcggtatgaagggcttaacaagcgaagctgaaacgttgaagtcatctctgactgacgcaagttcttcagctactaagatgtctagtgatctagcagcgctgattgctcaagttccagatgaaagcttaagaaatagactttctacaacattgagtaccgatatggatagcttgtctggcaacttgcaaaatgctactggtgcggcaactaagttgcaaactgggatgtctagcgcccagagtgcagtaggcaatattggcaatattgatacttctagtttgtcccagatgagcagtttgttaccaactttgaagagtaaggttgcggttttagcagccattgccagtcagcttgacgcaaatggtaaagttggtattgacaatttgaaatcaggcttggataagcttagtgatatgcagtcaggtgtcaacaagatggctaccagtgcacatcaactctatactgggtataatgccctttacagtgggcttaatgcaggtatggtaggtgcaatgcaacttgctaatggcgctaagactgtcaactctggtgcttctgctgtagccagtggcgccagccaagtcaactccggcgctggccaggttaactccggtgccggccaactggctaccggtttggccagcggcgtcagcggagcggctcaactggctaacggcgcaagccgcttgaccagcggtgccggacaactccaatccggtgccagccaactgcaaaacggtctggcgcaaggcgtcaacggctccagccaactggctgaaggggctgacaagctgcagtccggtaccagtcagctttctagcggcgcaagcaagctcgctgaaaagacgccagccatcaccagcggcttgactgccgtcaacaacggtctggtttccgccggctcatacttgaacggcctgcgcaagtccaaggcttctgacaccttctacgtgccaagctacgtcttgaagcacaacgccgacctgcagaagtccctcaaggtcttcctcagcccggacaagaagagtgctatgatcatcatcatcctggacagcaacccaagttctgaaagtgccgcagagcactcacaagctttgagcgctatggcccgcaagtccctcaaggggaccgacctgggcaaggctgaagtcgaaatgggcgggcaaagctcaaccatcgaagacaccaagaacacggccagcggtgactttaccagaactatggcaatcatgctgatcggtgtaggcattgccttgatcctcgtcacccggagtctgcttcagccgatctacatcctggggactctgcttttggcctacatcagttctctgtcaatcacccgctgggttgtcagcggcgtgatgggccggagcaccctggcttggaacgtgccgttctttaccttcatcatgttgatcgccctcggggtcgactacagcatcttcgtcatgatgcgctaccgtgacagcgatccgcatgccttgcctagcgcaagaatcctgaaggcatgtacggctatcgggacggttgtcatctcagccgtcgtcatcctgggtggtactttcgcggccttgatcccatcaggcgtgccaaccctgatcgaagtggccatcggggtcatcatcggtctggccatcctggtcttcctgatgccgatcaacctgtctgcttcaaccaagctgacctacgaaggcttcccatggcctaagtgggcaggccgcaagaagggcctcagcttcggcaagaagtcttaaatgaaagctaaataatgcattaagaactcgtcatctttggcgggttcttttttgcctccggaaggaaaatgctataatgtggaaaaagaaacactagcaaaggacgattactatgaaaaagtgtcccaactgtggccaggctctgactggccaggaaaaggcctgcccgaactgtggattcaatgtggaaaaataccgccgcgactactttacggaagaagcagtagaagaaaatgttgaaagaagagaagctaagcgggaagaagctgaccggtctttagaaaaagagccagttgacaagctcagccggtccgcctaccagcaaaagcaggaacagaatgcctttaccggcaacccaaccgcggaaaaaatgctccagtggatgagagacaacaccacgatcgccttcttggtcggcgtgggtcttttgatcatcatgagcttctcccggcccctgggctggacggcttttgccgtctccatggctctactcatctggaccggccaccgggactcccagggcgaatacacggctgaccgaaacttgactgaatatatcggaaacggggcttctaaagtcttcaatgcctttgacgacaaggaaagcaaaattgaagagaagagtgaagacttcacccaggcccacccaaaatttgaagccaaggtggaaaaggtgaaaaagaagaccaagaagccccggaacttcggcatcatccagctctccatcctcttgaccagtttgatcaccctggtcctgcttttcctggggacaggcttcgtgacctccagcagcaagctgaccgtggccagcgtcttctttgaagtcgccaaccggcagatcgcggcgggtaagatcgttcccgccttgattctctacctcttcctggccatcttcctgctcttgccagtcttcatcatgctggccgtcagccagaatacccgggtctcccgggtccgggcctttgccttgtccctagtcgaaagcctggtcttgatctacctcttttaccaattggcccagacaactagcgcggccagctacttaagccaggctgtttccagcttgaagagctatgccgtggccatcggcatttccggctacctcttgatcctggtcagttgcctgaccacggttttggccggtatcaacatgttccagccaatggtcaagcccgggcaaaatagtgaagaatagtttttttgcagacaaaaaggctgctggtctgagtgaccagcggccttttcttggtattttctacttagagattcgtgaaaaataaaaacttaaaagttgagaattaagcagcaaaaactagtacaaaagaaacactaaaaagtaggcaatgtaataaagattaaagaaaaaataaaggtaagtgtagttgaaagagattgagttacatctgcttattgctggttttggtcagtaacgtcgatcaccaggtgttcattgacgaaggcgtccaggcccaaaggactgagctcgcggccgtagccggacttcttgaccccgccgaatggcaggctgccgtcagtaatccagcggccgttgatgaccgtcatcccggtttcgatctggctggcgacttcttcagcgtgcttgatatcgctggagatgacggatgaacccagcccgtagctggagtcgttggctaaggcaatggcttcggcttcgtctttaaccttgtagaccacgcagactggcccgaacatttcctggtcaaacattgggttgtccttagtcatgtcggtcagaataattggccggctgaaggcgcctggagcatcaatttccgggtactcgtagtagaccttggctccgccggcaactgccgcttccacctgcttggccagcttttccttggcggcttgggagttcatcggcggcagggtagtggagtcttccagcgggtcgccccacttaaggccggagtaaatctccttcatgtctgccaggacttcttcatagcggtcagccaaaacgatcatccgcttggatgaggtgcagacctggccgttgttgtaggtgcgggcgtcgctcaaggctgcctttaaaactgccgggtcagcatcgctcaagacgataaaggcgtcgttgccgcccagttccatggtggacttcttcaagttctttccggcgttttcggctacggaagccccgcctctttcagacccggtcaaggcgacaccttgtacccgcgggtcagcgatgacctggtctagctggctgtagctgaggtagaggttgagcaaactgccttccggcgccccgccgcttttgacgatcttggccgccagggcagcagagcttggtacattgtgggcgtgcttgagcagcatcgggttgccgacgacaaagttcggggcaaagacccggatgacctggtaaagagggaagttccatggttcgcaggccatgattaccccggtggcctgctttaagtagtaggcgcgcccgtatgggttaggcaggtcgaccggctttaaaagctccgggccgtggtcggcgtagtagttgaggatgccgatgcagatttcaacttcttccttggcttcgctgagcttcttgcccatttccagggtcatggtcttggccatttcttcttccttttcctgaaacttggccgcgatgtcttttaaaatggctgcccggctgcttggctcttcatgccgccacttcttgtagagggcgtgggctaaggccagagattcttcaatctgctggtcagtcgggttttcgtagctggcgaagatttcattggtatatgggttcactgattcgtattttgccatagctgttttcttcatcctttcgaattaaaagttgatcagaccgggttttaccgctaatctagtgtaagattcacaaatatccctttctctagtataaaccgctttctgatttttggtatagctaaagggtgaaataattttattatttgaaggaatattttaacggcaattttttcaaagcttttggtaaaaatttcccgtttaatgaaaaaatccagtgagcatggtaaaatatttaaaaattgaaaggacgatattatgcggatcaacgttttgcagcacaccccgaatgaggggccaggggccatcaaggcctgggccgaagaccggggcaataaagtctatgtataccatccggaaactttcggcatcttcccgaaagctgatgaaactgacatgctggtcgttttgggcgggccgatgagtccgggcgatgacctgccctggctggaagaagagcggcaattgatcaaggactgcctcaagcaacacctgccgattctgggcatctgcctgggcgcccagcaaattgccatctgcttaggcagcagcgtgcacccggcggcccacaaggaagtcggctgggctccggtctacaagcaaaatgacgctattgccggtttgccagacaagctcctggccctgcactggcaccaggacatgtttgaaatgccggctgaaagccacctgctttattccagcgacctcttggccaaccagggctttttggtcaatggcaacgtgatcggcctgcagtttcacttagagcctttggctgacaatgtccgcgaaatcgtcatcaatgacggcgcctacgctgaaagtggcaatgacttacaccagactccggctgagattctggcccagcctttgccaagcgccaacaagcgcgccatttacaccatgttagattatttaagcgtccactaggaggattcatgacggcaacagcacgtatttatttaggttcatcttttcaccgtgaccaccatcaagcccgggccaagcaggtccgcgaatacctggcggccaacccgacggttgaacatgtccactttccctttgaccagcaggtaaccgacccggctgaagacccgaatgtcggctttggcgacgaacgcagcctgctttggaagcagcagacctaccaaaacgacatcaacggcctgtccatggccaactgcggggtcttcctctacgacatggatgaactggatgacggctgcgcctttgaaatcggctttttgcgggcgcagaacaagccggtcatcatcgtgcctttcactaaccagccggaaaagaagccaatcatgaacttgatgctgtctgaaggggcaactgcttttatcaagggtgaccaggaactggaactcttaaagacttacgactttaacaactgcccatgccggccgctgactggctacggcactatttaaggcaaaaaataaacggtcaatcgcgagattgaccgttttcttatgctttctcttcaagttctttaaggagcttgccaccttctttgaggatgacctcgtttttgttcaggcgggcgaaggccagggagtcatgcaagtgctccagggcagtatttagggaccgcttctgggccaagtcgtccagagccagctggtaaccgacccgggctaaaaagtagaccacatggtggctcgatgccagttcgtaggcgtagttgagcaggtcgtcagcgtgcttgtactggccgttttgcccatagaattcaccggctgccgtcaatatggacatgacctggagttctcttaggctgtccttaatttcgactttcttgatctggcccaggatctggtcaaagtagtgagaggccttgtccatgtcctggctggcgtaaacctggctgcagcccttaagggccaagaggcggtagatgttgtcggccttgaggttgtccgtcgtcaagatattgttgaaatagaagagggctgaaacatcgttgtggtccccgtccagggccagctgcccgcagaggtagttgtagtgcagaaggtcctgcttatcgcggatctttttctcattgacctgcttgaggatcttgcggatctggtcatagtcgtaggtgataaagtagaagtccgcggaaaaaagcttctgggcaatttcactttccgtgctggtcagcatgatgtcggataaagagatgttcatccgctcgcagagctgcttgaggatcttgaaagaggggatttgcccgttgttttcgaacttgcttagggttgactgggtgcagatcccgttgcagagctcattttgggagagtttgagtgacttgcggattttgatgaatttttcaatgtttatcatggctattcgcttcctgttttcagactgagggcatagttgagataggtcatgctttcccggagatatttccggccgtagtccatggcgtggccgtggccggggatgatttccaggtcaacctggtggccacggccggccaggcggccggcaaagtcagtaacgccggccaggtcggttagttcagccgcggaattcagcatgagcaggcggcccaacttggtgtagtcgtagctctgagcgtccaggtcggccaaaaggtcggagtcttcactgccggcataggtcaagacgaagtacttgtaaaaggcttcattgatggcctgctgcttggtcaagcccagttcttctttagcattgactgatggcttgacctcctggtggtcggccagccagctgctgaagtcgaccggggctgaccaggtgacggttggaaagccgtacatgccggccaccttcaaagccagggtgccgccgctgctggccccgatctggacgatattgttttcatcgccttcgtcggtgtagtttgaagctaaaagccaggccgcgaagttgagggcatcctcgtgggcagccgggaagtggttcgctggagccagccggtagtcgggcacaaaggtcatgaagccggcgttggccaggtcgatggctacgtccctaatgctttccttgctcccccggaaccagccgccgccgtgccagaagatgaggatttttgtctgtgagtcggtatcgttgggatagtagatgtcggtcttgagaccatgcttaaggtcataagcgatattgttaacagtcacaaccataatctcatttttcctttctgatctaatttgaattctgatctttgcttttaacttaattatatactcaaagcaataatttctgcttgtcttttggcttttttgcaaggaacttggataagtttgggtaaagcttgaagcaaactggtggggctgccggaggctttttgctaaaattatcctggaattgtttttagggggaaaagaccatgagttacgaacaaagccgcaagctgatcaaccggctgaccattatttcaaccatcgtgatcattggcctctgcatctactggtaccagctggggatttttaccagccaggccaagatgagcgcctatctggctggcaaaaagatcctcggccccatcatctttgtcttgattcagatcatccaggtcgtgatcccgattatccccggcggggtctcccttttggccggggtcgtcttcttcggcgccgggcccggttttatctacaactatatagggatcgtcatcggctccttgatcaacttcttcctggcccgctactacggcaagtccttcatcttgcacatcgtgtcagaagagagcttggagaagtataccaagtggactaagaaccaaaagaagttcaactggttcttcgccatctgcatcctggccccggttgctccggatgacctgctctgccttttagcgggtttaacggagatgaagccctggacctacttctggattattgttctctgcaagccttggactatcgcggcctacagcctgggcctggtctacggggcccgctggatcatgaggctgatgtgatggagagtgagcggatatatttgcggccggtcgggccggaagatgctgagctgcttttgtcttgggggcaggatccctattaccaggagacggcaggctttgcccattaccggaatctgccagaagctgaagaaggagccttggcctaccagcagcggccggccagctacatgatttgcttgaaaaagggccaggcgatcggtctgctggagctgtacccccgggatggccagtcccgggagctgggctttttactggataaaaagtaccaggggcagggctacatgactgaaagcatcaactgcctcttaggggaggcttttaaagatccggagatcaaggaaatctgggccggctgccgggcaaacaatttgcggccccagcatttattgcaaaagctgggctttcggcagatgtatgaagtcgattaccggcaaattccgccttttttggatttttcagccaagtattatttgctaaaacggagcgaatagcatagaatagagacaaacacgaaatccctagactgccgacagagagtccgcgtatgctgagagcggacggcggtcgcttccagatttcattagtgtgggcaattaatcattgcacggccgggcaccgttaacgctcaactgagtgcggctctttgagccgaaactgggtggtaccgcgaaccgtgcgccgattcgtcccaagactgggacggaccggcttttttattttttcggaggttatatatgctggatattaaggtcattcgcgagaatcttgactgggccaaggaaaagttggcaactcggggcatcaagcctgagcaattggatgaactggtagctatcgacgccaagcgccgggaagctatggtgcaatgtgaaaacttgaaggcagaaagaaacgaagtttcaaagaagattgctgccgccaagcgggaaaaggcagacgccagtgaagccatcgccaacatgcgtgaagtcggcgccaagatcaaggaattggacaaggaagttgacgaattgcaggaaaagcaagaatacatcctgctccgtttgccaaacttcccggctgactcagacccaattggccctgacgaaagctacaacgaagaagtccgccgctggaacgaaccaaccaagtttgactaccagccaaaggctcactgggacctgggcactgacctgaacatcctggactgggatgcggcaagcaaggtttccgcagcccgcttcgtttactacaagggtgccggcgctttgctggaacgggcagtttacaacttcttcctggatgaaaacaccagcgaaggctatactgaagtcatcaccccatccttggtcaacaatgactcaatgcaaggaactggccaattcccgaagtttacggaagacgtctacactattgttgacaacgacgacccggaagtagcccggaacctgactttgattccaactgctgaagttcctttggtcaactacttcagaggtgacatcattgatggcaagaacctgccaatcaatgtgactgctttgtcaccagccttcagaagtgaagctggttcagctggccgcgacacccggggcctgatccggatgcacgaattccgcaaggtagaaatggtcaaggtggttaagccagaagactcctggaaggaactggaaaacctgacccacaacgctgaacacctgctgcaaaagctgggtctgccataccgggttgtagccttgtcaaccggggatgcatccttcaccagtgccaagacttacgacttggaagtctggatgccagcccaggacacttaccgggaaatctcatcctgctccaactgtactgacttccaggcccgccgggcacaaatccgttaccgtgacgaagacggcaaggttaagctgacccacactttgaacgggtcaggcctggctgtcggccggacggttgccgctattttggaaaactgccaaaacgaagacggcacggttaccgtaccagaagctttgcgtccatacatgcacggcatgaccaagatcacgccagaagttaagtggcactagtcctaaaaggaactccgcggaggggttcctttttgcgtggaaaatttttctaaaaaactttttgcaaaagtgtaacctttcagttcccttaggtgtctatcagggtagaggagatgagggcctcgaaaagcaaaaagtaaaaggacggaaaaagacagtgagagaaactgaaatcatcgggcagttcttcgccagagacgaagctgcgctcacttcagtccagagtgaatatggggcatactgctcaacgattgcccgcaacatcttgcgggataaggaggacgttgaggagtgcctgaacgatacttggctgaaagcctggaacacgattccgccgaagcggccgcagagcctcttggcctacctggggcgcgtcacgcgcaacggagccttgaacatggtccgcgaccaaaagcggcagaaacgagctgggaatcaatataccacctcgctggatgaaattggagagttatccggcgcggtccaggggcaggcagagctggaagggattgagagcagcgctttgacggagatcatcaatgattttctggcaggcctgccaaaagaaaaaagaattatttttgttcagcggtatttttacatggatgctgtcagcgatattgcggcagctaacgggatgaccgtgtcggctgtcaaggtatcattattgcggatgcgccgcaaactgggcaaaaagctgcaggaagaaaattatatttaaaggggatattattatgaaaaacactgacttaatggatgcaatgggcggaatcaagactgagtacatcgtggaggcagcagccagccgggggcaaaagaaggttattcctttgtcagccaagcgcaagccgtgggtccgcctggtggcagggatcgcggccgcggctgctttcagcgtggctttgccaaacacgagtccgcaggtggctaatgccatgcagaacttgccagttgtggggaactacttcaagctggtgaccttccgtgattaccactatgaaagccgcaagcattcagccgatatttctgttgataaagttgccgtcagcggggtaaccgggccggcaaccaaggaggccaagaagagcagccaggcagtcaaccgggaaattgcccaggaaactgaccgtttgaccaaggaattcaaggcatctctgaagaagggcggctatggttctttgacggtcaagaccaagcaagtgactaacaaccgctactggtacgtggtcaagctgacagccgtgcaaatgcaagctgacagcggggaaagtagccgctactacgtcttcagcaaggccagcggcaagcaggtcaagctgggggacttgttcaagagcggcagcaactaccaaaaggccatcagccagaacatcattaagcagatgaagcaggaaatgaaggctgacaagaacaagagctacttcctcaaggaaaatggcaatccggacggcttcagccagatcaagaagaagcagcagttctacatcaacaagaagaaccaggtggttatcgtcttcaaccaaggcgaagttggcccaatgtccatgggcagccagagcttcgttttgccaaacaagctggttgccaaactgcagagataaaaatacagagatttgaagaatgtagagtgtagagagaaaagaaaaaaaccggggtaaaagagtatgatggagtgaagaaaatggtgacttaggtcgccatttttcttttgcccagcttcttttgccgatttttagaaaaaatcgcagaaattttctctgcttttttcgggaaaagcaagcgaaataagaacaatcctttgttaaaagaaggaaaaatgctgttaatccaatttattgccgctgaaggagaaagctgagcaacaacaactcggccgggtgcgccaatcataaaacgaatgaaaaagcaaatttgacgaatcagaaataacgagtatactaatatttgttgccacgtgagacaagcaggtctcgcggaggcaaaaagaaaatatcagaaagctgttgacaagaagtcaacaagcgagtaagatataaaacgttgcgtcactaagacgcaagttggtactttg

SEQ ID NO: 2199 - DNA, 1123 bp, Unknown
  gut microbiota DNA sequence
cgcaccggcgatatcacagtggtgcttgaccgcatcaagcagcgccttgaagttcataagctgatctctagcaagcgttacagcaatgattcaaagaaggcaatcggcattgacaaggggcttgccaccctgctttcctgcagcagcggtaatgaatatggtaaaaatttcagcaagcttgccaatgccatcgttgacaaatatggcaagcgaaacgcaaatcgccagccatatatgagtttgcgctggcaactcaatcagcagcttgagcaactggagaaggcaaaccaacctttgtctaagactgctttgaggaagaaaataaaactgcttggcaagctcaagaatctggagcagaacaatatcggcagaaagtcgtatgacaagagctaccgctcagctcatgaaactgtcagaagctttatcaactgtgcgataaacagaatgatcgagacagagcatccggcggttattgccaaggaagacttgacgttcgtaaaagaaaaaggcgtcaaatcagataacagcagattcgcaagaaagatgcgcaagcgcttgaattcatggactaagggccaactggatgaacgtattgaatatctttcaagcaaaaattcgattgaaactcatgatgtcaacccagcatatacttctcagtactgtccaatctgcgggcagcattttgaggaacgatacggcagtcatcatgaactgaccaaatgcaagaaatgcggcgagatgaatgcgaacatcgccgcagccaaaaacatattgagtagattaactgacgaagaaatcacgctttacacgccttataagcgagttaaggagattcttgtcagtcggataaaagaagcataagccaagcaatactacaaagttgaaggctctagcatgtaagagcagtcagctttaacgaactcagttcggggtattaaaatcgcggcttgactgcttcgagaaggcatcacgatatgcttgccggctttttgcgggcaagatgcctttccgactgccatgctaaaagttttcagtggggcagataaaaagctattggatgacgccatccggcgttatttgacagccaaccgtactcactgaccttaacttcaaaaggttaaaa

SEQ ID NO: 2200 - DNA, 277 bp, Unknown
  gut microbiota DNA sequence
tgcatcacgatatgcttgccggctttttgcgggcaagatgcctttccgactgccaggctaaaagttttcagtggggcagataaaaagctattggatgacgccatccggcgttatttgacagccaaccgtactcactgaccttaacttcaaaaggttaaaaatctgatttcttttgccaggttgaatctacccatagatttaactagaaaggaatatcagaaaaacttaccaatactgatgtgattatcaagatttagtaagttttatgattcggttt

SEQ ID NO: 2201 - DNA, 31499 bp, Unknown
  gut microbiota DNA sequence
atgccaggttgaatctacccatagatttaactagaaaggaatatcagaaaaacttaccaatactgatgtgattatcaagatttagtaagttttatgattcggtttctttcataagtaatgatgtacattcttagcattacttgctatactgaaaagtaagttgttggttacttttagtaagtttaataaatgcaagtaagattagattggatagattaagtaacatctcgggagataaaagatgcataagaaaaagattgcttcagtaacacttttggcaacggccgcgcttttgacagcttgcgggcaaaacaagggggcttccagctccaagcaggtgatgaagacagccgtaaccggggaaatcagtaccctggactccagcaagtacggggataccatcagctctgaaaccctgcagaactccatggaagggctctaccgctttgacaaaaaggggcaggcccggctggccggggcggtcaaggtgaccaagtccaaggaccaaaaggtttacacttttacccttaggaaaaatgccaagtggtctaacggagacccggtaacggcccaggactacgttattgcctggcggcggacggttgacccgaagaacgattccctggacagcgacagctaccaggtgattaagaacgggacggacatcgtagccggcaagaagaaggtgtctagcctgggcatcaaggccttgggcaagtacaagctgcaggtcaccctggaaaatccgatccagtatctgccggacctcttgaccggggcccaattctacccgcaggacacgaagatcgtcaaaaagtacgggtccagctacgggaccagctctagcaagctggtttacaacggtccatttactgtcagccaatggaccgggtccaatctcaagtggactttgaagaagaacaagacttactggaatgccaagtcagtcagcttgagcgcggtcaaggtccaggtcatcaagactacctctaccggcctcaacctctataagggcgggcagctggactacgcgccagttgattctgactacgtcaagcagtatgaaaagaatgccgactaccacacgaagaccacgccgaccaacggctacatggtctttaacttgaagcgcaagactacaggcaatgtccacgtccgccgggcaatcagcctgggcgtgaacaagcaggaattggtgaagacggtcctgcactcaggcaaggcagctcaaggtttcgtagccagcgacttcatctacgatgaaaacggcaaggactaccggaccagtgctggcaagctgatgacctacaatctgaagcaggcccaaaaggaatgggctttggctaaaaagcagctgggcaagtccaagatcaccatcgaactgttaaccagtgacatggacgcttccaagcgggtaggcgaatacctgcagagcaacttgatggagaacctgccgggcttgaccgttaagttgcggtcaattccgctgaagtcccgtttggcggacacgagcaagcacaactttgacatggtttacgggacttggcagccaagcttccaggatccgatcgactacttgaccatcggtggcctcttcaacctggaaagtgactacaagaacagcactttctggaaggaaatcaaccaggcaaagagcacttacgccacccagcccgccaagcggcaggccagcttgatcgccgccgaaaagcaattgatccaaaaggatgctttcgcggcaccactctaccaagccggggtttcctaccttcttaagtccaaggtgaccggcttccgcctgtctccttacgggactgttgcctactactgggacgtcaagattaagtaaaacaagttttaaaccggtaaaagctgccagtttctttcaataaggaagaaactgacggcttttttgcgaaaaaagaagcattcttcaactattttgcccgtatagcgggtacaatagtatttagttttttgaccaggaggcggacatgagcaaatacatcaaagttggcagcggcggcggtgaagtgacctggcaccgggccatgctcgacatggagccgggggactatctgctgctggagcccggctattacgtttggccccggggccggctattagaagacgtgaccatcaagggcctgggggccagtccggaagacacccggatccgcagctttttctccatcggtgaaaacagctcccgggtggtttttgaaaacttgaccctggaaccttacggggatgtaaacaccctggatttgccggaagagaccaacagctatctgatcctgcgcggctgtgtcttgaccgggaccggcagcaagacgaccacgatttccgtcaacggccaggacacggtggagatgtactcctgccgcctgctcaacgggaccctgtccttttttgaaaaagccaatttccgcctggaaatggcggactgcctgctggactatgaatcagaaaaattcggcaccatctctttggaagggaccgggacggccatcattaataactctgagatccgggggacggtcaatagctttgactccagcaacatcgaattaaacatcaataactccgccatcggcaaccttaacttaggcggcaagagctgggttaatgtctacgcctgccgttttcttaaccgggactacagcctttatgcccggggcgaatgctggctgaacatcctggagagtcaaatgcccagtcaattggccatcgaagaccactgccacttgctaatgcagaacagccagctctacaatttccaggcccggggggagagccagagctttttgtccaatgtgcagatcgcggccgcggccagcctggaaggcaaaagctttatggacggcagcttagtgactttctccggcaatggtgactacccttacttcatcttcctggtcgaccaggcggtattgaaggggcggaacctgcaatttgacccgcaaaactggccggttctggtcgacaatgatgcccgcttagtggccaacgccctttactaccagggggcgccactggaaatcaagtgcgagcatccagaaaacatctctttgatgggaatcaagtggactgaacggaacgaatagaaaggagccagaccatgcgcttaatcaaagtaagccaggacccccgggacttgtcctgggagcaggctttagaccagctggaagacgatgacgtgctcatgctggctcccggcttttatgaaattccttttgggcaaaagctgaagaatatcgtgatcaaggggacggggacagcagcggatatgacggtcctggttggcacggtcatcctggatggccgctatttgaccttggaaaatctggccgtcaagactaccgcaattgctggagccctggtcaaagtctatgaaggagaaaatgctccttacttgaccctgcgcggctgccggctggaagcagcagaaggggagaggggcacggctctcatgaccttggggccggtctggctggaactttactcctgccaggtcaaagggggaatccgcctggttggcgatgaggagcagcatgtccagatctcttccagtgaaatcgcggcaactccagctgcttttaccggcaatggctttggcccattagccatcagccagtcccagatcaagggggattttgtcctggaggaaagttcggcttatgaagggcactttgaccagacggcttttgaccaggtgaccagtttgagcgaaggaaatgacctttacttcactgagtctgccctgtctttaactctgaaaaatggccaggccgaccttttgaactgcgacttgccggggacaacccttttggaaaaagctaattcagccgctttccaaaactgcacttttaagcaattcaagcaggtcagcggaagcagcaacttaaccaactgccacttggaggcaggggaaatcatgggccagggcaaggctgttttttgccggccgcacttttcctgcagcgaaggcacttggcttagtttaagggatgcaagtcaggtccgcctgcagaatgccctcttaaacgtggctggcagccacttgcgcctggctgacaaagccgggatcttaggcaatgttttggagagcgaccaggaccagctgctggtcaagcagactggccagggcaaggtaaaattgacgggaataaaatgtaaacttgtctaaagaccgccttttgctatagaatttaattaagatccaagcttgatgattctgtggggggaaagaccgatgcaagaaccaatgtatatcaaaattcacaatcagctgcgccgggacattgaaaaccatgtctaccaggtgggggaccggattccagctgaacggcagctggcggaacagttcaaggtgtcgcggatgaccctgcgccaggccatcaagaccctggaggaagaagggattctggaaaggcggctgggcagcgggacctacgtggccagccagaaggtccaggagaagatgtccgggatcatgtcctttaccgaaatcacccgggccaacgggcagaccccgtccagcaagctggtttcctacaagatcacccagccgtccctgtcggaaaaagaacgcctggccctggagggcagcgacaaggtcctgcgcatggagcggatccgttatgccgaccaggtgccgatctgccacgaaatcgtgacggtgccggaagatttgatcgcgccttttgccaaagatgacgtgtcaagccacctctaccagaccttggagaagcaggggggctaccagatcggggatgcaactgagtacatctcagccgctgtcgccaatgaacaggatgcccgcctactcaactgccgccgcggggaagccttgatcacccgccggcaggttaccaagctggctgatggccggccctttgaatacacgcgggcttcatacgtgggcgagcgctttgaatttactttcagcaaatagccagctgactagctaaagatgaaaatgacaaagagacaggttcagtcctgcctctttttgcttcctttaaaaaagtacaaaagatggaacttgcttttggcggcagggggcgaatttgctaaaatggacttgatactattagctaatgattaacgaggcactatgaaaagcatactattccgcctatatctggcagtcatgaaatttttggcccgctggcaaaaagaagaccccaacacatacgtgatcttgaatggggccggccggtcggggtccaatggctacctcttttataaatacctgcgccgcgagcacccggaagtcacggcctacttgatcgagccctggccttcttcccacctgccctggtcagactggcaaaaaatcggccgggccaagtacgtcttgaccacccaccagcccttcaaggtccggaaaagccaggtcaacctggccctctggcacgggattcccctaaagcggatggggaccatggccaacaatacccagcgccgggacaaccagagaaacgaaaagctctggcacaagacggccgacctggtcacctccagttcggaactctatgaaagcttgatgagcgcctgcatgggaattgaaggtccccgctatgtccagctgggtttccccagaattgattccttgctcaagtctccttataaaaagtcccagctcctggctgactttttctcctgccaggacccggaagcccaagtagggatctatgtgccaaccttccgctatgaattggaagagccggaagtgatggagcggattaaagaagggaacttttttgccttcagcgactttgacttggccgctttagaccaggctctggctgctagaaagcagtatctcctggtcaagctccatccatgggaaatgaagctcttcagcgacttccacttggaggccaagcacgtggcctttttgaacaattccgaccttttggctaaaatgctggacctctacgaaatcctgggagccaccgacttcctcatgaccgacttctcctcgatctactttgactacctccacgtggacaagccgctgattttcatcaccaactacctggcccagtatgaaaagacccggggctttttgctggggccttatgaaagaatcgtccctggtccctgcgtggccagtcaggctgacctggtcaagcagctgggtgaaaaagacgggtatggccttgagcggaaaaagtggctggagctgagcgaccaggccgaccatggccaggcctgccagacaatttttgattacttaagcggggtctgatccttgaaaaaaacttttctgaacatcttctataacgcggtctaccaggtcttcctggtcctggtgcccttgatcacggttccttacctgtccagagtcctgggcccgacgacctacgggatctattccagcgtcaacaacacggtccagtttctgatgatcttctgcgtcctgtctttatccaatatcggggtcagaagcatctctaaagcccgggccaaaagcaagagcggggaactgaccgaggccttctggggcctgtggtacttccagtttatcggcggcttggtaaccatcgccttgactgtcttgacctgcctggtcctcaaggtccgttactggaactacttcctgctgatgctgccatacttgattgccgcccagtttgacatctcctggttcttccagggtctggctgattttggccgggtggtcttaagaaacactatcgtcaagatcgtcagcgtggtctttatcttgcttttgatcaaaagtccggctgacctgtggaagtatttcctgatcatgtccgtgtctaccatgctgggttcctttgtcttctggtccagcatcggcaaatatgtcggccggccagtcaagcatttctaccatttcgcggaaacccgccgggccatcatgaccttgatgattccccagatcgcgacccagatttacacttccttggacaagccccttttgggcctcttccaaaacacggcccaggtctcttactatgacaactcccagcggatttccaacatgatcctgggggttatcaccagtatttccctggtaatcatgccgcagatggcggtccaggggaaggaaacccagaagaaggtcttgaagaagtccctggaagccacgaccatgctgggaaccatgtttgccgtggtggtcatggccaataccaaggaattcgtgccctttttcttcgggaaaaaatatatcccgatgacccccttgatgttcttctttaccttgaccatcatcttgattcccatgggcggggtctttgccaaccagtttgctctggccaacaagcgggacaaggactatgccattccagttacgatcggggcggtcctggagctggtcttcagctactttttagaccggcctttcggggcagcaggggccatggtggcgatcctcttgaccgaagccgtcgttctctttctacgctgctggatcgtgcgggacggttacgacttcaaggaaactttcagcgacgtgcccaagtgctttttggccatggggatcagcctggcggcagggatgctgtggccttggcagattccaagtgcttttatcaacatgacggtcaagtccctggttattatggccttgtacctggccatcctctggctcttgaagtttgacttgaacgaagacttggtcacgatcgtcaaaaagcgcttaaaaaatagttatcaataaggaagaaatcagcaaaaataaacgaagaaagcgtgtaagcatggtaaaaatcaacattttgggcgttggcttcgacaagtacagcctggcggaatttgaagcccgctttttggaccgcttgcggaaaaaagaatccaccctggtggtcacggccaacccggaaattgtcatggccgctaaggaagacccggaataccgggaaatcatcaacaatgtggctgactacgtaacggctgacgggatcggcatcatcaagggggccaagatgctggggctgaagctgccggagagagtaaccggctacgatctcttctgctggtacctgcaaatcgccaatgaagaccacttgcggctctacctgattggggccaagccagccgtgatcgctgccgttaaggaaaaaatcgccaaggactacccgggcatcgacttagtcggcgctgaggacggctactccagagacgccctgccggaaattgccagccggatcgcccaaagcaggcccgacctggtcttcgcggccctgggctttcccaagcaggagaagctcctggccatcttgcgcaagcaaaaattgccagccagcatgatgggggtgggcggcagctttgacgtcttcgccggcgccgtcaagcgggcaccgaagcttttccaggatgcccacctggaatggttctaccggcttttgaaggaaccaagccggattggccgtatgatggttttgcccaaattcgtcgtggaagttaaaaagagcaagaagcaggaccagcaataatgaaagtactgcacatcaacgccggcctggaaagcgggggcgggctgactcatatcgtgaacctgctctcccaggccaaaaaggcggggcaggactttgacctcttgaccttcgcggaaggaccggttgcccaggctgcccgggaaaaggggatcaagactatcgttttgggcggctccagccgctacgacctagccctgctcaagcggctgaaaaagacaatcaaggatggacattacgacctggtccacagccatggggcccgggccaacctttttgtcagcttgatcaagtcatccttgccttgtccctggttgatcacggtccactcggatcccgcgatcgactttgaagggcggggaatcgcggggaagatttttaccaagctgaacctgcgggcgatcaagcaggccgatggtgtcttcgccatcactccacgttttgaaaaaatcctgctgaattatggagtaaagcccagccggattcacgttatctacaacgggattagctttagggacaatagaaatatagcaggcaaggaagaccatgccggcttcaacatcatcaatgttggccgcttggaaaaggtcaaggggcaagatcttttgctcaaggcatttaaagcagccaatttgccgcaagctcacctctatatcgccggcagcggtagccaggaagcggacttaaaaaaattacggcaggatttggctttaacagaccaagtgactttcaccggctttttgacccaagcagaattaaggcagctctaccagaagatggatctggccgtcttgtcttcttactcagaaagcttccccctggtcttgctggaagcagccgacaaccggctcccgcttttagcaactgacgtgggcggggctagggagctgattccacaaggaaaaggttgggtcgtgccggtcaacgaggaaaaagccatggctgatcagttaagagcaatcgccgctttgccaaaagaagaattagcagcaattgcccaaacggaaaaagcctatgcccgccagcacttttccctggaccggcaactggctgacgttctggccggctaccaggcctgcctgcaaggagaaaaagcatgattcccaaaattatccactatgtctgggtgggcggcaatcccaagtccaagaccatccagacctgtctggcctcttggcaaaagcgcctgccggactacgaaatcatcgaatggaatgaagacaagctggacctgaatgccaacaaatatgtcaagcaggcctaccaggccaagaagtgggccttcgtttccgactatgtccgggccaaggccctctatgaaatgggcgggatctacctggacaccgatgtcatggtcttaaaagattttgccggcttgctaaatgaccgggcctttattggctttgaaaacaatgactacttgtcagcggccatcatcgcggcagagaaggggcatccttttatggctgacatcctgcactactatgacgacctggattttgcctttgaccaaaaggaccagctggccggggtcaactccctgtccgtcacggaaattctcaaagaaaagtatggccttaagactggcaaccaagagcaagtgttaaaggagggaatccatgtttatccagacgggatcctctgcaacccttcccctcagtcccggtccattcacctttttaccgggacctggctggaagggaaaaattcctggaagcacgacctggtcacctttttgaaattacatatccgcagtcaaaaaactgcgaaaatttactaccagctcttcagacgctaattttttaaagaatctcgtgaaaatacatttctgaaagcagggactgcattttttgagtataattaaaggtagaaaatacaaagtagaagattgcgaggcagcaaatgagagagttgcaaaagaaaattgtcgaatatgagcacgttttgccggaaatcgatccccaggaagaaatccgcaagacagttgacttcttgaaggactacctaaaggctaaccccttcttgaagtcatatgttttggggatttccgggggccaggactcaaccttgacagggaagctgactcagatggcaatttccgaaatgcgggaagagactggcgatgacagctataagttcatcgccgtccgcctgccatacggcgtccaggccgatgccgctgatgccgctgacgcggtagccttcatccagccggacgtggacttgattgaaaacatcaagccagccactgacgccatggtggcgactttgaaggaaacaggcgtggaaatgaccgactttaacaagggcaacatcaaagcccggcaaagaatggtcatgcagtatgccattgccggggccaatcagggcgcggttgtggggactgaccacgcagccgaaaacttctctggcttctataccaagtacggcgatggcgcggctgacttaaccccgctcttccgtttggacaagcggcagggcaagcagctcctggctgctttgggctgcccggaacacctttatttgaaggccccgacggccgacctggaagaagaaaagccatccttgccagatgaagttgccttgggcgtgacctacgaggaaatcgatgactacctggaaggccgggaagtcagcgagaaggcagcggaaagaatcgaagaattgtggaccaagagcgagcacaaacgccacctgccggttacaatttttgatgattattacaaaaaataggggcagatttggtgaaaaacttgtttcaagcgccaatttttgctatattaatcatgtcataagggagtaacggcaagcatagcttgcgacaagcccaacagccgggagctgtgttggtttcctgggcttgtcttaattagtgagacttatgtgcttttgttaaggggcacgtaagtctcttttctttttaaaggaggaaaatactgtggctaagaagtattacagccaggacatcccgggcactttagccgagtttggctcggatgccaaccacgggctcagttcggctgaagccaagaagcgcctggaccaatacggcccgaacgctttggctggcaagaagaaacgttcaatgtttgcccgcttcatggaccagttcaaggacttgatgatcatcgtcctactggttgccgctgttttgtccggggtagttgcccaggaatggacagacgcggggattattttagtagttgtgcttttgaacgccgtcctgggcgtgatccaggaagcccgatcagaagcagcaattgaagccttgaaggacatgtccacgccaagcgccagggtgcgccgggacggagcggtaattgaagttccgtcaacggatatcgtgccaggtgacgtggtcttgctggaagccggtgacgtggtcccggccgacctgcgtcttttggtagcaaaaagcttgaagattgaagaagctgccttgactggggaatcagttccggtggaaaagagtaatgaaaccctgcaaggggaggacattgccctgggtgaccggatcaacatggcttactccagcaccaacgtgacctacgggcgcggggaaggtgtggttgtcgctacggggatgaacacggaagtcggcaacatcgccaagatgctgaacgaagctgatgaaactgatactcctcttaagcagaacttgaaccagctgggcaagaccctgacttacatgatcctggccatctgtgtggtcgtctttattatcggggttatccggaacccgcagcatgaaccgatgaatgctttgctgatcgacatgttcttgacggcggtttccctggcggttgccgctattccggaaggtctgccggcgatcgtgacgatcattttggccttgggtacccagaccatggctgaccacaaggccatcgtcagaaagctgccagccgttgaaaccttgggggcaacggacatcattgcttctgacaagactggtaccttgacccagaaccggatgacggtggaaaaggtctactacgacgggatcctgcatgatgccagcgatgacatcgacttgaccaaccaggccttgattaccatgcttttggccaacgacaccaagattaaggacggcggggagctcttgggtgacccgactgaaactgccctggtgcaatttggcttccacaaggatctgccagtgaacgactttttggcagaacacccacgggtacaggaagtaccatttgactctgaccggaagttgatgagtacggtcaacaggtatgacggccagtttatggttgccgtcaaaggcgcgccggacattcttttggaaagagtcaagtatgtcaacatcaacggcgagctgagcgaaatcagcgctgaacaaaagaaagccattttggcaagcaacaatgaaatggccaagcaagccctccgggtcttggcgatggcttacaaggttgttgctgagccatacgctgacccgacgactgacaatgttgaacaagatctgatctttgccggtttggtcgggatgatcgacccagagcggccggaagccaagggcgcgatcgcggaagctcaccgggctgggatcagaacgatcatgattactggtgaccaccaagttacggcgcaggcgattgccgaacggctgggcctggttgaaaagggccgcggcgatgccgtgattaccggggcgcaattggataagctgagcgacgactacttcaccaagcatgtcggtgactacagcgtttatgcccgggtttcaccagaacacaaggttagaatcgtgaaggcctggcaggcaaatggcaagatcgtggccatgaccggtgacggggtcaacgacgcgccgagtctgaagcaggccgacatcggggtcggcatggggattaccggtacggaagtctccaagggcgcggccgacatggttctggctgacgacaacttcgcgacgatcgtggaagcggtcaagcaagggcgaaaggtctttgccaacattcagaaggcgattctgtacttgatgagctgcaacgtcggcgaagtattgacggtcttcttgatgactttgctgggctgggatgttttgaagccagtgcagcttttgtggatcaacctggtaactgacaccctgccggcgattgccttgggtgttgaaccgattgaaaaggggatcatgaacaagaagccgcgggggaagaattccaacttcttctcaggtggcgtggccagctcaattgtttaccaggggatcctggaaggtgctttggtcttgaccgcttatggtttgggtctgcacgttttaccgcgggggactaacccgcatgaagacgcgttgaccatggccttcttgactttgggtctgatccagcttttccacgcggtcaactctaagtacgtgaagcagtctatcttccaaaagagaacttttgccaacaagtggttcaatggcgcgattgttctgtcagccttgattatggcggcagttgaattgccattcttgaccagagtcttctcagtttcagaattgcacctggaccaatggctgactgttctggggatgggcgttttgatgatcgtgatcgtcgaaatcgtcaagttctttgagagaaaagctgatcaacggaataattaaagataataattcacaaaaatgcctggacgtaagtccgggcattttttgctgcgtgaaaagaggtacggtgaaattgtggggacttgaatcggctgcaatgatcttcatattatgttaataataatgagagaactggagtaaataataaggttcagtgtggctttgtttgttaagaaaaatagtctttgtctgtttttaggggcagttgtcggttttatgataacgttaactgaaaacatatcaactgagattggagggactttatttactgtttcaaatatctgggatactaccaacattattaatccactagcgaatgctatggtggagaatccatcaccggcaatctattacctaaattacgcgacgactgcagttttctatattacgctaactgctgttttgttaagaatttggtacatgaagaatgtagagaaaggttaaattatgctaaaaacgcgttatcagcgcctaattgccataacactctttttggactttgtggttagtctgggctgtggcctgcagtttgcgatggatggcggagaaggcgagatgccaatgtattatctgaatgccaacttgatcagcttatacatccagacaggtctaaccgtcatggcagccgtccaaatcctctctttccgctcagtccggccgcttcttgctccccgcggcaaaatggattactttgaccagagtctggcccagctgcttttctccaccgtgccctatctctttggcaagaatccctgcttccgctatggcccggcctggaagggcaccctcttgctcttgatgcattacctgctgttcattgcctgtttcatgctgatcttgctctgcatcaagattaaatatcctttctttatcatttttttgccagcacagtacctattctttaccattactggctggagaagagctggcttttaccaaaatacgctaatatttatgaccctctctggcgggccatccaccacatgtatatactctaagtcgaggaggagtttgtatgttgaaagtgtcacatgttaagaagagctttaaaaaactggccgtattaaaggacatctctttagaaacccaagcgggtgaactggtccacatctccggtgtcaacggctgcggcaagtccaccctgttcaaaatcatcgtcggcctcttaaaagctgacagcggggagatccacactgacaaggatgactaccttggtgccctgatcgaaaaccctggctttatcgaatatgaaactgcctgggacaacttgacctttttaggtcacttcaaccaccgcttccaacccgaaaagacccgggacctgctcaaggcctttgacctggatccggataacccgcaatccgtcggcaactactcagtcgggatgcggcagaagctcgggttcgttaaccttatgaaagacttgcgcagtgaaaacaagaccgtcatcgtggccagccacgacgaaattcccggcctggtctacgaccgccgtttaagaatgaaagacgggatcttgctggccgaagagtaaaagttggcattttccgccttgactagctacaataatcccatgattagtgaacaagaactgcagcagctggtcgaaagcatctcccttgaatccttcagccgtccctttctccaccaagcgaaaatcaaccgccgcctgaagactactggcggccgctaccaattatccgaccatcacctggaatttaacccgctctttcttaaggaagaaaatctccattatctgccgggcatcatcaaacatgaactggtccactaccacctccacctggccggcttgggctaccagcataaagaccgggacttcaagcttttactgcaaaaggtaggcggtagccgctatgcgccaagactagaagagaacaaaagaagccgctggcactaccgctgccggcaatgcgggcaggactactggcgccagcggcaggtcaacgtcaagaagtatttctgcggccgctgccggggaaaattggaaaaaattgccggcccccttgccaaatgagggcagctttgctaaaatattaatgtgtttgcgggcgtggcggaattggcagacgcgcaagactaaggatcttgtgaccgcttttggtcgtggaagttcaagtcttctcgtccgcactaagataaggagtcgttgtaaaacggctccttttttgttgattcttaaaacttgcttttcctccaatctgttataattgatagaacacaatgcaagatgaatagaaggtgtgctaaatgtacgattctgaagccagacagaagaccttgaacctgacggtcagcgcggtctttgtggccattctgctgctggaagcttttattcccaatgtgggttacatcacgattttgccgggcctgccggccatcaccacgattccgctgacagtcgcggtctttgcctctttaagaggggcgaaagccggcacggcctttggcttggtctggggcctgactagtttgcttagggcctatgctgctccaaatggcctggttaccattctccttttccagaaccccttgattgccttattgccccgtcttgctgctggctgggcagcgggcctggctgggcaattggctgataaatgggagaaggagagcagaaagcctctggcttacgccttaagcggccttttagcttcagcggtcaacacgttcatggtgatccttttgtctgacctggtctacttcagtcatccccagaagctggctttagccctgggggccaagagcgggcagtctttgctggtcatcctctttacggccctggccgtcaacggcattttggaagcagtcttcagcggcttgatcacgccgctaattaccgcgcccctcaagaagcgccttaagcggcgctagaaagcagataagtatggctggacacagaaaaacacgcaagggcaagcagacgaccaccatcctcgtggtccgcgtttttgccatcatcctcttgtgcctgggcttgttcgtggccttccgctactaccgccgccaggccttgcagcaagagcagatccgccaggctgaactggccaagcaggaagcagccgctaagcttttgcggcaaaagaaggcctttatccaaaaggtggggccgatctcgcaaaaggttgacaaggggaccggtcttttgccaagcatcactatcgcccaggcctgcctggaaagcaactacgggcaaagcgccttgtcccagaagtacaacaatctcttcggggtcaaggggaccaaccctaacacttcagccgtgatgacgaccaaggagtacagcaacggcaagtgggtgaccgtcaaggcccgcttccaaatttatgattcttatgaagcctcgatccgggcccatgtccgcctcttccagcagggaaccagctggaacaaggaccagtacaaggatgttttggcggccaaggactataagagccaggccaaggccctggtcactgacggctatgccaccgacccggactactcgaccaaactcatcaatttaattgaacaatacaacctgaataagtacgataattaagcaggtttgacagggctgccagagctttttggtagctttttttgctataatggataagctaagttttttgatttttgaaagggtaaagcatgtctgaagcaacgattttacaaggtttgaatccgcaacaggtccaggcagtcaagacgactgaagggccccttttggtaatcgccggggccggcagtgggaagacctcagttttgaccaggaggattgcctacttggtgcaagaaaagcgggttgctccctggaacatcctggccatcaccttcaccaacaaggccgctaaagaaatgaaggaaagagaagtcaagctcctgggcgaccaggctgaaagcatctggatgtccaccttccacgccctctgcgtccgcatcctccgccgggacggccacttgatcggctatgaccgggacttctccatcgctgacccttcagagcaggtgaccctggtcaagcgcatcctccgccagctggacctggatcccaagcaatacctgccccgcaacatcttgagccagatctccaatgccaagaaccgcctgcagaccccgaagcagtatgaggccagcgcggtcggtccttttgaaaaagttgtcgccgacgtctacaagaaataccaggccagcctggaaagagaccagatcctggactttgacgacttgatcatgcagacgctgaccctttttaaggccagtcctgataccctggcttactaccagcagaagttccgctatctgctggttgacgaataccaggacaccaacgaggcccagtacgagctctgccgcttgctggctgacggctaccacaatatctgcgttgtcggggatgccgaccagtcaatctacggctggcggggagccaacatggaaaacatcctcaactttgagcatgactacaagaatgcccaaactgtcaaactggagcagaactaccggtcaaccggccacatcttgaaggcggccaactcggtcattgaccacaatgaaaaccggaaggccaagaagctgtggactgacaagggcgacggggaaaaggtccactactaccaggcccagagcgaccgggacgaaacccgcttcgtccttgccaagatcaaggaagaagttgaccaaaagaagcgccgctaccaggactttgccgtcctttaccggaccaatgcccagtcccgggggatggaagaaactttggttgaagccaatgtcccttaccagatcgtcggcgggcacaagttctacgaccgcaaggaaatcaaggacatcatggcctacctcaagctggtggccaaccccagcgattccatgagcttcaaccggatcatcaacgtcccaaagcgggggatcggccaggctacgactagcaaattggctaccttcgccgacgaaatggggggcgggatctacgaagccatacgcaatgtcgaattggctccgatttcttccgccgctgccaaaaagctcctggccttcagcgaccagctgactgccgccattgcttacgcccaagaccacacggtcagtgaactgaccgacaagatcctggaagacttcggctacatcaaagccttgaaggaggaagaagctcaagggtccctggaagctgccgcccgcctggaaaacctgcaggaattcgctacggttaccaagcgctttgacgacaattacaatgaagaagaaaacccggacagcagccgcttgagtgactttttagcggaagtatccctcttaagcgaccaggatgacctggaagaaagcgatgaccgggtaactttgatgaccctgcacgcggctaagggtttggaattcccagtcgtcttcttgatcgggatggaagacaacatcttcccgctttcccgggcaatcaaggacgaagacccgaaccagctggaagaagaacgccgcctggcttacgtgggcattacccgggccagggaagagctttacttgacttcggcttacacccggatgatgtacggcagcaagcagtataattcccagtcccgcttcatcggtgaaatcaaggatgaggacctggacatcgtggcttcaactgccccgaagtccagcacttccttcttagacctggaccggctgccttttgccaaaaagtcccaagccaaagctgctcagccggctaagatccaccgggccagcaaggcagccggggccgtcggcgctgaaaagaagggctggcaccctggcgaccaggtagagcacaagagctggggcaagggcgtggtcatcaaggtcaccggctctggcgaagacatggaactggacattgcttttgcaagcaagggcaacaagcgcctgctggcggcttttgccccgatcaagaaaatttaggtgaagaagcatggctgaaagtttagaagaagcaaaacaggaagtccgccaattgcgggcccagctggaccagtgggccaaggcctactatgagcaggacgctccggtggttgaagaccacgtttatgatgaaaaatacgcccgcctgctggaactggaagctgcctatccggaattaaagtcagctgactccatcacccagagggtcggcggcgaggtcaacagcgacctgcccaaggttgagcacccagtgcctatgctgtcgatgggggacgttttttccaaagaagagctggcggaatttgaccagcgggtgcaaaaagcgatcggccaccctgtggcctacaatgtcgaattgaaaatcgacggcctgtccctgtctttggaatatgaagaagggcgcttaaagcgggcctcaacccggggcaatggccaggttggcgaagatgtgaccaagaatgtcaagtatatcaaggacgtgccccagaaattgccgaaagccattaccaccgaagtgcggggggaatgctacatgagcaaggaggctttcgccaaattgaaccaggagcgggacgaggccggggagagcatctttgccaatccgagaaacgccgcggctggttctctgcgccagctggacccgaaggtgaccaaaaagcggcagctgagcacctttatctatacctggatcaacccacctgccggtatcgactcccagcaccaggcgatcggggaaatggccaagctgggttttcacaccaatgaaaacggccgccggctggaaaatctggcagacgtctacgactatatcgacgaatttaccaaaaagcgcgacagcctgccttacgtgatcgacggcattgtcttgaaagtcgatgacctggccctgcaggcggacttgggcaacaccgtcaaggtgccccgctgggaaattgcctacaagttcccgccggaagaagaagaaacagtagtccgggagattgaatggaccgtgggaagaaccggggtcgtgaccccgactgccgtgatggatccggtgcaattagccgggaccacggtagcccgggcctctttgcacaatccggaccttttggccaaactggacatccgcttgggcgacacggtcaagctgcacaaggccggcgacatcattccggaaatttccgaagttgtcttaagcaagcggccagaagactctgttccttatgaagtgccaactaagtgcccttcctgcggggaagacctggttcacctggataaagaagtagccttgcgctgcattaacccgtcctgtccggcccaagttgaagaagggattacccacttcgcctcccggcaggccatgaacatcgctggccttggcccaaagatcgtcaagcagctgatcgccaaggacctggtgcacaatgtagctgacctttactatctgacagccgacgacttgagccagctggaccactttaaggagaagtcgatcaacaatctcctggcggccattgaccaaagccggaagaattccgttgagctggtcctctttggcttggggatcgacaatgtaggcgggaaagccgcccaattgattgcccggaaatttaaaaatatgtctaaaattgcttcagcaagcgtgcaagaactgacggcaatcgatacaataggaatgacgattgctgagtctttgacggcttacttccagcaggaagaagccaagaagctgctggcccggctggaagaggccggggtcaacatggactacttaggcgaagacggggaagccgcagacaacttcttcaagggcaagacggtggtcttgaccgggaaactggcccactatagccgggcggagtttaccaagaagctgcaggccctgggagccaaggtgaccgggtcagtctccaagaagaccgactgcttggtttacggggaagatgccggcagcaaactggccaaggcagaagccctggatattccgcgcttaacggaggcagaagcaatctctaagatcgaagagaaggacacggaaaagtgaagagatttttacaggcaataactttggcaagctgcagcctcctgctggcggcttgcggcaacttgaagaattccgacctggccagcaactcaacgacgacgaccggcgaggcgaagaagtacgagacgacttccagcactgacggcggctactccgtccttttgaaaaagggggtctacaagaccagcccgatctccggcctggaagccaccaactatgacaacagcgtggacgagtcggccatggaacggggcttgatccgggtctccaagaaggtcttctcaaccaaggactatgtcatccaggaaggccagcagctcgacgaaacgacggtcaccaactggctgggccggtattcaaagagcaacaaagaggggctgaacctcaagaacaacggcaagaccgggtcaacgaccagaaacccgatcatcttgcagcagatcatggaagaagacttctatgtcaagagcgggtccagctacaagctggccggcatcagcatcagcctgggcctcaactcagtcgactactacaccaagacgactgacggggccgaatacagcactaagatttccccggccaagcggcgggccttcgggcagaagacggccaacacgatcgtctcccgcttgcacgccaagaagaagcttaagaatatcccgatcatggttggccttttctctaagaccgacactgactcattagttgggggaacttacttctcatatgggacagctagcgcaaatagtagtaaaatatctaaatggagttccgtgaacgaaaagacccaggtgctgccgacagtcgatggagccagcgcggtcagtgccagtgacgaatccaaattcaccagctttaaggatgaaattgaggattacttcccgaacgtttccggggtcacggccactctgcgctactacgatggcaagctggcttacgaaagcatcgccatcaccacgcagttctacggctatctgcaggtacaaagctttgcccagacggttatgagccgggcaaagaagtatctgggaaccagctcaccggttgaaatcaccatttcctcggtcaacgacacccaagcggtcgtcgccaaggaaacggccaccgggtcttatcggatgcacatctatggcggtaattaggaggtacataagtggaaaaggtaacaaatgatactatcaagcacgttgcggcattagccaagcttgaattcagcgaagaagaactggccaagttcaccccgcaaatggggaagatcctggaaatggctgaagaacttcaagccgttgacacgactggcgttgaagaaacggtgcaagtagttgatcgcgacactgtcttcagagaagacgttcctgaaaagtggcagacccgcgaagaaatgatgaagaacgttcctgacaagagcaatggttttgtcaaggtacctgtaattatcgataaggatgataactaataatgaactacttaaacgaaacgatcgattctttaaacgacaagctgaagagcggcgctgtttctgctgaccaattggccaaggacaccatcgccaacatcaaaaagactgacgaaaagatcaacgccttcatcactgtagatgaagatgccaagccagcagaagaccttgactttaacaacaaattggccggcgtgccgattgccatcaaggacaacatcatcaccaatggcttgaagacgacggcagccagccacattttgtacaactttgaaccagtttacgaatcaactgttgttgccaagctgaaggcagcccaagctaccatcatcggcaagaccaacatggacgaattcgccatggggtcatccactgaaacttcttacttcggtgacaccaagaacccatggaacttaaacaaggtgccaggcggttcatccggtggttctgcagcggctgttgccagcggtgaagtggttgctgccctgggtagtgacaccggtggttcaatccgccagccagcatctttcaacggtatcttcgggatcaagccgacttacggccgggtatcccgctggggcttgatcgcttttgcctcatcactggaccaaatcggggtgatgagcaagcgggtcaaggactcagctgaagttctgaacgtgatcgccggggctgatgaccgcgacgctactgtttcagaaaaggaagtcccagactacaccagcttcctgggcaaggacgtcaagggcctgcgggttgccgttcctaaggaatacatgagcgacgccgttgaagaaggcgtccgcaaggcagttgaagcccaaatcgaacttctgcgggcaaacggggccattatcaacgaagtatccctgccgcacactaagtacgtggtgccaacttactacatcatcgcttccagtgaagcttcagccaacctggaacgttacgacgggatccgttacggttaccgggcagaagccaagaacctggacgaagtcttcctcaagtcccggtcagaaggctttggcgacgaagtaaagcggagaatcatgctgggttccttcgccctgtctgccggcgcttatgacaagttcttcctgcaggcggccaaggtaagaaccttgatttgccaagacttcgacaagatcttcgaagacaacgatgttatcgtcgggccggtttctaccgaaactgcttttgacttgaactcagaaatttctgacccggtcaagatgtacaacaacgacatcttgacgatttccgccaacatggccgggattccggcagccagcgtgccagccggcttgagcgaaacgacggggatgccggtcggcttccaaatcatggccaagcgctttgacgaaggccatgtcttccaagtagctgacttcatcgaacgcagcaacaagttctacgaacaaacaccagctggattggaggattaatttaaatgaattttacgtcaactatcggtctggaagtccactttgagttgaagaccaagagcaagatcttttcaccttcaccagtaacttacggggccaagccaaacaccgaaaccaacgttattgactggggtcacccaggtaccttgccaatggttaacaaggaagtctaccgcctgggcttgatggtcgctttggccacccactctcacgttaacccggtaacccactttgaccggaagaactacttctacccggacaacccaaaggcttaccaaatcactcaattcttcaagccactggctgaaaacggctatgttgaagtcgaagttcacggcaagaagaagaagatccatatccacgaaatgcacatcgaagaagacgccggtaagaacacccacgggaccaacggcttctcctacgttgactacaaccggcaaggggtaccgcttttggaagttgtttctgaaccagaaatgactgacccggacgaagctgttgcctacctggaaaagctgcgggaaatcgtgcaatttaccggggcttctgacgttaagatggaagaagggtcaatgagaattgacaccaacatctccatccgcccagctggccagaaggaattcgggaccaaggttgaaatgaagaacctgaactcctttgaacacgtccgtctgtccctggcttacgaacaaaagcgccagcaggaaatcctcctgtccggtggccgggttcgcctgtccacccgccgttttgacaccaacacgggcaagactgtcctggaacgtgtcaaggaaggggacgcggactaccgttacttcccagaaccagacctggctccataccacatcaagcaggaatgggttgatgaaatcgcggccaacttgccaaagacggctgacgaccggcggaagatctacgttgatgaatacggccttaagccatacgacgcgaatgttttgctgcaaaacaaggaaagctcagacttctttgacgctactgtagcagctggtgctgacccgcaacaagcagccaactggatgaacacccaggttaacggctacttaaacgaaaagcatgctgaactcaaggacattgccttgactccagaaaacctggcagccatgatcaagctgatttctgacgggacgatctcatccaagatcgccaagaaggtcttcgcggaaactgttgccaacggcactgacccgaagaagtacgttgaagaaaacggcatggcgcaattgtcagacgaaagcgtcctggcaccaatggtcaaggaagttgttgacgccaacccgcagtctgttgaagactacaagaacggtaaggaccgggctatcggcttcctggttgggcaaatcatgaagcagacccggggcaaggccaaccctaaggtgatcaacaagctcctcttggccgacctggccagccgttaaggcaggagaaaattttttagaaaaaggtgaagcagatgactaagcgcgcgcgcttgatttacaatccggtctcagggcatcaacagatgccgaagaacgtttctgatattttggatattttggaacaagcgggttatgaagccagtgcattcagaactacgccagctccgctcagtgctcaaaatgaagcaacccgggcagccaaggacggtttttcattggtcgtggctgccggtggggacggcacgatcaacgaagtcgtgagcgggatcgcctttttgcctaaggaagagcgcccgcgcatggccatcatcccggcggggacgaccaacgactacgccagagccttgaagattccgcgcgacgacgtggttgcggcggctaaagtgattcttaaggacaaggtgcagaagatggacgtgggccgggccgacttcggcgacggcagccagaagtacttcgtcaacatcgctgctgctggctctttggcggaactgacctacggggtttcttcagacgtcaagtccgccctgggctacgctgcctacctaatcaagggggcggaaatgctgccaaacctcagcgaatgcgaaatgcggctgacttttgacaagggcgtttacgaaggcaagctgtctctgcttttattggggatgactaactccattggcggttttgaaaagatcatgccaaacgcggaactttcagacggtctcttccagctgatcgtggtcaagccaagcgacccgggcaacctgctccggctgatggctttggctttgaacggcaagcacgtggacgacccgaacatcatctacaccaagacgaccagtctgaaggcggaattgatcggccacaaccgcgacgacaagctttccgtcaacctggacggggaagaaggcggcatgttcccggtaacttttgaaaacttgcgggaacggatcgaattctacgtcggttagaactgttataatagagtttgaccttctgtcagactctatttttgtgtttagaggaaaagcatgatagccaatataaagaaagaattagcaagaaaacggtctctgcagcctctgtcgccagaagagcagagcgagtgggatcagctgcgccagtaccgggaaaaggccattaaggagtccggagccaaattggccgaacacgtgatgacgtttaacgacggggtaattgccattatcatcaccattgtattggtggagatcgcggatcccttgtccaagagtgcctaccaggactttttcagccagatttttatatacttgatttcatttttcgtagtagccaatttctggtatgaaatccactataccttcagtttctatatcatgcgggccggcaagatgaccatggtctgtgactttgcctttttggccagtctgtcgctgattcccgtcatgacaaagtggatcatgggggatttatcggtcttgagcgtggtctgttatgggatcgtctattttttggtccagatttttgaactggcaacggaaattgtggggatgcggagctcactgccgcatatcaagaccttccggaagttctggggtcggttttcccggctgcgcttcatctggctcttcctgctcaatttggtctttattttgatatctttcgtccagccaaggttggggatgattttgtatctggccttcccaatcatcaactttgtcatgccagataaccggagccagcgggcccgcaaaggagataaataatcatgaagaaaaatgaaatcgtcgaagtcgaaatcaccgacttgtcatatgaagccatgggggtcggccatgttaatggcgaaacggtctttgtcaacaacgccctgccgggtgaagtggtcaaggcgcagattttgaaggacaagaagagctatgcttttgccagaatttctgagatcgtcaaggaaagcccggaccgggtcaaggtgcctctccgccagtacgtgcaaaccggcctgaccagcctggctcatttgaagtacgacaagcagctggaattcaagcaaaagcaggttaaggagcttttgagcaaggcccacttggaccagatcaaggtagcggaaactttgccaagtcccttggaaactggctacagaaacaaggcccaggtaccggtcagaatggttaaggggcagctggagattggctttttccgccggcactcacatgacctagtgccgctggaggactttttcaccaatgatccggaaattgaccgggtattgctagcagtcagagatatcttgcgggaaaagcggattccggcctatgacgaagaaaagcatcaagggcaggtaagatatctggaagtacgccgggggacggctacgggcgacatgatggtcgtcctggtttgtctggaccgggacttcccaggcctgcactcggtagtagatgaaattaaggaaatcgccggggtgaagtcgatcttcctcaaccataactcgaagagaaccaatgtcatcttgggtgaacacgactaccatttgtgggggaagagatacattgatgacaagattggcgatttgacttttgaaatctcgccgcagtccttcttccagattaattctttgcagacgccgcgtttgtacaagctggctattgaccaggcaggcctgactaaggacgatttgatagtcgatgcttactccgggatcgggacgatcggtttgtccgcagccaagtacgttaaggaagtccgcggggttgaagtggttaaggcagcggtcaaggacgccaagaacaacgcccggctcaaccagatccacaatgccaagtactatgccggcaaggcggaagaactgatgccgaagtgggcggctgaaggcttgaagacggatgtgatttttgtcgacccgccgagaaaaggcttgaccaaggaatttatcgatgccgcggttaagactggtccaaagaaggttgtctacatctcctgcaacccggcaacgctggtacgggacatgcagctcttgatggaggctggttacacgactgacctggtttccccggtcgacatgttcccgcagacgccacatgttgagtccgtaaccgtcctagaacgtacacaaatcgattaaaatttgctgaagggttggtagggtcgcggtacatgaagtgcgatttagaccaacataatgggatatttgagatgctggttttgtgtctaaaatgagtagactttaatgaattgacttagtccaggtactttttaacacactcaaaaagcaagagtgcaacattttagtagaatatttttgattatttgtaacatgatagtgtagttattacaagatatgggaggagttagatgggatttttagaaaaactaaaattaaataatgagtttccaattatatttatcggatctggcattacaaaaagatattttaagaatgctcccacgtgggatgaattacttcaaaagttatggaaagaggcagagttaaaagaaacttattattctagatatgatgaaattagccaagactgtgattcagattttgaaatatatactaggatcgcagatgaattagagaggaaattcgataagagtttttacgaaggtaaaataaaaattggaaaacttactcctgagatctcccatgacgagaaaaaatcaccatttagatatagaattgcagaaatatattcaggtttagaacttagagataatataaatgatgagcttactctatttcagcaaatgcttcaaaaagctaaaataattgtaacaactaactatgatgggtttattgaaaagcaatttgataataaaattaaggtaaaagttggaaataacggtctatttgaaaaatcgtctaacataaatgagctatataaaattcatggatcttcatcctctcctaattctatagtgattacctctagtgattatcaaaaacttgatagaacatctgccattgtaaatgccaaaatattaagtcagttgaccgagtcgccaattttatttttaggttattcattaacagatgaaaatattagatctttactaaaagatttatccgataatatgccattttcaatagaggatgctgctggaaggataggtgttgttaactatgaaaaaggtctaaataatattaatgaagttatgcatgaagattttggtgttcactatacaaaaatttcaacggataattatatttatatatataaaaaggttgcaaagattgaccaaggtatatcaccaaatgaaattgctaagtatcaggatgcttttagacagataattgatacaaaaggtaaagaaggtcagttaaagcatgtatttacttcctttgtagatctaaacaaactaccagaaacacttaaaaataagaatttagttgtagcatttggagataataggtatttatacaaatatcctgattatgtggattatataaagagttattttcttgaaaaagatggaatgccaatagagattgctatcaaattcattatgaagcaaccaactacatcaacattacctgtatcaagatatctttcacaattaggtaaaggtgtgacattatcgaatcaagaaaaggataaaataaataagaggttaggcaattttggatcaattggagacttgaaaatcggttgtgtaagcaataaatataataatatcttaaaaaagatggatttcaataatcctcaagagctgtttaataataaaattaaatactatttaaaattaaagtactttgctgcacatataggggacttcagccaagaaactgcgttcaacttaataaagtatattttagaaaatggaaaagattctctaattaacaatacagtttgtcgaaagttattcatggcatatagcttgaaatatgaaaaaatattcaataagttatagataagaaaaattaaaaaggccccatcataggacacctatgtgagacctcgaaaaaacaacaaaacgaacattacaacccaatgtcattaagttaagggattgacatcaaaaaagaaccgtattatccaaaatttgggtagtacggttcttttgacttttgtaggattcggaataaaaataaacgtggaagtgtcattagcactcccacgtctttcgtaaacagtagaaatatagtaagcacccaatagcgcggtatctatcaa

SEQ ID NO: 2202 - DNA, 12736 bp, Unknown
  gut microbiota DNA sequence
ttaactaattcttgaataacagcggctgccacccggccgcttcctccggcgataaataccttcattttttctctccttctttttactggttacgggtatgataacatgcatgcgaaaaatctcctaacaattagttagttaagagccacttgtttgcttttgcccaaaagatttcttgatctgctttaaaaagcgttcagcgattggagagaatgtctggtactttttccaaaccaagtataagttggtctccagttttggcgtcaaggagcggaagaccatcccgctttccggggatgtatcgaccaacttgtcaaaagaaagcaggtagcctaaatgttctttagcaaaaactgaagcgttgtagaccaggccaaaagagccttccaggtggaggtcatccatcctgtctttggcccaacgggggatgtcatttttccaggactggccagaacagaaaaggggcaggccagccaggtcgtctacagtgatggattctttttgcgccaatggaacatcagccggcatgactacgccccagctatcggtttccgggaaaattaatgattcatacttgctggtgtcgggcatctccgctaaaacgacaaagtccaggagccccttgtccagcttctcagcaacttgtgaggtgtccccactggtgatgtggtagcggaggtctgggtaaagctttttaaaagaattgatctcccgggccaggtaactgatctggtaggattcagctaagccaaagtagatgtcgccgccggtgatgtcgtccagggctaaaaattcctgttcaattttgtcagccatggtcaccaggtcctcagcccggtttctgagaagaaagccttcatcggtcagcttgatgctgaaggactgtctggtaaaaagcttctgccccaattcttcttccaaggacttgatcgctttggacagggtgggctgggtgacatgcaggctttccgccgcccgggtcatgttttcgtctctggccaccgctaaaaagtagcgtaaggtgcggatttccatttttgcctccttattcataaaaggaatatcatgagatagattataaccattagcacataaaggcgcaagcttttatactaatcattaagtaaggcagaggaggtgcggaatggacttgccgactatcaagcaaagcctggctgacgcaggttgcgggcaaaaattgtccacggaaattcttaggatgtatgagagcgggcaatatgaagacgccctccggaagatgaagctggcaaggtgccaagccatgtgtgagctgcacgaatgcagccgcaaggtcgacttgctggattttttaatcagaagagcggaaaaagagaaaattagctaataatggaggctagaaatgatgcaaactgaagaattaaagctaacgcaagactgggacaaggtctttccaaagagtgacaaggttgaccacaagaaggtaacctttgccaaccacttcggcatcaccctggccgctgacatgtacacgccaaagaatgccgagggcaaactgccggcaatcgctgtttccggtccattcggggcagtcaaggaacagtcaagcggtctgtacgcgcaagagatggcagaaagaggttttttgacgatggcttttgacccatccttcactggtgaatccggtggcaatgtgagagctgtgaacagcccggacatcaatgtcgaagatttccaggcagcggtcgactttttgtcagttcaagacaatgttgacccggaaagaatcgggatcatcggcatctgcggctggggcgggattgccctgcagacagcagcgatcgacactagaatcaaggcaagcgtaacttctaccatgtatgacatgtccagagtgacgggcaacggctactttgacgcgaatgacaatgaagaagcccgccacaagatgcgagtggccttgaataagcagagaacggccgacttcaaggctggcagttatgccaaggccggcggggtggttgatccactgccagaagacgcgccgaaatttgtcaaggattactacgcatattacaagactccgcgcggctatcacaagcgcagccttaactcaaacagcggctggaacgtaacggctgctacatccttgctgaacacgcgcctgttcacttataccaatgaaatcagaaacgcagtcttggtgatccacggcgaccaggcccactcctgctatatgtcaaaggatgcctacgctgacatgattaaggatagcaagtacaccgacaacaaggagctgcttttgatcccgggggcaagccacactgacctttacgaccaaaagaatattattccttttgccaagatgggagccttctttgacaagtacttgaagtaagccttgcatgacggaagaataaaatgaaagccccaaaaataattttttctgctttaaccacgatcagcctgcttgctttttctgcatgcagccaccaagaagaaccagctgccagtcaaaaggtaactaaggtggcaaagcagaagagcgagaagaaaaagtcacagcgaaagaagtcaggtaaaatgcagttatcaattgctaataaagagctgccggtcaagtgggaaaataataagtcaggtgatgcattaaagaggctgactccactgaccatcaaaatgtcgatgtatgtcggctttgagcaggtaggccacttaagcaagagcatcattagtgatgaccggcaaactaaaacaattcctggtgatattgttttatattcaagcaaccagattgtggttttttacggcagcaattcttgggcgtatacaaagctgggacacatcaatctgggcaaaaaagaactgaggaagctgctgagccatggctcagtcaagttgacattgaagtaaaaaagcaaagttgatggacaggagataatttttttattacgttgcgggcgagaaaacttggcatttcaatgccgagttgaatcgcccccttttttgctttagcacgtgaacgttagttcggtgtgtgacataatataaatagctaaaggactaaaatcgctggaaaaaggtgcgactcatatggttaaatacgaattcagaaatgatgagccagatatcatccatggacgaggctacgtatacaacctcaattaccacatcgtctggtgtaccaagtatcgcaaccaagccttggctaatccgattattgtcgattcactcaaggacaagatccttcagatctgccgtgagaatgagtatacggtcaaggctctggaaataatgccaactcacgtgcatattctgctgtctgccaaacccaaagagagcgtgacaaatatcgtcaagaggctcaaaggcattacggccaagaagtatctggaaacgatgaaggaatacttctgggggtggtcacgtctggttaccgagctattacgcaggaagcattggagtgacaaccgaagccgtcgtcaagaaatatattgagacgcaatgggatagaccgtttcactaaacgctaggaaggaggaagcgacatggcaatacgcaagcgcaagtcagatctgccggaatatggagtgaaaatcagattgtacccgactctcgtacaacaagccaaacttagacagtcctttggcaatgaccgcttcctctggaatcagcttgtcagcctctatcaggaacgctacaagaacaacaagaaatcaaaattgttaacagaatttgatcttaacaatctgcttcccgccttgaagaacgaatatccattcctcaaggcaagcgacagctccagcttccaaatcgtgaccaagaacatcagcgatgcctgggaggcgttctttgccggaacgagacgcaagccccgcttccactcaaagcataacgccaagcagtcatatactggcaagtcatccagcatccggattatgggcaaaagaaacgtgttcttgccgaagctgagaagagtcagatcatcgaaaaccggcgtcatcgacggcaagatcaagcgctatacgatcagcgtcgatgcttgcgggcgctattggctttctctcatcgtggagaaaaagaccgccttcctgccaaagactggcaaggcagttggcattgacgtggggctgacgcacttggccatcctgtcagacggcagaaagtttgacaagttctcatcggatttctgcgagaaacaagcagaaatctggcagagcaagtcatccaagcgccgtcatttggctttggttaagtcgcagcaggacgccaacaaaaaggttcttggcacaaaaagcctgtttgactatcgcaactggcagaaagccaatgtcgccaagaaccgctatatgagccgtatcacgaatcagcgcgatgactatctgcataaggtaacgaatcaactggtgaaggaatacgacgtcatcgtcattgaagatctcaagatcaagaacatgacgaagaatcaccaccttgctcgctcaattctgcgtcaaagttggggcagatttcgtgacatgctggaatacaagtgcaagaagtacggaaagatcctcatcaaggtcaatccagcatacaccagccgaatctgctcaaaatgcggcaaggatacgggcaagaagccactgtcagtgcgggaatgggactgcccattctgcaaggcgcatcatgaccgtgacatcaatgcatcaatcaatattttgcttaaaggacttgcccagctctgagagagctgggcaagcaaaaaattgtaccgtcaaacagcagccaatgcggcttggcggaatcgtcggagggggcacttccgtgataaatagactgacctctgtttttgcactgctgttcagcttgctggacagaaccagtaaaaaagcaggcttggcttcggtcaagcctgcttgcaagaataagttggtcgttctcagaagctgtaggctgcgcgtgagcactagcctataaagaacccctcggcctaggttggcggctcagaaacccccgaccttggtcgggggagcatgtcatactgattgcgggaaaaatatccatgttgataagaacgtgttcatcaatattggctgcaccatctaggaccagggtggagtctatattggcgacggggctttgaccggccaccacgctatgatcgccactttgaaccacgaagcaagatccagccaaaagaggggagctgctgccagcagcggttcatatcggcaagagggtttggcttggcgcgaacgtaactgttttgccaggcgtcacgattggtgatggagcaattatcgcggctggcgcggtagtaacaaaggatgtgccggccagaacaatcgcggcaggcgtgccagcccgcgtggtgaaagaaataattgaatagaggagagcagcattctggaaattagggatgctgctttttataatgtgtattttttaaaaaacatattgtttgtacggagaagatgtataatggacttgatcaacaaaagttgactttagtgtgtaattgaaggggatgatcagattgtttacacagaagcaaaagacgattgcctatcgggttttgatggcaatttacctagttgctttgggaccaaactatacttttggctatgcgacgcaagacaatcctactaaccgctttttcttgattgctaatttgctgtcgattgtcgcacttattctggcagctgtttggattgaccggccgaagtttttcaaggcagtgtctgttatgatggtgattgtggctatcttggcagtagttcagcttgtctttccaggacagtcagcttatgcaaggtacagcaacgcttgggcaatcattaatatcatctgggctgtgttaaccgtactttaccaaaagcaacagcttcagatgaagaaacacgcttagtttaatctaaacaccaaaaaggcataactccgttaaatcggaatcatgccttattttttagcgattttttctaacgatactctgttctacagagataaagtgattcttaccgtcaaccgtgtggtcaatcaaggtgaagcaagtcgtgtccttgctgttttctggtaccgcaaggcgggcattgtagccagtagcaataaagttatctgcgatatcgtagatattcttcagcagcagctcttgctgttcatcatcgataccagagaaggactcgtccatcaagatgatcttcggagcaagcggattgctcatcttcttttcgtccagttctaagacgatcaaaagtggttcaaggatcgcccggcttctttgcccttcagagaaggcgttaagcttacggtcagtcatcttttccggggcgtcaccagcatggcggcggaagctgatgttaaatctgtaccatttcttgtagtcaaattcctcatagaagtggtcaaccagttcatccctggtcatttcatcgttattgtccttgatgtaagtccagaagcggtccatcaagagggtaaccgcgttttggctttccggactgtcgatagaagtgttcccaaaagcagccaggtagtcctttctgtagtcaggaatttcactgaagctagtatagaaggagatatggcttgtctgttccttttccttcaaggacttgctgatctgtttagttaaagttgtagcttcggcagtggcctggcggatcttttgcagaatcgtcgagttgttaaggtagcgggccagtcgctgaacctcatcgtcagctgaagcctggaatgattcaagctgctggcggatatcgtcatagagcttgctgagttctaactcctggccaccgtagtagtagtgaaccactgcgatttcatgtaacaagttttggacttgaacgagcaggtagtcgctaagttcaatgtcttcaaattccaaacgcttgctgttgtcgacccgatagtctgttttatcgttaatgctgttaacggcactcatagccaagttagctttactttggttgcttgccttgacttgctcactgttccagtcgttaggggatgcatccttgaccttctcagttaaattcagtttttccaacagatcacttactgctgcatactcatgatccaaatcttcataggctgcctgcttttctggcaagcgctcctggtaggcagtaagatgattgttttctcgctccaacttgaattcgatttcgttaagttgcttttcaagctccttgagcagttggtccagttcttcctttctagccagctgctttttagtttccgggtcatttcggatttcttccagctgcttttcaagagtcgcaatctgagctttaatttcagtcagccggtcttgcttgtcctggacttgctttgtcttttcagataattcagcgtgcgcttgcttgatccggctttctgcactagccagccggtccttttgcttaagcaggtcattttcttgcataatccgctggacttgcttgtcctggtatttgtcccaggccaggcggtagtcggcaaattccttgctctcagctggcaggtctgggcagagctcgctagtaaattgttctttttgccggtggaagtcagccaactgtacttgcagcttttcttgcttctttaagcgtttgtcttgttcagcaagggcattattataagcgatttgtgcttcggtgaccttgttactctttgggaaagtagcaggatctgcttgtttaaacagctcttgatagctggccagtttgtctgccagatccgctaagcgttgcttaacttgattgatttcttccgtcagcagggcaatctgtctttcccgttccttttgccggttactttcaccgatatgggtgactgctgtgcctttctcgctgtgcacattgacactggcataactgatatgaccgtctttaaccgcaatcgcttgtaaaaaggcgttgacccggtcgtcttgactgactaagtagtcggcaagggttgggagatccttcgtacttgcattatttacattggcagtaaaaccatcagcttccaagccagtcttgatctcctgaccatcaaagagggcgtagaggaggttagagtactttaagtcgctttccagttgcaactgaaggtcactcggcacgccttctttaaaatcgaccagttcaaaaagttgattgccgtctttgaacacagctgttgtttctggttttggctgttcttgcagcttttccaagtctgagcttaattgctttaactgggtcttttcaagccgaatgtcatttttggtttcagcgatggcttcttggtactggcctctggcattttccagcagatgccgtctgtcttcataaacgccaaggtcaaattcttccacttgatcaaagctgatttctctttccttgagccagacacttgtttcttgatcaagttcagcaagggcagaggcaatgttatccgtgtagatggtctcgtcaaaagcattaattgcttgatttacaatgcccaactcggtagccagctcctggttttgctcagataatttatccagtttatccaaaagcagcttttgcttcttcagcagttcctttgcatctgggtacttttcttcaaaatcagcttgaacttgatacttggcaagttccgttttggtcgttgccaatcggccttcaaggataacgagagcattcttctcttttcttgcgtcctcggtataagtaagcagccgctcctctgcattcttacggtccttttgggctgcttcagaatctctttcccggttgtttctttcatccttagtttgagcgattttacgtgacagctggtcaaggttcttagcatcaatcacggcctgcagagcttgctgttcaccttctttagcctttaaatcctggctgatacttgcctggtcactcttcagctgggtgattgcttcctcagtttccgcaagactagcctttaatttctcaaactgttcttgcttttggcccagctcagttttagccttgccgtagaagttctggatctgggccagagttggcttgttggtcaaagtttcccattcttcagtcttggccaaagcgttattcagcttgtccagttctgcctttttcttttcttcttcaaccatggccagggcgttgtcgatgaagttttcaaccgttgcccggtccgcgtagtggctgagatttggcagggcagtctttaaagcactgtccaattcagcagtactgccagtttgctttagcggtggcttttcaaaagcggccaggtgctcaaagtactcctgcatctcactttgtgaggcaaagccaaagaagagctggttgatagcattctggtagtcagcctgggtctcatagcgacgttcaacgtagggcttgacggctccccggaattccggccagctggtcgagtaggggaggtcatcacctttaacgccttgctttaagacgtagtaatagtggttggtatttgatccgtcggctgacttgctgtaggccaaaagcagggtctgaagcaaatcatctgccttaaattcggcccaggcaaagccggcttcaccagccttgatgtagtagtccagactccgcttgttgtcgacaacccgcatgctgcctaagaagatcgttgggaaaagggagagcatggtcgcggtcttcccggacccgttttccccgttaaatacaatcgactgggtattggcgtcaaaagtctgatttctgtaattgaaatagttgtagaagccaaagcggttaagcttataattcgtcatcagtcatttcctcatcttttacgattaatccggttaaagaagtggtgaaccaggtatcttgttcttttgtcaaaaggccagtgtcttgctctttagaaagcaggccataataggtcagttcattcaggagttcgcttactttcatcttcaagccagttgctttctgtgacccggtcatggtcttgtagctgctagtttgcttggccaagttaactaattctggcaactgaaagcggctctggcggctgtcattgatcaattggaccagttcaacagacatggcatccagcttgctttgcactgtgttggggaaatccagctgggaataattgagtaggataaagtagtcgtcaacgttaactaagcgcaggccttgccttgtttcatggttaaaaaagggctcaaaagaattctgcaggtagttgtactcatttttgcccatgttttccttgcggaagaagccgtttaacaggagttcttgccgggcaagatcgttagcagtctgcatccctttttccagatcaattgggtcctgcggctttgcctgcttggtcaagacatacaaggagtccttgtcgtcctggtcccgaagctcaataatcccgtccttttccagcttggcgatgaccggcttcaagtacttggacagttccactgaacttgcctctgacagattttctttgtcgttgatgtaagcaacgatgtcctggtagaggatggtcatgccgacttgcaggctggacaatctggctaaagtctcatagtagacccggtataagagaggatccgcttggacccgcttgtcagcttcaatgccaaccggacgggtcttggagtaagcccgtagatgcaagtcctggtccaagaccaaattgaacttatctttcaagtatttgctgatcgctaagcggttctgccggatataagcggtcgtcttgccagccagaagattcggcatgacctggctccaatctatttctgccatctgctttttacctccagtctgcaattgcataaaattaagctctgttttggtgattcgatagtcatgttttccgtttggaattgcttgatcagaagatagtcgccagtcgtagcgctggcacttaacaagtcaccatcagctgagaagcggtaatcaaaatgactttgccccagcagtttttgcaaaaaggcaaactcttcatcagtcaaattaattaatgctttattgatcagattttgtcccagttctgcctgcttggctttttcagccgcgtgccgtgcttgttcagctgcgagttcagctttttccttgtccgtcagttccatggaccgggcaagtttgacttcggcccgctttcgttctttcggtgtgaagttgtagtgtatcttttcatcatctaggctgtaactagcatgtttggacatgaaccagtggtggtagacagtcgtgccttcatattggtcaaaaaggagggccatttcctgggctgtcatgccagcttgaaagctctgcgcttgggctaagaagcgttcagcccgttccttgctgacctggatttcccggttttgggagatgaggtcaatcaaggcaaaaaacatgtcgcttaaacggtctaaaaggctggcgtagaggccgctgccatcccgttcgctttgggcaatgtctgcaatattgccagccatgatgtcggacaattcatcactgcttttggtagcgttaaaggctagcagttcagcggccaggggctggtagaagagtttgggaccaatctttgtctggctttcctccaaggcgaaaattgtttccaggacttctggaatcttactttcaaccttgtcgagcacttccttgactacgtctcgcagtttaaacaactcctggttcaagtcgccagtggtattggcatcagtctccaagcggaagacctgcatgtttaggtcgtggatgttggtcgcgaagctgtcgatccggttcttcagccggttgtagataccgttgttgtagccaaaagacaagtcataaagggagataccgtctttaaaaagctgctgcttcagttccaaattctctggatctgtcagcagtccttcaagactttcctttaattcccgtaaattcttgatcagttcatcggtttccgtcatggacagggattctctgatctgcttttgcaggttggcaatcttgtcaaaagcctggaagagctccatgctttcgctggttaaggcataagccgtggtctgcatggcctctttcatcgaccgggccttagcctgattggttaaagggatcgactttaagtttttgctttcagacagcttcttaaggaccttagtgacttcgtcatagtcagctaaaagctgctcgctaagctggaggggagtgtattcccccatggggtggctgtttaaatagatgattatgtcccgggccaggcctggtgaggacacggcttttaaaaatccgtccgcctgggacatgaagctctggttgtcataaaaattcatggatggcctcttcaaaaatcacgcgttttttcttctggatctcagtcaatacttcctgcaaatctggattttctacttccttgatctgcttgtcttttaccggggggacactggcttgatagtgttctttatagatcttcagatccatgttgagaaggtgaatctctggaaattccaataaaagattgtccgcgatcttaatcccgctctggtccaaatcgccagaatagtagagctggcaagaatttgcgagcaggcgcttgatcagctttttggtggcaagattgacctgtccgcccgtgcaaacgaaggcccggtctgaaaacttgctggctagtgcggtggtcacgccagaattttcatgcatgtagaccttgatcttttccggtaaagcaatttggtcaatgtccggtagggcaataatgtcgtaggtcaagggagtatccagcagattggcggtcatcgcgaagttgtagagctggtcgggatagacgttgaagtcctctaaggttccttcttcacctagctgggcttggataattttttccaaaagcccgcggcccc

SEQ ID NO: 2203 - DNA, 26158 bp, Unknown
  gut microbiota DNA sequence
aaaaagaaaattgtttttgttttacagctgattgctaatgtttactttgctacctggcctttgcgcttgattgtagacaattctcccaagtggcgcttgtccggaccagccaatggctttttcggcttcatggaccgggtagccaaaagtgtttcctggccgctcttcctggcctacctgcttttgctagtgatgatcgttgtggccgctctttggacttacttctttgaattcaagcaggacaaggtaaaacaagcttggcagaagcttgtctggtttttgcagctgatcattaatgagttagcttgcctgggtttggcctcgtcactgactatgcaggtttatgatagtcagcaaacatggacaattatttttgacctgttcatgctgtttatcgtagttatttttgcttttgccttgacggaaaaatttactaatcgcgggggaaacaactaaatcgcaaacgaaaaagcagccgtgaggctgctttttgcgtgtaattaaatttgcgggccacggaagttggctaagaacttctgggtcttctcgctttgcggatggttgaagatttcatccgggctgccttgctcagccacgtaaccgtcgctcatgaagaggacctggtcggaaacttccttggcgaaggccatttcgtgggtaaccacgatcatggtcaaaccagtcttggccagcttcttcatggtttccaaaacttctccgaccatttccgggtcaagggcactggtcggttcgtcgaagaggaggatttccggattcatggagatggctctggcaatcgctactctctgcttctgcccaccggacaattgacggggcttagcgtcgacgtagggatccatcccaacggtcttcaggttctccagggcaatcttcttggcttctgcctttgaccgcttcagaaccagttcctggccgatcatgcagttttgcaagacgttcttgttttcaaaaagctcaaactgctggaaaaccatgccgaccttggaccggtagcgggggatgttgtagttttcatccaggatgttctggtcatggaaaagaatttccccgccagttgtatcttccagcaagttgatgcagcggagcatggttgacttaccgccaccggaaggaccgatgaccgtcataacctcgcccttgtggacttcaaaggaaatatccttcaaaacttggtgttcaccgtaagccttttgcaggtgctgaacgtttaaaataatttcattatccttgtaatcagccatttttcacttgtctccttcctgcttgccgacttgaacttggttggccatcatgttgtagttttcaggaccttcgatgtgcttttcaatcaagttgaagatccgggtgatcgtaaaggtcaagaagaggtagatgaccgagatgaccaggtaggtttggaagaactggaagctctggctggcaatcgttgaaccaacgaagaacagttctgatactgagatgatgctcaatacggaagtgtccttgatgttgacgataaattcgttggtgattgacggcaggcagttccggatagcctgtggcaggatgatgctccacattctctggttgtgggtcatccccaaagcactggcggcttcaaactgccccttcggcgtggagatgatccccccgcggataacttcggccaggtaagccccggtgttgatggagacgatgatcaaagcggcaaccgttctgttcaggttgatgtgccagaactgggcgatcccgtagtagataaccgcggcttgtaccatcattggcgtgccacggaagatttcaacgtagacggacaagagccacttgcagaaggctaacaggcccttcttgaacttgttctttggttctggaatagtccggacgatgccgaccagcaaaccgatgaagaaaccggcgatggtgccgaccagggagatcaagagagtcatcccgatcccttccaggatcatctgcccgtagttcttcagcatggaaaccagccagttttccttcttggtgctggtctgcggctgctgctgcacggcttccttcatcagcttgtttctttctgaagtggaaatgccggccaaaaccttgttaacctggctgagcagctggtcgttgcccttcttgaccccgatggaaacttccgcgtcagaagaggagaccttgaagcccttcatcttagacaggttgaccccggtaatgttggagtccatcatctggaaggaagtcagttccgtgtcttcagccacgtagccgtcgatcgtgccggcttccagggattcccgcatggcggcaaagtccttggaggctggttcccgcttggcccctggcagctgcttgatcaggtcgtagtgcagggtcccttgctgggcagtcagcttggctcccttgaagttagtcaggtacttggccttggcgtacttgctatgcttgttgacgatgaccacgaagttggtggtccggtatgggctggtaaagttgatggccttccgtctttccgccgtcgggctcatcccggcaatgatcaagtcgatcttgccactggtcagggctggcaaaagcccgtcccattgggtcttttccacgataaccttcttgcccagcttcttagcgatgatcttggcgatcttgacgtcgtaaccattggcgtaagagctggtcccgtcgatcttgaccgcgccgttggcggacgtggtctgggtccagttgtatggagcgtagttggcttccataccaatcttcaaggtgccgctggcttgcgccggctggctccaactgacagctaagacaagcgtcaggaccgccgccattaaggcgctgatccagctgctgtgcttcttcatctgaataaacctccgatatgcttttagtagttatgaaatacaataaaaagcggcaaaaaagccccattgcggtatgcaatgaggcttgctttgattctgtaaaattcagtatgaataccaaaaattatagcgctccctagaaaactaggacagtctgcagaatcttctcctgcagcccaaccaacagcgcgcacgaccccactgctgatttcggcgatatcccttaataacaaggctcaacactgtcagtgagctccccttgtgtttgtgaacgatcgcgacctctattgtattggataatttttaactacatttaggctaaattacttttaagaaaaagtcaagaaaaaattagttttctgaatttttgtgattgcccttttcttatttacagccagccgtgatcatccacccagtcccgtttcttcatgccagagacgtaggggttgccggccacataatagcgcagaggcgcctgggcccaggccgggtcagcctggacgatcccgattctgggcgaagcaatgatttctttagccggctttttctcagtcaagtcaataacgaaaggggagtccgccaaaggggccaggtcccagtttcttgacttgatccccatggcctgcattaatttggccggtccattggtcaaaagaaccccgtctttgccgccccggtttttaagcatttggtctaggccccagaccggctcaatggcccggattaagaccccttgggggttgccttcttcctggcaggcgatgtcaaaaaagacgtactgccgctgggagtagatgtagatggtcccgccggcccgccacaggccctcgttagcctggcttcttctgcccccgtaggagtgggcggcccggtcgtatatgcccaggtaggcttcggcctcaacgatatagccgccaattttttccccgccggcttgataataaaaggggcggccgatcaaatcccggcagatctcgctggtgggccggccggtgaaaaaattcctgtagtccattgcttaattaatctttctaactaaaatagggaatgtagtaaaagctgtaataaaaactgtttttaagagaaagcgtgcgcctatgtcaacgatcaaaactgtccgtatctatgccaaagagcagcccgccggctaccggatcttagtcgaccggctctggccccggggaatcaaaaaagaagccgccaatttagacgagtgggagaaagagctggctcccagccgggacttgcggacctggtttaagcatgacccggcccggtacccggacttccgccaagattacctggaagaattggcagacaatccggaatggccgcctttcgtggagcatttgcaagagcttttgcaaaaaggggacgtcctctttttgtacggggctaaagatgaagaacacaaccaggccgtagttttaaaggaggcagctgaggaagccctggctaaacttgcttagtggtgtatgacgttcatttttagcatacatatttctattgagaagtactaactgaggattggaactcagttagtacttttcgttttagatagggtatttatcttgataggagatgccccttgaaattacgcaagatttcaatacccctttgttgatattggttaggaacaaagctttttcgcattgctatctgcatgtaggcgtacattttttcggtatttttaaggtggatcacttttaggttatgattagatttaagactgctgtccataacaaaagcaattcccatgttttcacgcactaaatcaatcatcagttccatcgtttttgatgtatagatgatattaggcgtgaaatttcccttatgtcctagtatatccaacgattctctggtcaaatagccaggagaacgggcaataaaacgctcttgagctaagtctttggctgaaacagaatcgtattttgctaaaggatgatttggatgagcgataatcactaattcagttttatccagtgtatgaataaaataattgggatcattgatggggaaattccaagaatagatggctacatcaatcttaccagtttccagatttttaaaagaggctgctgagcgctcatagtgttcctcaagtaacgataagataccggcttgataaaacttgtggacaataggcggcatataaacacctccagcttccccagaaaaggcaatcctaattttgcgctcgctagaatgcttaatatcccggtcaaaagcatcaatttctttgagcaaatactggcctttttggtacaagagttttccagttgaagttaagtgaaggcttgattttcgatttttttgagtaaccaagggatcgttgtattccctagccaagcgtttgaccgctgtagaaatggttggctgtgtaactatgagttgttgagcggcaagtgtgtagcttccacagtctaccagggtgcaaaagtattttagatcagtgtaatttgccatttataaatcccgtctataagtacatgatagataattatagattttaaaatgaacaaagtcaatgcgggcttgaaataaaaggctttcactaacgggaaaatgcttggattgtgaaaagtgtgatgatttacaaaaaatataaacgctgtatatttaaatcatcaagattgaaacaggagaaaaaagatgttttataacgacagactaaagtgggatcttgcctatgatgtgattgttgttggttttggtggggcaggtgcttctagtgctcggtttgcagctgatcatggtgcgcaagtattactgattgattccgcaccagaaggttcagaaggtggtaatactcgttatgctggtggtgcttttgcttggggtaataatttcaataacttgaaagattactataaacaaacttattatccctttaagtatgatccaaaggttttggacgaatttatcgagagagtcatggatatgaaggaatactctaagaagtatttcgacattgaagcaatgggaactggtcgtcgtcctaatggggagtatccagaatatcgcaatgccaattcaatgcagtcacaaagtatgacaacaggaatgtacaacggtggtttctggaaattactccgtaagcaagtaatggatcgtttggacaagattgatgtctggtatgaatcaccagctgaacatctaattcaagatccagactctaagcaagtacttggtgtgcagattaaacgtaaaggactaaaagttaatgtagcggctactcatggtgtagttttgagccttggtggttttgaaaataatgaagatatggttcagaactttttaggacagggttcattggctccaattggtacgctttacaaccaaggtaaagggattgacctggctgttgaagttggtgcccgtttatggcacatgtcaaactatgactcacatggtttctcattaagaaatggagatgcccgtgaaaagtttgcttacatgatcaattggaagtcgctttttaacggtagtatttttgtggcaggcgatgatggtactcgctattaccgtgaagatgaagaagatcgccatggttacaagtataatcatggcaactggatcatgctgccaaatcagaatcatccgcacattgtcatggataaagtacaatttgagcagcttcaaaatgatgattcagctaagggggatcagattcgtgagctgattagctatgcaatcaaggctgacaacctggatgaactggctgagaagatttctgcacctaagttatctgaagcagtggatgactacaacttcttggttgatcaaggtagagatatgtttttaaaccgtaagattgaaacgatgcgtaagtttggtgtagggccgtattatgcaattccgattcgacataatatcttacatactcacggtggcgctagaagaaatgaaaagtgtgaagtaattgatatggcaggttttccgatccctaatctgtatgaagcaggggaattaggggatatctttgctacgaaatatattggtgctaatagtattgctgacttgctaatttcaggtgaaatttctggtacaaatgccgccaaaaacattgctcgttttaagtttgaaccacgttacaaccaatttacaaagccaaatgactggaaatctgatgctggtactagtatcgctgactttgaagctggtccacgtcaaggtattggtaccagtgagaatgggattagtgatactccgattgttgtccgtgttactgctagtgaagatgataagctcgcaaaaattgaagtcttgcaacaaaaagaaagtccatcaatcggtggcaaagcaattccacttttgactaacaagatgctggttagtggtgaaacttctgtagatgcagtttctggtgctacaacaacaagccgggcatttatggatgctgtgacgagtgcatttgagcaagctaagaaaaactaagataggagaaactaaaaatgttgggtaaagtaaagtggaaggcatgggctcttccgttgattttaggcgttggcttgtggctctcaacgccattgaaaccagttgcgattagtgtcgctgcttggcatctgtttgcattatttgtagccacaatcgttgcctgcattaccaagccgctaccaatgatggctacaacattgattgcgataacaattgctactgttactcgcctggtgacaatggaggaagttgctgctggttttggtaactcaactgcctggatggttgctatgtgcatgtttatggcaactggttttattaagtcaggtttaggtaagagaattgcctatctgtttgttagattatttggtaagaagactttaggtcttgcttatgctttgtctttagtcgaaacagtcttggcaattggaattccaagtaacaatgcccgtgtaaatggtattatgtatccgatcattgataacttatcacatgaaatgggttcaagccctgaagatggtactcaagataagatcggttcattcctggttttcaacgaatatgaagttaatattattacttcaacaatgtttttaaccggactggccggtaacatggttgccttaggtctggctaaaacccaaggtatctcaatttcttggatgcaatggtttattgcggctattgttcctggtatcctttctttgctgattgtaccgttagttctgtacaagatttaccctccaaagattaaggaaactcctaactctaaagaatgggctgataagaagctgacagaaattggtaagatgactgctgctgaaaagatcatgatcgtagttttcatcttatcaatagccctttggttgattggatcaaagattggtattgatgctaccgaggtaagttttattgctgttgcgttgcttttgatcactggagtgattgatactaaggacttgctaaaagacagttttgcttggaacattttaacttggctgtcaattatcatgttaatgtctaataagctgatgattcttggcttcttcccatggttttcaaaggcatttggttcacttctcggtggtatgaattggatttgggttctggtagttctatttattgcctatttctacttacactaccttttcccaagtgtttcaactcaaatttctgctctctatgcaggttttctttcaatcgctttaggagctggtgtaccaaaaattatggctgcattaatgctggccttctgtggttcaatttatctatcaacttcaagctactcagctggtccagccgctatgctctcaagtacaggttatgtttccaataaagattggtggaaacttagtgcgattatcggtgctattctaattgtaatttggctaggtattggtcttatttggactaaggttattggattctggtaagaatatggaaattgctcatcattttggtgagcaatttttaattcagtacaaattcttgtgtgaatagaaaaaataggccgtaaaaaaagaagggttatctcttacatgccagtaagagcccttcatatctaaattatatagaattagttagtattagcttttagtatatttctcttagagctaacaattgctgagacaaccaggccgtagttttaaaggaggcagctgaggaagctctggctaaacttccttaaagacctccaaggcgtcaccggtcagctgcttgatcccttgtgccgggatctcagtcaagttgacggcccagattttggcgtcttttgccgcgtagcctaagagaccggcgaaagggtagacaacgaagctggtgccgacgatcacgaccaggtcgctttgccgcatttccaggatggactggttgacattggccgggttgatgccttccccgtaaaggacgatgccgggccggatgatcccgccgcactcgtgcttgtagcccttggcgtagtcctcatagctgaccttttgcgtgcacttggagcagtagatgtcgtagaggttgccgtgaaattcggtcacgtgctggttgccggcctgccggtccagggtgtcgatgttctgggtgatgagggcccctttttcattgcagatggccgcgatcttttcgtggatcagatttggcttggcgtccgggaagtacatgttttgcatgacgaagtcataaaaaagctgaggccggtcataaagggtctcctcgctcaagatgacttccgggggctcgctgaccccgttgtagatgccagtcttagaccggtagtcggggatgccggagtgggttgacacgcctgccccggtcaaaaagacagggtgcttggccttttttaagtctgctttaaattccgcaagttttgcttggtccattttttgcctctttcttaaaaaatggctgataccttttgatttcattataagcgcttggtttgctataattaagctactagttgcagaagatattatatttgaggtgaatccatggacgcgttattttatttggtcgccgacaccgtgctggcggcctatgccggctacagctggtacagccaggccacggtgatcctgcgggcccgctggcggatgacggcggtggtcatgccgatcctattggtctggctgggggccagctggggatacctggacctgggaactcccggcttcatcgtcttcctagccctcttcattttgacggggatcctggaagccacgtcgggctttgctgacaagcgggtggttttgagcggctacttccgccggactttgaaatacagcgaaatcagccaggtgatcctgaccgcggcgccgccggaagtgggcgacctgtcgatcgcggccctggaaaccagccgccaccaaatctactacctccgcttcaacaagcaggccagcgatgtggtctctttcttgatgcagcgcctggaacgcggggtaaatattgacgtaagaaaaatgggttagtcgagtgactaacccatttttatctgctctaaatttctgttttcttgttttattttctcttgttcttttttacaaaatcggggacaggaggcgggagaagttctgcaggaaccgcagccagtgggactgcttcttgatcatctccggcgtgaggagggtcgactgctccatgtccttttcaaactggtcggacatctccttgttaaaggcccggtcgtagacgaagacattatcttcaaagttcaagtcataagaccggtagtcctggttgacgctgccgacagtcgcgtacttgtcgtcgacgataatggtcttggcgtgcatgaagccgttgttgtaggtgtagaccttgaccccgatcttgaccagctggttggcgtaccactgggttgcccggtagatgaaggggtggtccggcatgcaggggatcatgatccgcaggtcaactcccgagctggccaggatctgccaggcggcaatcatggcctcatctgggatcaagtaaggagtctggatccagacccgctttctggctagcatcatcaagcggactaggccgtttcgcatgtaaggttcgtcgttgtcggggccgtcagaaacaacctgtacagccatgtcgcccttggagatgtcgttttcatccaggtcaggaaagagcttttcgtcaaagctgatcagttcttcttccttgacggcggaagcgttccagtccatcacgaatctttcctgcaaaagcagggaggctgacccgaccaggcggaggtgggtgtcccgccagtagccgaattttttcttcctgcccaggtactggtcgccgacattgaagcctccggtccaggaggtaaccccgtcgatgaccacgatcttccggtggaggtggtagttgatccggttccgggaaatcatgtttcttgaggtgatgaagggcaaaacgtcgccgccggcttcagtcagctggttgaaccagctcttggaggctccgaatgacccccaggcatcgtagaggacccggacctggaccccctccttggctttttggatcaaaagcttgagaaattcgttgccgatggcgtcgttatagatagtgtagtattcgacgttgatgctggacttggcctggcggatatcggcgaaaaggtcccggaacttgtcatgcccgtcggtgtaaagcttgagcttgttgtttttggtaatgggcgactcttggtccttgtccaggtacttgatcaagatgtgggcgctgggggaggtgtcgttttggtcaatttttgccggggcctcggtgatcattttttgcacgttggagaggccgatgtgcttttgccggttgatggcaaaaaggttttcctgggaaatcccccggccgacgaagccgtagatgatgaagccgactacgggcaggatgatcaagacgatcagccaagcccaggaggtggccacggaccgctttctgtggaagacggtccagagggccaggatggcgttggcgaagaagatgatgtgccaaatatcgatccaagagatggcagtcactttaaagtcctttcttgattttatctaagcctaaaaaacggttcaggatgccgatgacgaagggctcgtcatgcatctgcgagtgctcggcgttgtcgccgcggacctcgacttcctggtagtagaccgcgtccggggccaggatatagcggatgcttttggcggaaaccacggagataaagcggtcggaattggtcgtgtccaggacgttgccgtagatgttcaaaacccggatgctggggctgaagtcccgccggtggcggagcatgtaggaatagtgcggggtcatcatgctgggccggccactttccgtcaggcggttgacattggggatgtcgcccaggtacatgactccgttgaaggggccggcgatcaaagcgcagctggccaggtgggggaagtttttccgcttggcatagcgcatttctgtagcgaccacgcagggcgagcccagggagtgggccacggcgctgtagcgcgtaaagacgtattttttgctcagaaaaggcaggatgaagctgagatagtagttgatggcctggtagccggcaatccggtccttgaaggccagctggatgatgggctgcttgtcgccggtatagcatccggtcagcttgatccggccggttaagtcagcctcgactttcaaaaagcgggcgtcccctttttgcttgagggcgtcttcaaccatcaccctggtggtgtagtccccgccgcggaagccatggacgtagatgatcggaacctggtcagagcccctggcctggttttcagccaggtcgctgacccgcttgccccgcagcttcagaaagatccggaaaggcggaaaggttgccaggatgcccaagaagaacatcatggccagggagtggtcccggggatcgggatttttgccgcgctttttttcagtttcttcagcatactttttagaattaaaaaagagcacagtcgccccccctttctctgatacaattgctttgtaaatatcataccattttagcagaagagagggagtagatgaaagtttatgttgttaaaaaaggctaccggccaggaatctaccacagctggcctgaggccgaagagcaggtcaagggctttcccggggcagaatacaagtccttcagcaatataatggaggccctggactatcagcagatggacccggaagatgcccgcaaggccttgcagggggcagaggacaagctgcaggccgcgatcgccaaggtcagacagggcggaagcaagaaaaagcaggctgaaaacaaaaaagaatttgcggcaagttcgaagtatgccgcccacatttttaccgacgggggctgccggaacaatgggacccacaagggcgggcatgtgcaggcagacgacaaggcagcctgggcttatttgattgaatacggcggccagaagctgtccgccagcggcggccgttttggggccaccaacaacgaaatggaaatgaccgcttttttggaaagcctgaagaagctggaagaactgggcttaaatgaccagcccctcttgttctctttagactcccagtatgtcatcaaggccgtcagcgacaatgaccagggtccggcctggatcaagggctggcagagacggggctggaagaaggcggacgggtcacccgttgccaaccgcgagctctggcaggagattgccaaggaaatggccaagtttgccaagccggaatttgaatgggtcaaggggcacgccaatagtgccggcaacaattttgtcgacggcctgctcaacaagtatatggaccagatgtaaggcagagacagagaaagcccgcgcttggcgcgggctttttgcatgaatatttgatttttcagatatcgtccagcttcaattgcttcattacttgctaaaactggagaagaggctggtaaagaagttgacgatggcgtcccagagcttctgcagggcgttgcggttttcgctggtgttcagcttggcaaagatccccttggcgctcttctggatggcgctcatggcctggctggcctgctgcttgaaagaagaggagttgagggcgccggagtcccggatctcaaccaggatgttgacgatctgctgcttctgttcgttggtgatcacgttggtcagattgttgttttcgatctggttgttgacgatcgtgatgatctggttcttggtgatgtttgagcctttttgggccatttccttcttggccccggccacggcattgttgagctgggcgtcagagtagccgtccttgcccttgttttccttggtgatcccgcttaaggtattcaattcgtcttgggccgcggtgatctgcttctggttcagcttctccccgctcttggcgtaggccttgtagatcccggccagagcgccggaaccatcgatcgggatcgcggaagtgacgtagatgttggcgtcagtgatcccggccgttaccgccgcgtttcggtactggttggcggtgatggtagtgatgttgttttgcccgttgtagttgaggatgcggacattgatcccgctgccggagctggttttttcaatggcagcactggaccagaccccggaagaagaggtaaaggagctgccggacgggttcaggtaggtaaccaggtcgctgcccgttactgtcaaggtgttgtaactgctggagtcgctgagggccccctttaaaacgtctagggtgccttgcttctggctggcagttaatgacgtccccagggtaataactggggtggtgtctttggcggcagagaccctgccagccgtcaagcccaggcccaggaagagggcgcaggccgtaatgattttcttgattttcgtgttcattttgataagtctccttgctttctgttttcatgctccgcctataattatactagagtttgttttgggggtatctcccttagcaaaaatttaagcaggccccggctggcggcagattcctggcgaagatgatataatgaaaaggatagatttggagaggggggatgcggctttgcgagcgaatgccgacttgaagctgacggtcatcatgactgtttacaaccaagagaaatacctggccagagccttggactatttgcttgagcagaagaaccagcagttcaagctgctggtcattgacgacggctcgactgactcaaccgcggaaatcgcggccagctaccaggaccgcttccaagccttcgacctggtcagcaaggccaatgaaggggtggccgctgcccggaacttaggcctggacatggttgatactccgtattttatttttcacgatggagacgactgggttgagccagactacacggactactttatcaaggcttttgaccgccacccggacgatgacatggtaacctgcggctattatgtcgaccaggcagggaagccgtccgtgccgattactaaaccggttgagggggaattgacccggcttgaggccgtgttaaaggtcttgggcagtgcccattcgccggttaagggctatacctggaacaagtgctacaagacccagctggtccgctgcctgcacctgcgttttaacgaggacctggacttgatggaagaccaggttttcaatattgactatctgatgcagacggaaggctgctactacagctccgtgccgctctaccactactggcaaagaaccgacagcgcggtgcacacggtcagctgggaccacttctggagcatcgtgggggccaatatttcgatttacaagagcattttttctcacttgtggcagaaagtcctcagcaagcggccgcaaacccaggaatattatgtaagggaaaggatcaaagatgatcatcaaagttaatggagtcgatctttactaccaaaagctcggtcagggccagcccctgatcctgctgcacggccaccacttggacggtggaatgtacagcaaggtgatcgcgcctttgtcactgtattacacggtctataccctggacatgcgggggcacggcttaagcggcggcgacggggctgagcactaccagactgaagtggaagacctggctgtcttcatcaaggagctgggactggagcagccttacgtctttggctatgactccggcggtctggtgaccctgatgctggccagccagcagcccgatatcctgggcaaggcggtcgtggccggggtcttcatcgacggccgggggatccacaagtaccactacttgactgaaggggtccggcgctttctccgctttgaccgcgatagccgggtggaacttaccgaatcctacatggagccggaaagcctggagcagatccagattcccgttctctgcgtggttggggaaaatgactgggtcaaagtcgaacatgtccgctggtacagcagtttgattccaaatggccgcctggccttgatgccgcggcagacccacgattcctacgtggtagacagcttgaagattttagacttgatcaaagatttttgcaaggaataatgagaaaaaggccgatcaaagccgaacctttgctataatgttactgtagatacaatagattctgttaatgagagtgtttctaaggggctcatgatgacatcaattacaaaagaagaaattcataagttgctcaacccgatgaaggtgatcgggctcggcggcaatccgcaattgaacgaaaaggtagccagcacgctgggcgttcctttgatcgaaacgacggttcaccacttcagcgacggtgaaatccaggtcaacatcgcggaaagcgtccggggctgtgacgtcttcgtcatccagtcaattcaagatccggtcaatgaaaacttcatggaactggaaattgtcctggatgccctccaccgggcttcagcccacacggttaactgcgtgatcccgtacctggcctactctcgttccgacaccaagacccggtctcgggaaccaatcacggccaagctgattgccaacctgctccagctgactgggatcgaccgggtattgaccatcgacttgcacgcttcccaaatccagggcttctacaacgtgccggttgaccacctgcacgcgatgccgcttttggcccaatatttcctggacaacgggatcgcggttaaggatgacgacgacgtggtcgttgtttcaccagaccacagcgggaccaagttggcccgggtcttcggccagtacttcaacgcgccgatcgccatcgttgaccagcgcggggcccgctacgatgacagcgtccacggcatgatcggtgacgttaagggcaagaagtgcatcatcgttgacgacttgatcgacactggcacccgcctggcttcatcgacccggtcagtcttcgctgccggcgcgaccaaggtttacgcggctgctactcacgccttgctttcacaagacgcgatcaagatcttgaatggcttaccgctggaacaaattgtggttacggataccatcaagcatgaaaagtatcctgaccggatggtccggatctcagttgaccgcttgctggccaaggggattgaccatatttacaacgatcgctcaattcacgatatttttgatgaacaaaaccgcttcaccaaagactaaggcgcgataaaccgggagaccgctagcggtctcctgtttttgtttattttgttttttggaatgtgacttaataaaataataaaaataacagatttgggtaaaagcgagtgttattgctgtaattaggcaaggaaatcttgctataattttattaacttttacagagaggatgagatgatcgatggcaagaagaaagaacatgcagagacggcgggagatcttggacaacacctttcgtttgatcagagccaatggctttgaccatgtttccttgcagatgatcgcggagaattcaggaatttccaagtctctgctgcagtcttactacccccacaaggcaagactgatgactgacattgtcagaaacctgttcaatactatgtgggaccaggtagaaataaactatcacgcgccaaagaagaaccccttcacccgggtggacgctttaatctacacgatcgcgactttggggatgacggacaagggcctggaccgggtaattacggaggcctttactgaccagacttctttggacaactggagccggatgctggacgaatggatgaagtcccacaatgctttttccgaatacagcaactaccaggaaatccggaccgggattgcctttatcattacgggggttggccgtttgtatcgtgaccgggaaaagcacggtcttaacgccgaacaaatggcggactactcaaccagttccctgatgtacggctttttgcacgcggattctgcggaaatcgacgccgtattggaagaaggtcacgggatcattgacgacagcaacatcggtgaggtccaccacgcgatcgacaccatgtttgatgaaggcaaggtaatttatagttaggagcaagcgcatggcagaaagttccggaacgcacagacgaaggaacaactatgaaatcgtggacaacgcgttagaatacaagcgtcccttggcctttatagctttcttattgctcagcttgctgctggccacgggaactttcctgaatcctgcttttatgaaggagaccatcaagaccgacagcaacacggtcgtgatcagccagcaggtcaacagccacttcaaccgcctggccacaatcgtcaacgggtccagcgatgaaaagaacttgatctctgatgaccaggccagggaagttgccgacttgatcatcgactacaagtatggctggcactttatccataccagcaatctggacctggctaaagacatcagggccgtgatcttgaagaaggagcagacggataccgaccaggtgaccgctatccgcaagaagctgaagaagcagagcgattcttcagtctacatcgtcagcaatgcctttgacctggccacggtcatgttagaggccaacttgatcacgatcatccggatcgtcaacctgctggtgatcctgctctgtctggtggccgtagtctcgattttgcgggaggcttttgccagtcacaccaagcgggcagtggttcacgacatgacagccgggctgatgtggaccgccttttggttcatcctggtttacgggctcttggccatggtgccgatctttatggacacttcggtgattaccgtggcggacctgggctactggctggaaatcgccagcggggtcttcctggacttcgtgatcgccggcgttattttatacgtggtcagtgccattccatggcaggcgacttcaagatagtaaaaaggcaaagccgttgggctttgcctttttagtttgctatttaaggatggtgatctgcttgcctttggcggcgatgtagccatccttttttaatttggagaactcccggctgagagtttcaggggtgatgcccagcaggctggccaggtccttcttcttcaagggaagggtgaaggtggcggagccggcttcgtcagcgtagtctttcaagctggcgtagaggcgggggccagcttccaggctgttgcggcgcatggcgttcttttgcgcgctgaccaggcgctggccgaattcatttaagaggtgcagggaaagctccggggacttgagcagaaggtcctggaagtcggaatagttgatggagcaggccgtgctgtcttccagggcttcgatgaagaggtcatcgttttccgtgtcaaagaggttttcctccccgttgatgtcgccctcctgcatcaagctgaggacctgctcatggccgtcggggctgaggctgtagaccttggcccggcctgagtccagggacatgactgacaggcggccgtcgcccggggcgtggatcaagctcccttttttaaaaaactgctggtgggtcgaaatgtgaaccaagtcctggcgcaggtccagggggaggttcttaaaaatcggcacgtggctgatacaatttaactcgtcgtgttggtgcatggttgtctgttttgctttaacttatacttttacttgtttacttcttcttgctagatttcttattagactttttggcagctttcttactggtctttttagatttagccttagctttcttactagatttttttctagacttcttactagactttttcgcggactttttactagacttcttgctagatttcttactagtcttcttactagttttctttgtcttgctggtcttcttgactgccttggcattggtgatcttcttactcttgacggtggagatgttcttgccgaccttgtagaggtacttggccaggcccttgttttgcaggtccttctggctgaccttgttcttgctctgggtgctggaagaggagaccttgcttgaataagtctggctgctgctctgcttgaagagcttgaagctgtaagtggccaggttaccggctctgaccgtgtacttgtggccggccgtcagctgcagcttgcttgggtagtaggtgatcacggtctggaagttgccaaagccgtactcgctgtagttggccacttggctggcggtgaccgtcttgccggtgtcatcgtcagtaacggtgatcttcggggttgaggtcacgaccttgtttgaaaagtataaagaccaggcgatgttttgtccatttaaaagctccagggggaagaccccggcatttggataggctaccatttcccggctggcagttcttgcgctgtcgcccacattcaagacctggttgactgagtagcggtagccgttggtcccgtaagctgccccgactgaaatcttgcttaagcgggtggaaagcagccaggcccggtggccggtgtcagaacccgacagattatagcggtcggtcaagaggtcggtcacgacgtccccagccgtctgcgggctggcattgaagttgaggttggccgagttggaaacgtcctgggccaaaagccagttcttcttggaaatgtagcttggccgcttctcatttggcagcccgtgctggttgacgaacgggttggcattaatggcggccatgacggcggccgtcgtctgggcattcttgttgccatggcttgttgtcttgacggcagttaagccgaagaggtcacggtagtagttgatgtaggcgacttgctcgttgatgtagctagactttaagctgcccgccttgaacttcttcttcaaggaaggcttgctggcatagatattctgctgggtgtagacggtcttgctcaaggcctggtattctctttgaaaacggagcacctctgcctgttcctgcggcgtgaattctgccgcctggacagccgtggaccctactgccagaaggattaccggcagtaaaagcagtgctggcttatgacgcatctttatcaacccctttctagtttatattatagctgattttttgcttttttcgccattaagcgctttcgctaaaaaaacttaaaatttgcctggaaagtgcgccaaaagcccgagttttcggtataatacagattgataaaaggagacgaaacaatgacgaaaaaaacacaagttggtttgatttttggtgggaactcctccgaatacgaagtctcaatcacttcagccggcaacatctacaaggcaatcgacaaggacaagtttgacgtgcacccgatctggatcacgaactccggctacgtggccagtgaagctgattcatacaaggttctggaagagccgggctacatggtggaaaaaaatgacaagacggccaacctttccaacttgatcgagctggcttcccggccggaactggacgtgctcttcccaatcgtccacggcaacctgggtgaagacggggtcctgcagggcctcttccgcttgatcgacaagcctttcgtcggggttgacgttttagcggcagccgtaactatggacaaggaattcaccaagatcctggcccaaagagccggcgtgccggtagccaagtgggtatctatcaagcgctacgaatatgaggacgccaagaaccaaaagctcagctacgattgggtcagcggccagctgggcaccagcaacctcttcgtcaagccgtccaaccagggttcttccgtcggcatcactcacgtaactgacgacagcaactacgctgaagctttggccgaagccttcaagtacgatgacaaggttttggttgaagaagggatcgtaggcactgaagttgaaaccgccgttttgggtaacgaccacccggtagtttccggggtcggccggatcatcaacgccgacaatacttggtacagctacgaaaacaagtacagcacagaatcaaccacgaccttgcagattccagcccagattccggcagaaaccgcggaaaaggtccaggaaaacgccttgaagatctaccaggtcactgagtgcagcggcatggcccgggttgactccatgcttagagaaagcgacggggaagtcatcttcaacgaattgaacgccctgccaggctttaccaacatcagcatgtacccgaagctgtttgaagaagccgggatttcttacccagacttgatcacccgcttgatcaggctggctgaagagcgctacgcccacaagaagactctcctgcacaagcacgactaagaaaaaagtactttgaaaatttagttttttgcgaaagaaagtcagaatatgagtgagaaaagtgagcagatgaagaccagtgaagccgcccaggcccttggggtcagcgagaacaccctgcgcaagtattcgcaggcggtggagaaggctgcttcaccagcttactttccccgggtcaagaatacccgccgctaccggccggaagacttgacagttttgaagcaaatgcaggacctggtcaaggcagggcagaaggtcgaccaggcggcccaggaactttttgctggtgaaaaggaagaagcaccggtcaagacagccagggaagaccagctggaagctgccctggccgccaaggaccaggaaattgctgaactgaaagagcagctggcccagctgacagcggctaaggcagcggaaaagccggaagctgcccttgagccagcggctgatgtcctggacctgccggattttgatgacggctttttagaagatgagccggtcactccggagcagaaaagggcccaggtcgtggctgacatggccaagagcgaccaggaagttcacaaggaattgctcagccgggcccaggagaacgcggccaagggggcgccaacctaccggaccctggctgacatgcagctggcgcccaagaagactccctggtggaagaagattttcaaataatggcgtgatttgttaaattatacttaaaaatcaaaggggaccgcgaaagcggtcctttttttgcttaaaataataagggactgactgtcacttaaaaataagcaaaaaatggaaaggcgaatgcaaagaggatggaaacgaaaaagcagcgcatcctggctgccctggtcctgctggccctgggtctgggcctggccgcgctgacctattttaagacgaccggctacaagaacccggtggcggtgatcacggacacgaagatcaaggaccgcctgctgaaaaaagaaactgatatttacggcaataaggatgaagaacgccggcagtacctgcacgttcaagtcttgaccggcaagtacaaagggcagacctttgaaacggtcaacacctactacccttcccagctggtcacccagaaataccgggcaggcgagcgggtcttcgtgacagtgactgacggcagcctggccctagtttcaccaaaaagagactggatcctggtcatgaccttggctattaccctggccttgatggtggcggtagtcggccggcggagctggcacttgatcgtttccatggctatcagctggatcctgttttactgcttgatcttgtgggacgtggcggtcaacggggccgggatcatctggatgttctccctggctgacatcgtcttctccttcttcagcctggctatcgtgcagggggtaaacaaaaagatgctggtcacctggctggcaaccctgctcggggtctttgtctcttttgccctctgctatgccgttatcaaactgaccggggagacctacctcaactatgaaatgggcgactatgccacccaggacacgcgggggatcttcatggcccaggccctgctgggggtacttggggcagttatggacgaggcgacggacatcatttccagcctgtatgaactgatccagcacaagcccgagatcaccgttaaggagcttttggccagcggacggacgatggggcaggagatcatggggcctttgatcaatgttttggtcttgatcttcatttctgaagccctgccggaaacaatcctgtacttccgggacaataacactatcgcgacgacttttaacttcaccatgtccttaggggcgacgcagagcgcggtttcagcaatcgggatcgttttgaccatcgtttttgccagcctctgcagcctcctctttttaaaaaagccgcagaaagggggtaagcaagaatgagtagccttggcgctttaatcatcgttttggccatcttgatgaccatcatcggcggggaaaccgggatccgcagcttcttcagcgtcttgatcaacagcctcttgctggtcctggtggccatgcttatctcctggggcttgagcattcccatcatcacctcgattttcgtgcccctcaagctggccacgattatcttcctgggcacccatgactataccgtggctaaaaattccttctatgcctctttgatcgtcttatccctcgtcagcgtcttgatcttaggcatccaatacctggcccaagccgccggtttggggccggaagccggggaaatcctcctgggtcactcccagatgccggggatcagctacgggcagatcgccgtcaccgtggccattttctccgcccttggggcggtggcggaagccgccgtgtcgatgagttcggggattttggaactgaagaaggccaagccggatattacggaagagcagctgatgaagagcggggcagccatcggctacgacgttttgggcacggccatgaacaccatcatttacgggatgtttggcagctttttgtccctctttttatggtattaccggctccactattcctttagtgaggtaattaatgataaactttttgtaaacgaagcactgatcatcatgtattctctgctcggtgtgctgctgacggttcctttggcgacctttttgctggccaaggggatgagccggcaaagtgaggcaaaaaatggaaacgaaaaaactagagatcaagaactttaacggccggacctaccagctgcagacctacacggttaaaagcggccacgctcccttaaacaagctccgccccctggccatcgtcgtgccgggcggctccttcacccacctctccgtcaaggaaggtgagccggtggccctggcctatgtcagccggggcttcaacgcctgcgtggtcagctacaatcttttgcaagatgaagggatgatctatcctgatgccggcctggacgttctcagcacggtcaactactaccgcgaacgcgctgctgaataccagattgacccaaacaagatcatgaccattggcttttccgccggcggccatattgtcagcgcggccaactacctggctgatgaagctgaataccaggaaagctatggctatgagggggaccaggtccggccaaatgccacgattctgggttatcctttgactgacgtccacaaggtggcctttgaaatcggcggccgggctgacggtgccctgccgcctgaccccaagctggtcgacacggccctgggggtaagtccgaagacgccgccaaccttcatcttccagtcctggaacgacccgatctgcctgccgaccaatgccatggcctatgaggaagccttgttcaaaaacaaggtcaagtgtgaggcccacatgtttgatatcggctaccacggttactctttggccactccggaactgtccacggaagacattttctggcagggcaacccgcacacggcccgctggttcaatttgagcctggagtggctggaccaccttttctccgggatcaactacgatgaaaacaaggacaagctaacccagctttaccaatagacgaaaaatggatttattatttacgagagctgcccgggcagctcttttttgattaaaaggtgtgcgcaaactcgtgtctttagacatgagttaagcacgcaaaaacgccccattggggcgttttttagtttctctttcttctctttcttctctttcttctctttctttccaactcgccatacttgccattctgctgttttttcatggctgccgtgtactgagatgcaatgtaatttttaacgacttctttg

SEQ ID NO: 2204 - DNA, 643 bp, Unknown
  gut microbiota DNA sequence
taaaaaacgggagaaacaaaagatgaaaaagaagattttagcagtcgtagttgccttggcagccttcgtgggcctttttgccagccagccagtccaaaagcaaagtattcaagcagccaaaaccactaaaacggctaagaagactactaagaaggccaaggctaagcaaatcagagtgacctacactttgaaggacacgactaaggccaagaacaagcaaaccctggctaagaagaccttcaaggtcaagaaggggacgactgttttcactgttttgaagaaggcctggaaagtcagctacactaagtcttcatatggtgtcttcattaccaagatcaaaggcctgggcaataaaaagaagaagctctactggacttacaccgttgacggcaagatgcccatggtggcagctgacaagcaaaagctgactaagaacaagtccaatgttgtcttcactttgaagaaatactaaaatgcagaccaaggaacgctaccagctgcaaaggctgaccctgctggccttgctgactgcgatgtgtgtggttttgcggatctttaaaatcatcgatatccccaatgtccagccggtgaccgacattatcatgctgacgacgctggaactgggggcagggacggggattct

SEQ ID NO: 2205 - DNA, 12818 bp, Unknown
  gut microbiota DNA sequence
aagcccccctcaagatgagatttcccatttcttcaagaaagtaagacacctcagagacgatgaggtagataggccgggagtggaagagccgtgaggcttggagcagaccggtactaatcagtcgaggacttgaccaaaagagcaaagcaatgaggttttgacttggaagagatattcagttttgagcgtgcaagctcaagcaaagagtgcggtggcaatggcaagaaggatacacctgttcccatgccgaacacagtagttaagcttcttaacgccgaaagtagttggtgggaaactgcctgcgaggataggaagctgccacgcgaatcaagagtcagacggaagtctggctcttttttgctttattgaaaacttttttaacgatttctgctgattttttggcacttttgctgaataattgttatagtggttaatagttgaaaagacaaattcgctaatctgtaagcgggagatgaaagagaagatgagagagaccccgaaatacgtcctgatcgccaaccggctcaggcaggagatagctgagggcacgtatactccaggcgaccagctgccccaggaaatggccattgccaacgattttaacgtcagccggatcacggtccgcaatgccctgcagcagctggaaaatgacggcttgatctaccgcattcaaggggccgggaccttcgtcaaggactctgaagcaaacagcgccagtcagcttgactatgatgattttgaaatcattgatttcgaccgggaccaggtcaagctactggactttagagtagctaaaccgaccaaggacctgcaggatagcctggaattgaccaagtttgacctttgctaccaaatcaagcgggcaatttactatcatgatgacttgatcggtatccaaaagctggccatgccagttaaggtcgtccaagggctgggcatggacgctttgacccagtcgatctaccctatcttagaaaatgatcaggactttaacatcagctcggctgagcgggagtacactcttgttgatgccaatgaagaactggccaaggatttgtcttgttccattcatgataaattgctgatggtcgagcagaagtcctacctggctacccagcagatcttcgagtatgcccaaacctacttcaagactgctggtttcagcatcaagcgaatcctccgctacaagccgaccaaggctaacaactaaagataaatagaaaaatgcagaaatttgtataatgcctgtgaacccttgaaggatcagcctttgagggtcttttttgttccttggcaaaatatttgtaacaacaaattagaaaaggtattgacattatgaaagggcttgctagaatataaagtgtaaacgttatcaaatatcgaatttgttagtacaaatgttttttaggaggaataagtattatgactaagaagattgcgcttttctgcagcggtggtttctcaaccagtttggtagctaagaagatgcaggatgtctacacggctgaaggtgccgacgtcaaggttgatgcctacgacttgggcatggctgacgaactcggtgacggcgtagacgcaatcgttctggcaccccaagttgcctgggatgaagactcaatgaagaaggaacacccggacaccaaggtggttgctttgaccatgcagcaatttggttcaatggatggggcaacgatcgttaaggctttgaaagaagaagggatctaataatgactggtttacaaaaattccaggccaattttaccaaagtagctggtaagatcgcggccaacaaatttctgttgactctgcgtgactcctttatcatcgtagcgtcaacttccatgattgccggctttgcgatcatgctgcaaaatgtctttatcgatccagtcaatggtctgatctttggtaagcaagggttgcaacttggccgtatgattgctggttcttggtcagcttgggaggctaacggtttctgtaaagctctgcagaactttgccaacctaatcggtttggtgtcaaacggttctctgaacgtcttcgcgcttctcttagttgtgatttttgctaatactttctcaagaaagtactacccgaagtccaaggaacacatgacggacgtcctttactctttaggggccttcttcatttgcttgccatggaacttctcttacacgccaactggctctaaaaaggcaatcgatgttttgaactacatcgacacttcttacttggggactaagggggtcttcgcggctttgctgatctctgcttcagccgtttggatctacaacaagatgctctccaagaacatcactatcaagatgccagactcagttccgccagctgttgcccggtcttttgaatcattgattccagggaccatcaccatgggtgtctacattatcttgactggtctttcaaccactttgactggggaaaccatgccagccctgctcttgaccttgctgcaaaagccagctttggcaatttcctcaactggcgccttcgcctttgtttcccagctcacttggagcttgctgcaatggtttggtattcacccaacttcaatctgggggccaatcttcggtttgacttggaacatcaacgacacgcaaaacatgctgggccaggctcaccacatctactcaactttgtttatgaacttcgcgactatcgctgctggttcatgttctgtagccccagttctggccatcaagctcttctccaagagaattgcagctaagaagatctctaacatcgccttgatgccggccatcttcaacatttctgaaccaatcactttcggtttgccaattatcatgaacccaatctactttatcccatggctgctttgccaaccagtagccttctacatcggtctcttctttaccaagatcggtttcattgggccaatcgtcaacaatgtgccatggacggtgccaaccttaatctccggcctgctttacactggcagtatcaagggcttgatcgtccaagctgttatcgtctttgtatgtacggctctctacgtaccatttgtcagaatggacaaccgcttgaacccagacgaaccgatggacaagatggctaagactgttgctgaataagaatatataaagcaacaaacgacggttaggatttgtagacattaatagaaggattttaatcatggatgaaaaacaacttgctaaggcaatgcagctgatctcttttgccggcgactctaagtcggcttcaatccgggcgatgaaggccgctgaagatggcgatttcgaccaagcagaagaatttttaaagcaggctcatgattctctgcaccaggcgcacaacattcaaactgcctggatgtcagctgaaatgggtggtgaagaagtggaaaagtcactcttgctgatccactcacaagaccactttatggccgcggacatcatgatgaccgttgctgaaaagcaactcaacttgcaaaaagaagtcaaagctttacaggaaaaactggactaggtgaagaaaaatgacgggcaaacttttagcggatatttttcaatccggcatggtcctgccgattcacaaggacttccgtttaggcgggcaaaccgccagcagagcagtagttacggtcagttttgccggccgcgactaccaaagccaggccgatgaacaaggccactggcagatccttctgccggcttatgacaaacaggaactgaacgaactgacggtggccagccacgggcagaagcagactttgaaaaatctgcactttggccgggtgatcctctttagcggccagtccaacatcgaataccggctgaaagatgacgcggaatttgcccaagctaaggctgaattagcagttggaagccatccaaagctttactattacaactgcccgcagatcgactaccgtgacccggaaaccggggcggtaaagccggatgtggccgaagaaaaatggcatgaagtaaatgccgaaacggccggcgatatgtcggccatcggcttttactgcctagctaaattgcaagagcttgacccaagccagatctacgcggcagtggactgcttcaaaggcggcacctcagcctccaactggctgccggttgacctcttaaaggctgatccagaattgaagactgcctttattgacccatatgaagcggctgttaagggcaaaagctgggctgattttgacgctgaaaccgccaagtggcaggcagccgtcgaccagcacaatgtggacctcaagcagtacctggaccagcatccggaaagcagcttgagccaggccaaaaatattgtgggccacacgccatggccgccgccaatgcggccggacagctacctgcgtcccggtgctctctacgagaccatggtcagccagatccaggacattaccgtgaccgactgggtctggtaccagggtgaaaacgacaccgaccggccaagacactactccaaactcctcaacttactgcttaatacttggcgccgcgtgctcgctgacccgtctctgccagtcaagctgattcagctgcctggctatgccgacaatccggaaaacagcgtggccatgatccggcaaacccagctggaaacagctgcaagccggccatacgtcgacctggtttccattgccgacctgggcgaggcccacaatattcacccaacccacaagcgggaagccggccagcggttggcactctgcatgtccgggttatcctacccggccacgccaacagcagttgcctttaagaaggagggtgaccacctcagcttcaaggtgaccaacagcttcttgctggaagtcaagaatgaagtcaaagtcagctttttgaccaaggaaggaacttggctgccataccaagcagtcaaggctcaagtcaaggggcaggaagtcagcctggattgcccgaatgacgcccttggcctgcgctacggctatgccaactatccggatctggcggtttataatgagcttgattctcctttaacggcttttgaaaaagttttttctgaaaaataacaaggtgatctaataatgaatttagcagcaatcgacattggcggcagcagcataaaattcgcgacctgggaagacggccgcttgcaaaaagtgcacgcactgccaaccccggacaatctggaagacttctacagccttttgggcggggaagtggccaagatcaaggcggaaagcgccgtgaccggggtagccatctcttcaccaggtgccgtgaacaagcaaagcggggtcattgaaggggccagcgctctgccttacatccataatttcccgatcgtgccgaaattggaagagatcttcggtctgccagtaagcatcgaaaatgacgccaactgcgcggccctggccgaactggctgacggtgccggcaaaaacaattcctccctggccttcatggtcatcggtaccggcgtcggcggggcccttatcttcaaccggcagatctggcacggcgcccacctttatgggggcgagtttggctaccagactacggctgaagccggcatgaccttgagccaggcagcttccccggttcagatggctgaacgctacagccaagccagcggccaccaggcttccggcaaggaagtctatgacctggccaaggccggcgatcctctggctcttaaagaaagaagccagtcaatcagcgctttggcggctgctattttcaacctccagcacggctttgacccggaaaagatcatcatcggcggggcgatttccaacaaccctgacctgctggggcttttgaatgaagaaattgaacggatccggcaagaggtgggcattgccaccgtcaagccggccctggccgtatgtgaataccgcggcgaagccaacttgcgcggctgcgtatatgattttgaacaagaacatggagaagaataatgctgaagtttccagatgattttgcctggggggctgcctgctcaggcccgcagactgaaggccgctttaacaagcgtcaccgcaacgtttttgactactggtacgacactgacccgcaggctttttacaacggggtcggaccggacacagcgtccaacttttacaatgactacaagaaggacctgcctttgatgaaggaagccgggatcaagcacctgcggacttcaatccagtggtcccgcttgatcgctgactttgagacgggggaagttgacccagaaggggccgagttctacagcgacctgatcgactgcatgctggaaagcggcattgaaccttacatgaacctctgccactttgacatgccttacgaactgcaaaagaagtacggcggctgggaagacaagcatgtcggcgaccttttcgccaagtttgctgacaagtgcttcgagctctatggcgaccgggtcaagcactggttcaccttcaacgagccaaaggtgatcgttgaaggggcctacctgtacaagttccactacccgctcaaggttgacggcccgctggcggttcaagtaacctataatatcaacctggcttccgctaaggctatccaaaagttccgtgcccgcttcaatgacgatgagcacacggttgggatcatcttgaacctgaccccggcctacccgagatcaaatgagccagctaacctggaagcagcggaatttgccaacctctggtgcgttgacctctggctgcaagctgccattaaggggactttcccggaaaaaattgtcaagattttgaccgaagacggcgttctctgggatgctagccaggaagaactggacttgatcaaggaaagcacgatcgacctgctgggcgtcaactactaccagccaatgcgggttcaagcaccagccatctctccaaagagcctgcaggactggatgccggacatccatttcgataactacgagatgccaggccggatcatgaacgtcgacaagggctgggaaatctacccgaaggctctctatgacatctccgtcaacttgcgtgaaaactacggcaacttcccatggtttgtttcagaaaacggcatgggcgtttctagagaagagcgcttcctggatgataagggtgaagtccaggatgattaccggatcaactttatccgggaacatttgaagtggctccacaaggggatcagcgaaggcagcaactgcaagggctacttcctctggaccgccatcgacaactggtcctggatgaacgcttaccggaaccgctacggcttgatccgcgacgacatccacacccagaagaaaactttgaagaagtccgcctactggtaccggaagctgagcgatactaacgaactcgacgccgattaagaaagcgcgtcgacaagctttgccgaaaagtttacaatgaaagcggtaaagaaaaatgtttttcaaggagaatcaaaagagatggcagaaccattatttttggaaccagtttttcatgaaaaaatctggggcggcactggcttaaaagaagaatttggctaccagattcccagcgaccacaccggtgaagcttgggcaatttccgcccacccgcacggcccggcaactatcaagaacggcccttaccaggggatgaagctgaacgagctctgggaccagcaccgggagcttttcggcaatgccaagggcgacgtcttcccgctgctaaccaagattttggatgccaaccaggacttgtccgtccaagtgcacccggacaatgaatatgcccggattcacgagggagaattgggcaagaccgaatcctggtacgtgatcaaggccaagccaggcgccaagctttactacggccacaatgcccagacccgggaagaattcgctgaaatggtgaaaaacggtgaatggaagaagctcttgcggaccgtcccggttcatgaaggggacttcttctacgtgccacatggcatggtgcacgctgtcggcagcggcattatggtcttggaaacccagcagtccagcgacaccacctaccggatgtacgactttgaccgagtagacaggaagacaggcaagctgcgccagctccacttgcagcagtcaatcgacacggtgcaggtgccgtttgaaatgccaaagctcaaccatgaagaatgggatgttggcggcgttcacgtgactcagttcgtgatggcggaatatttcggcgtcttcaagctgaatgttcgcggcaagggcgactttgagatcaaggatggcaagtaccgtttgctgtcagtcttggacggatcttgcgacttgacggtcgacgggcagacttatccgctaaaaaaaggcgatcatctgattttgccaacaacgatttcctgttatactttagatggtcaagcaacgattatcgcttccaaaccaggcgatgaagcttaaaagacaaaatcgagagttaacagaagcataggtgagaatatgacagatacttttgtaggtagtattgaagccggcggcaccaagtttatcttgggcgtgcaaaacgttgagactggggaaaccactgcaaccaagcgggtgccaaccacgactccggcggaaactctggaagcctgccgggacttcttcaaggagaacccagtcaaggccatcgggatcggctcttttggcccgatcgacatcgacccgaagtcagcaacttttggctacatttccaagaccccaaaggctggctggtcaaatactgaactgaagggctactttgaaaaagaactgggcgtgccagccgttttgacgactgacgtcaacgcttcctgctacggggaatacattgcccgcggccgggatgatgaaaagacctacctttacattaccatcgggactggcgttggggccggtgccatccagcaaggccacttcatcggctacaccaaccactcagaaatgggccacatgcgcattcctaagcgggcggacgacaagtatgaaggcggttgtcctttccaccacgatgcctgtggggaaggcctgactgctggtccaacgctcaagggcagaaccgggattcctggtgaagacctggaccgcagccacccagtctttgacttgatttcctattacgtggctgagatgctctacaacatctacctgaccatccggccagacgtcatggttgtcggcgggtcagtcttgaacgaaggtgacatggcaacggtcagaaagtacttcgcggaaatgaacaacgactacgttgctctgccagacctggatgaactgatcgtgcggccaatcgtggctaacaacggttcagctaccttgggctgctttgaaatggccaaggacttgcttaagtaaaaagcagaaaaacaagataatagtactaaaaaaccagctcaagcgacagcttgagctggttttgttatgggttttattcttgataatgttccgacgtaacgatatacacgaatgagctctttttctgactggccagccagcgcattctgatcttgaattccaggacgccgacttcataactggccgaaattgcccggtccttcccctggcatcggtcctatccacggttgtggcgcttgatctgcagtggtgaacgcaacaacaataatattataattacacaaaatactctgagacagcgtaggcaaatgctctagtaagttgcatggctttctccctataaaatacgacatgttccttaattaatataataactcatttgccttaacaatagggctaagcagagtaaaagggattgattaaaaaaacagatgttagcgcttttaattcacgcgggagtatgctatattttaacttggaatggataccctcaattcttcataatataagggctatccacagttaagtaggttgttttgaatacagggaaaggaaaaatggaagaagttgaagcggcacttaagcagctgctggctggccgggtctggtcggccagtttgggccgggagctggagagcaagagaatctgtttgagcgatttgctcttggacaagcaaagaaagaatgtgatcaagccagctgacgtccctttaatccgccaggccctgggtgaactgcaaaagaatttccaggaagaagtcaaacgggtcttgctgactgagccggagctggcttctgatgctgaccggctggcctggctgctcctgcagctttttgccaagaaaaggaagcgggtccgggacttgacggctgaccagctggctctcctgcagactgaagaggctaagaaatacgtcctttttcacgggccgcgggtctatttccgcaacaacgcctgctttttgaccaatactttcccggcagaactggtccatatcaacgaccttgccgggcttaaaggacagccggcagctttttccgccttgttgcagggagaagaagtggatggggaagaactcagaagctggcttgacctcttcggtcccttgtatgaagagaaatatttcggcaaacactacggaccaggcgtggaactggcggggtttcaaatctctagcgggaaaagagatccccggatctactatgtcctgcgctacctgctcaaggataaagagccagaagcaagatcgaaaaatttggccgcgcttcctttaaagacgatcctaaggcggaatttagtctgccacgaggccttcaaatgatgacggtctacagccgggagtattaccaggcaggattagccgaaggaaaaatcaaggccaaaaagctggacaagtaccggctgggaccggactttattctggcttatgacctggggccagctgcttcttaccggaccttgctagtcgaccggaagcagggggagatcgtcttaagagccacgaccaagaccctgctggcccacttcgtcaacgaggacctgcccggcggctaccccttgcaggacaagctctacaagctcctggggatccgggagcagcacgtgatttcggcggggcatggggcaattttttccccggaatccttccacgccggcctggtggacctggtggccctgcagcggatgcgggggatggaagcctgccagggagggctgctcatgaccgacttggccggggtcaactgctatttctttcaggtgaagcgcggctatgccaatgccagccggcaagtgaaagaagcggttgagcacaacgccctttactgcagcctttttcatggcctggctgggcaggtgggctgcccggtttgcagacagggtgactggaacctgctctatggacccagctaccagcaggcggttgaggccgacctggccggccggatcccctctttaaggcagcttttggctgagatcaaggcagaggagaaggcagtcttaaagcagatcctgctggatgaactcggcctgcctcttttaccagatgatttagactatgccttaaagcaggttgagaaaaagctcttattcagaatataacgaaaagcccccgcggtcgcgggggctttgctttgtttctttataataattcaggctaactgacggcggagtttctccagggcctgcttcttaatccggctggccgtccggtagggaatattcattaagtcggccgtttccttgaggctgcggccagccaggatgttctggcctaaaagcagcttttcgctagtcgacagcttcttccaggcttccttaagaagcagattgtgctggtcggcctgaccaacaaaggcggcagccagcagtggttcgtcgtggtctctttgccgctttttctgccggagcaggtcaaggatccgccagtagaccttgcggaaggccagcttgtcagcttcttcttgcggctggtcagtcatttcttgcaggcattgggcgtagacgatcaggccttcttgaaaaaggtcctcgtaatcggcacacttccggtagacatgggccgttttcaaggctccggcgactaatttccgcctttcccaggcttggtccattgcttgattgatttgcatgttcattttttcgcactccttaattttttcttgctcggcgccttgcaagtattagcttaagggctttgccaaaggagtgctgaccaggagcaaggaggcagtaagcccgattttccgccctttacactttgaagaaaatgtaagaacggctgtttaagggcagatttagggagtcaatcaaggtaaaaaataaaagttttcataggagaaaagcaagaaagtcgtcatattcccctaacctttgttagtcaagtctaaaaatcacctggctacgtcattggggggcatagattgcgtaaaaagagtcgtggctacgtcgtcagggggattttagacaaaaaataatccaagtccatgtcggacttggattattcgggaagaactacttcttcgtagtcttctttacgttcttcttagtgctctttttagttgacttctttgaagccttcttggtgctcttcttagttgacttctttgaagccttcttagtgctctttttagttagcttctttgaagccttcttggtgctcttcttagttgacttctttgaagccttcttagtgctctttttagttgacttctttgaagccttcttagtgctctttttagttggcttctttgaagccttcttagtgctctttttagttggcttctttgaagccttcttagtgctctttttagttggcttctttgaagccttcttggtgctctttttagttgacttctttgaagccttcttagtgctctttttagttggcttctttgaagccttcttagtactcttctttgaagccttcttgctagtggctttcttagtgtctggagtcttcttagtgtcagtggcggtcttcgcactagtgtctggagtcttcttagtgtcagtggcggtcttcgcactagtgtctggagtcttctta

SEQ ID NO: 2206 - DNA, 25871 bp, Unknown
  gut microbiota DNA sequence
ttaaataaacccatttgggtcgttagctcagctggcagagcaccggactcttaatccgggtgtccagggttcgatcccctgacgacccatcgcgagacatcatgcgtgtgcatgatgtctttttttgcttttaggcaaatatttcaaggcagttaagggcgggtaaaatattacaaatgttacaaaaaatgtcttccctgtaatctcttcttaactggaccgttacttttttgctatggttttgaaatttggccctgttaacatatagactgtcaaatgacaaaagagcagcaagaaggaatttgccaaaggagaagtaacttggcagacgagagcttgcgacaagcaaaggagaatttttttgaacatcaaatctaacgtacttaaatcagtatttgctgcaggcttggctttgactggcgtggcagcgatcggcttaggcacgaacggtcaagcagacgcggcaaccatcggtgacagcgtaacggttgactacattgatggacaatcaattgcaacttggtcaaattactacactgctacggttaccggttccgttaaggacggcagctcatggaaggtagttaagactgcccgcgacgcttcaggtgaaaagtggtacaagatcggcaagcgccaatggatcatggccaagtacaccactgaagcaacaactgcttcaaacagcacttacaacgcgaatactaccagcactaacactgctaacaacacgaccagttcaactactggctacactacgagctacagctcatcagcaaataactacggctacggctcaagctataactacagctacagcgcgaatactggctcagccaacacttccagctacagcgcaagcacgaccagttcaagcacttctgcttcaacttcaactgcttccgcaagcacttccagctcaacttcaacttcttcatcatcatctgaagaagcagctaaggcttggatcgcaagcaaggaaagcggcggctcatacactgcctcaaacggtaactactacggcaagtaccaattgagcttgagctacttgaatggtgacacttctgccgccaaccaggaaaaggttgccaacagctacgttcaaagccggtatggttcatggactgcagctaaggccttctggcaagctaacggctggtactaatcagcagctggtcaaagatggttcctttcggggaaccgtctttttctttgcctttttgtggagaaaaaagctgctaaacaagttataataaaagagataggatagaatttgaattgagaaacagaggttcaaagatgaagaaatttttcataagcgtggcagctgctttggcaatcgggacggctttcgcggctagccaggtaagaccagttgcagccagtagccggcaggcggtttttaccctgcctaagggctatactaaggccaacttgaagaaggcctactggtactccaacttgtctaagagccagcagaagaagtggctgaaaaacaagaagaacgcggcttggctgaagaagtggcggaagatcaacgttaaggggatgcaggccaatacttttgaccaaagttcctggtcagagtccagcaaggacaacaagaccattgttaaattgaccaatggccacttgaataccagtcagtccaagaccttagctaagtactccctccgcttgatcaaccaggcccgggccaagctgggcctgaagaagtggaagtacagcaaggggacccagaagctggccttggaaatttccaaggaatacgtggcaaacaagaagaccatcgccactggccactatgtaccagggatcgtccgggccactaaccgggtcggcttgaaattgccaggcaactacaactatgtcgaagacatggccggctttaaggacggcagtcagatgaccatgacggctatgaagaaggacatctactttggcttgaagaccatgatgtttggctaccgctatgctaaccagagcaaggtcaagcagctgagccagtacacggaatgggagcacgccggggatttgatgaacacccagggcggcaagtatgacggcgactgggactactacggctttaacgtttcctacactaacggcacttactccctgcactatatcggagtgccagcccaccttaagtgggcctacggcggcgcctactggggcagctttaaggcttagggaagaatagacaaaagaataatgtgtaaagaggctaagcaatcagcctcttttttcgtgctgttttattggagcatgatctgttttatatcttttggccaataactggtctaagtttttcagctttgcatgttaaattttctcctcaaaagaagttaataatctaatttttgtaagccttttctaaaaagatggcaaagaaaagggggaagggtcttaacattggtctaattttcaactatagtattggccatagaaagaaatcaaaaaaagaagtaaaaaaacgaggcaaaaacagatgaaagcagcaagcagattagaagcagattcaattggcagtcttgaagtcccgacagccgcctactacggggtccaggctgaacgggccagacggaattttgaaattacgcacttaaagatgagtgcagtttttctgagcaacctggccttgatcaaaaaggcagctgccagcgtaaactttgaaattggtctactcactaagccgcaggctgacgcgattaaaactgcttgcgatgaagtgattgccggcaaattcgcggaagatttcatcgtcgacccaatccaaggcggggccgggactagcgctaacatgaacatgaacgaggttattgctaaccgggcaaacgaacttttaggcggcaagctggggacttacgacctggttcacccaaatgaccaggtcaacatggcccagtctaccaacgacaccattccaactgccggcaagatgaccatcatcctgctcagtgaaaagctggttgccagcctggacaagttggaagcttctctgcggatcaaggcagatgaattttccgacgtgatcaagatgggccggacccagctgcaagacgccgtgccgatgaccttgggtgacagctttgccggctacgcttcaatggtcagccgcttaaagaagcgtttggaaaaagccaccatggaaatgcacgagatcaacctaggggcaacggcgatcgggactgggattaacgcttcccagtattacgaagaccacatcgccgggcagttgagcaagctctttggctttgagctcaagcaggccgacgacctctttgacgctacggaaaacctggactctttcgtggaagtgtctggtgcccttaaggcctgcgccatcagcctgtccaagatgtccaacgacctccgtcttttgtcttccggcccgcgttgcggttttgccgaaatcaacctgccagccaagcaaaacgggtcttccatcatgccgggcaaggtcaacccggttatcccggaagtcgtcagccaggcggccttcctggtctgcggccacgacaccaccatcaccatggcggcagaagccgggcaactggaactgaacgcttttgaaccagttgtcttctatcagcttttcgaatcctttacggttttgaccggggcagtcgatactttggtagaaaactgcattacgggcatcaccgccaacaagggccgctgcaagcagctcaaggaaggtagcgtcggcatcgccacggttctttgcccatacctgggctaccagctctcagctaagatcgccaagcgggcccttaaggaaaagcgcagcgtccgggaactggtcctggaaagtcacttgatgagtgaagaaaagctggacggtttattaggatagtttgatcaatcctgtttagacaaaaaagctgggacaagtttgcttgtcccggctttttgcatggtatgaatattaatttttagcgcccagctgctggaggaacttctgccagccagcttcaccctttgcgtcggctttgtagaccccggcatcggccaggacctggtcaaaaatgtccaggagggcttgctgcaggagctggtcaacgttttcttcattaatgtctggctgcttttcctgcaattttttagcccatggcaggtggatcttagcgatttggttgtcctggccaagcaggtatttcttgacctcgcccagctcgccctttaggcgtccaggcaggatggcccggcccatgacttcgatcaggccgatgttttccttcttgatgtgccacttatcctggtgggggtggaagatgcccagcgggtagtcgctgctagtgctgttatcacgcagaaccagctctagcacgtattcatccccgtccttatgggcaattggcgtaactgtatggtggcgggcagttttgtcttcggccacaatccccaggccgggatcgctgtacttttgccaggatttgataatcttagtccccagttcaagcaaggcttcagtatcctggctgatcaagcggatgtcgctcattggccagtcaacgatgccgccttttacctgcgggtagccggcaaaagtgagcttctctttgaccggggcgttcatcatcgggaagcggtggccgccaccctgatagtgctcatgggacagaagggagccgccgacgattggcaggtcagcatttgacccgaccatgtagtgggggaaggtcttgacgatttccagcaggttgatcagggtctgctggttgatgaccattggctcatggatctggtccaaaaagatgcagtgctcgttgaagtaggcataaggggagtactgcatcccccatttttccccgccgatattcatgcggatgatccgcagattgcttctggcattcttcccgtagttgcccaggtagccttcattttccaggcagagatcgcatttcgggtagtccgtatccttctttttggccgcggcggcaatagccttgggatccttttccggcttggagaggttgatagtgatttccaaggggtggccaaaagagcttttgccggagaagacgatattcttggcaatcgcggcctttttgacatagttgttgtgggtagagaggtcatagaaccagtcggtcgctgccttggggctttggtcgtacttgttccagaaaagcccgttgaccttgcttggggccggggttaaaaaatcggccagctggtcggccaggatctcccggctggtcacgtcatctggaatcttgcctcttttaacggccaggttaaccagctgcagcaagctgtcttcgccggaagcctgcacctcaacgtctccgtcgccaactagggcctgcaggcggttgaagaggtagacccggtccatttcccggtaatcagtattagcgataattttttgcacgaaattctcaatcagcattttgccttcttgtctccttagttcttacagcttgtgggttccgtcaacgatcttggcttcgtagaagctggcggcataaccaatggtgtcttggtagatcttgccaaccttttccttgaatgcttcggcctggtcttctttgacgatagcaattgcgctgccgccaaagcccccgccaatcattctggcgcaaaggcagccgtctcgctgccaggcacttcccgccagggtgtccagttccttgctggtaacttcgtagtcaaagtgcagggaaacgtgggaggcattgatcaaacggcccagccggtctaagtccttgtttgccatggccttggtcgccttgatggttctttggttttcaaaaacggcatggcgggcccgcttaagcagggtctcgtcattgatcaagtaggagtattcgtcaaaagtttcttcatcaatatcgcccaagtggtcaatgctgagcttttcctgcagcttagaagttgcttcctggcattcacggacgcggtcattgtaggcggagtcggccagggtatgctttttgttggtggacataatgatgatttcgtagtcgcccaagtctagcggcaggtagtcatattgcaaagtcgcgcagtcaaggaagatggcctgatccttcttggacatgttgacggcaagctggtccatgatcccggaagagagaccgataaattcgttttcggtcttctggccgagctgagccagcttgactggatcgatttccagtccgtattcttcagttaaaacgtggccaaccagcatttcaattgaggctgatgatgacaggccagccccgtatggcaggttgctccaaacatagaggttgaagccatggtcaatttcacttgtctcatcttgcacgtaggcggtcatgcctttgaagtagttgatccacttgtggtcagggtctttttctagctcgcggtcgccaatttcgaaaataaccaggtcgtcatccatattgccggagcagacggcaattttcttgtcttctctagggccgtaagcggcataggtccctaagctgatagcgcaggggaagacatgaccgccgttgtagtcggtgtgttcaccgatgatgttgatccggccaggtgagaagaagaggtcggctgctttttgcttaaaaatctgttcaaaattattttttaaaaatccagtgttcatttttgttacattttgtccctttattgtttgatactaacattataatcgctctcagaacaagaataaacatttttttgcaaaaaagaacaaaaaataaagttagaatcccggctaagccattgaaaaaagccctggcagatgttaaattgtgttttaaagcgaacacagttaagcatggaaaagcaagaaagacaagaaagagatggctgaccaaaatgctaaaaagagaacggcttgaccaagtcatgaatatggttactgagagaaattacatatcagtcgcggatttagccaagagcctgcaggtttcagagatgacgatccgccgcgacttggatgaactggccaaatctggcaagctgatccgcttgcatggcggggctcagataatttccagccaggccggggcggagcagagcttccagcaaaagcggggaattcacattccagagaagcaggaaatcgcgcaaattgccgcgtcactggtgcatgacaaggagacgatctatgttggtccgggaactactttggaaatgatggtggcggccttaaagcaggaagatttgcgaatcgtgaccaactccatgccggtctttgaggcggcccgaaataaccccaataattacgagctgattctggccggcggcttttaccgcccggtcagcgggactttttgcggggcgctgaccaacaacgaattggccgccatgaactatgaccaagcctttgtcggagtcaacggaatcagtgattcggccttgcttaccgcggatattgaagaagggcagacgcaaagcactggtttaaaaaattcccagcggcggatcatcgtcgcggacatgtataagtttaaccaccgcgacttctaccagttttacagtctgtatgacatcgatgaactggtcaccaattcccaagtttccgcagatgtcttgaaatattaccagcaatatacttcggtgcggacaaatattgaagcataaaaaaggcgttgacagaaaaatctgtcaacgctttttagcttgtttaactttaattgcttaaactcggatgggcacttcaatgcttttctctgagccagcaccagcccccaaagaggagggcccagctggcggccagacttgccccgaagacatcagccggaataaagaagaggctgaagaagatgaccaggaagaaggcgatggtcaaaggactggagagcttgtaaaaaggcatcttgaagccggcagctatgaaatcgctggattcccggtacttgcggtgggccagtagggccagaacataaactaggatgtacatgtcactcgttgccccggccaccgtgccaaaaacttcaatagccgtgctggagaagctcatgattggcgcgatcagcattaaggcaacggagatcacgatccccgcggctggcacgccatttgctgaaatcttggcgaagtgctttttcaaaaaggaatccttaggcgcttcttcagccaactggaagaagtggcggccagctgaaaagatcccggagttaagagaagaagccgcggcagtcaatacgacgaagttgaagactgaagcaacagcattaaagccggcgatcttgaagacctggacgaaaggacttgtcccgctggtaatttttccccaagggatgacgcacatgattacggctaaagtagcgatgtagaaaagaaggatccggagcagggtttcgttgacggccttcttgatgaccttcttcgggttcttggcctcgccaatggtaatcgtcacgaattcaatcccggcaaaggagaagaagaccatcgggaaagcggttaagaaggcatacttgccttttggcaaaagggagaagctgccggtgaagttgctgaggctggcgtgaccaaccggagttttagcattcgcagcaaccatgatgatcccggttacgaccaaggagatgatggcgatgatcttgatcatggcaaaccagaattcagtttcgccaaaaagcttggccgccgtcaagttaagcaaggtcaagaggcctaagacgctaacttcaatcagccaggcgggcaggccgggcagccagtactggacataggttgaaacggccgtcagctccgccatgcaggcaaagaggatgccgatccagtaggtccagccggcaaagcggccagccgcctcacccaggtatctggtgatgaaggagacgaaggtgtggctgttggagtcaaaatagaacatctctcctaaggcccgcaagaggaagaagaaaaagaggcccatgatggcgtagataaaaataactgagggaccagtggcggaaatcgtagtcccggcccccaagaataggccagtaccgatcgtgccgccaatggcaatcatctgcacgtgccggttggacaaggagcggatagtcccgtccgtgttttcaatgctgcggtcttccataaagcaagtccttcctactaaatcaactagaaaaaacaaaagtaaaattaaaataaaataagaatttatggttttataatataggattcagtcttttttgtaaagataaaagcctttaagaaagggcaaaaaaagcaggctgtcaaaataaaattaatttgacaacctgctaaatctaaaaatgttttattttgaccgggttagactaaagaaaattaagtcaccctgagtaattactttttcagatttttcttacagctcttcgtccttggtcaattcgtagatggcttcagcgtagatagcgatggacaggatcaagtcgtccagcatcatgaattcgttggcggcgtgcataaccattgggccgttttccggctgggccccgaaggcaaccccgcgttcaaagaggcggccgtaagtcccgccgccgattacgacttcgtggcccggcttgccggtctgcttttcgtaaaccttgagcaaagtctgcaccattgggtcgctgcctggcacgtagtgcggttcttcaaagccgttgtaagtgacatccaggatgccgctgaacttgtccataacctgcttgatcatggtgtccgggtcagtcccttgcgggtagcggacattgttcaagaggctggccttgccggcgtgttcgtagtcgaacatggacgggctgctggccagatcgcccatcagatcatcgtggtggaagatgcccagcttcttgccatagaagtcttcgtgttccacttcagccaggaagtggaggaagttcttgtcccggccggcaaaagcgtattggtccaggaagagggccaggaaggttgctgagttcttgccgacttgcggagctgaagcgtgggccccttggccgatcaagacgatatcggcgctttcgtcattaatttcaaatgatccgtccaattccttgtctgccaaaaagctttcgtaagccaatttaacagcttccaggtcaggtccggagatagtagcccgggtaacctgcggagtcacgttagtggcaatcccggctttgaacttgtctaaaacatagtcgcccttagtatcatcgttcttgaagctgaattccagggtgaagatcccttgttcaccattgatgatcgggtattcagcgtctggtgagaagacgatgtctggagtcggttcgtgcttcaagtagtagtcgatcccgacccagttggtttcttcgttggtccctaagacgaagtcgatcttcttctttggcttaaagccagcttccttgagcaaaagcatcccgtagtaggcagctaagcttggccccttgtcgtcggcgttgccccggccgtagatccggccttcttcgtcgatttccatcttgaaggggtcccgggtccagccttcaccagctggcactacgtccatgtggccgatgatgcccaggcgcttgtcgcctgcaccgaagttgacccggccggcgtagttggcgaagttttccgtgtcaaagccgtcccgcttggcaaagctgaggaacttggtcatggcgtcaaccgggcccttgccaactgggtattcttccgtggcgttttccaggtcttcggaagagtcaatggcgatcaattcctctaagtcttttaagatcgcgtccttcttggcttccgccagttctttaaagtttaagtccatctttttctcctaatgtttatcttcaatgcctgctgttttttgaaattagttacaaaaagtaactaaccacctaaataaaattctatcaatcttcgccagccctggcaaacaagacgccaagcaaaaaagccgccttccggcagctttagcggcggtatttagttgccgcgatatcaatcactctttcagtaaagaccaccgggatcgactgggggtcgaccggcaggccctgggccaggttcttgcccggcaggacgatgaccttcttaaagtacttcttcaaaggcgtgtccgggttcatggtgaccaggtagctgtgcttgaagtgggaaatcgacttgggcaagggcgaagagccaaaaagcttggaaatccccgaaactgaataaaagaccgctgtggagttctcatcgcttagcgggaagaggtgctcgccagccgccaggttgtccccaaagtaggtcgacttgcccagatcccgcatccccatgctgagcagcctggccggcagttcagaatagtagatcccgaaaataaagttggtcgagctggtcgccaggacttccgccaattcttccgcgtccttttcatttgctgtccagacccggttgatagcgtcatggtagtcatccaggtattcgctgcttgaaaccgccgcctcctggctctcttgcttcttgatgtaggtcagcagctggaacttgaattctttaaagccggaatagcccatcttctggcagaagcgctgaacggaagccagggaagttcccgcttcttcagccaggtggttgatggtcagcgactcaacattggtcaagtcggaggtcattctcttcatgattttccggtcagatttggagagctcagaagtctcaaccgtgaaaaaattggtaatgtccatttatgtccctacttttgataaatttgctttaattttatcacaatagtgataaaaatggctagccgtccaaaaagaatataccttatttcccggtcaagtcctggtaggccagtttcccgaccgcgttctgggccaaaaggatctgctcgcgctcttccaggcccgtgtaatggctcatgaagcagatgtcatagtaactgtctccggcaaaaatccgggccgcgtcatgctccgtgtcttccagttccccggtcttgctgtaagagcagccctcgggcaggtcctggaggagcttgttaacggactcctggtaaaagagggccttctggcagacctggccaaaaggagacgggtcagctaagagccgctctaagagctccagggcagtttcagcggaaaggtagttttcccggtcagtcacttccatcaagtaccggcccaggtgaagatgggcaaattctgcttcaaaccaggcggccatcttggcaaagccgataaaatcgatcaaaaagttggtggccgtgttgtccgagtccgacagcatcaagtccagaatgtcccgcagcatccagtccctttgggccaggtggcagagcatcccgccctcaacgatcttgtcttccgggacatggaccatctggcttaagtcctgcgggtgggcctggtagtagcaggccacggccagcttgatcaggctggctgacttgaattcttccccggctaaggggctggcgtagaggacgccggtcttgtctttgatcaaaagggcggttttccccggcaggggggccaggatgtcagcaatcttcttaaaatccagcattttatctcaccacgatattatcgccgacgcattcggcgtaactattcaaatccgggtcctggtcaaccatgaagatggcgtccaggtcggcaaaaatcgtattcgggttggcccggtagaaggcgcaggctgccgccaaagactcaattgactcaatcatgctgccgaccatggttggcaccccccggctttcggctaagtcgttgatcttctgggcttcagacaagccgcccgtcttcatcagcttgatgttgatgtagtcgcaggcatttttggccaaaactctttgggcatcctcgtagctttccacggattcatccgccatgatcgggtaaggggagtggcgggtcaagtaagccatggaatccaggtcccaggccgggaccggctgctcgataaagtcgatcaaaaggccctgcttgtgccagtattctgccgcctgcatggtctgccggacatcccaggcctggttcatatctaagcgcaggtgaaccataggaccagccgcgtaggccaggtcttcgaccagcttgatgtcccgctttaaatggctagcccccaatttcagtttaagggtcttgaagccctgatcgaccatcttctgggcattagcgatcatttgctcagccttgccgatgctgatggtgtagtcggtctccacgctgccgcccttgccgcctaagagttgggagagggtgaggccaaaaaggttggcccgggtattgtagagggcgatttcgaccgcggccttggccggggcattgtggacgatggaagtcttgaccgtatttaaaagttccttccagtcggtcaggttcttgcccaagacgagaggcttgatcgtttcttcaataacggcccgggcgctggacaagctgtccccggtcactttttcattaggggtgcaggtaccgacacccgttactccgttagccagtcggaccgtcacccggacggcgttgacggcgtcaacccggtgcagcgccgtgacgaagggctgctttaagggaatctgcttaatgtcgacctgcaggtctgcaattgccaattgttcagccattttttcctccttgtttattttcctgtttctttatttttcttttttctctttatattttcctacttgtcaaaaagcagttcataggcccaccgctccgggtcgaccgagtcgctggtcaccgtaatgatgccccggtagacaaagcccaatttgtcagccaggtgctggacggcctggttctgcttgcccgtatccaggcggaagctcttaattccattttcttggccaaaagcaattacttttttcagcaaaagctggctgagcccctgtccgcggaaatccttcttaatggcgaagcggtgcagagcccagtagggagaacttcccgcccaaatcgggacttcatagttggggtcaaagtcggtcgcggccatatatgcggcgacttgcccatctttaagtaaaacccagccctggcggttgtccaggtcttcttcaatgctggcccggttagggtagccttcttgccactggctggagttttgcgccttcaaaagggccttggcgtctttgatgatggcgacaatgtcctctaggtcccggctttctgcctttctgactaaggtttcttcagtcatcttaagcctcgttgatgtggtctcttaagtagctgtattgcatggcgtcttccagctggctggtgtccacgcctaaaacttgggccagggcataggcaaaagcccaggaagtggccggcccccggctggtgaccagcttgtggtcctcgtcaatgacagctggggtgtcgacgtaggtgctggccgggttttcactggcaacttgttctttaaagtccgggtggctggtccacttggcttcttttaaaaagccgtacttagacaaggcgatcggggaggcgcacatggcggcgttccacttgccggccgcgaagcgctgcttcatcagcccggccagcttctcgcttgctcttaggtgcttggcgttcggggccccgcccgggaaggcgaccaagtcgtagtcaagtagggattcgtccactaacttgtcgcaggtaaagcggatgtcgtgtccgccagtgatggtcaagttgtccagagccaccatatcgcaagggatgcccagccggcgcaggacgtcgacctggcttaagccttcgatttcttcacatccatctgaaaaaacaattgctgcagttggcatagttttcttctccttttttctaaaaatcacttgctcgtgcttttaattttttgttaatgatttgctacctcctattgtacaaaattgcggtcagcttgtcgctgaaagcgggctattttcagcaatttgcaattgccggctgtgatcgtttaaaatggatacggctttttcctttggaaaaataagcaaatcagtgaaaaaacagaaaagagcaaacaatgcagttcgtttacctcattatcttaggcgtcctggccggcatcgtggcggcggtggccagcatggcgtcgcttgtctcttacccgggcctgctcctcttcggcctcagcccggtcagcgccaatatgaccaatacggcggccctggtgacgaccggctttggctccttgtcctcctgcttaaaggagatgcgggggcactggggggagctttggcgctatgccttcttccaattgaccggggccttaattgggggctggcttttagtccagttcccgggaaaaatctttcaaaaattagtgcccttttttgtccttttttcagctggcctgctcctctacagcggccggcaaaagcatccaaagcaggcgaccaagctgggaagaatcggggcttattttggcttgttcgtggccgggatctatgccggctactttggggcggcgtcgggcgttttgaccttgatctttttgacggctttaagtgactcttcttttgtcgtcatcaacgccattaagagtgtgatcggttctttagccaacctggtggctctggcgctatttgcctttaagggcggggtcaactggccagtagcttttcctttggcgattggcctctttattggtggctatttcgggcaaaaaatgattaaatatctaaagcctgcctgggtcagatggatcacggcttgcttctcggtccttttggccatttacctgggctggcgggcctggggttaactacccaagccaggcaaagtaagttagaatagttattgattgatttaaggaggacgggcatgaaaactgaagtttatctggtcagacatggggaaacgctttttaaccgcctgaacaaggtacagggttggtgcgatacccccttgaccatcaaaggaattgacgatttaaagaagacggctgacgccctctctcaaattcattttgacaacatgtactcgtcagacttgaagcgggcgattgacaccgtccacttgatgaaggacgtcaaccaggtgtctaacattggcaagatcaaaaagctgccggaattcagagaagttttttacggttcttttgaaggcggcagcatcgatgatatctggctcggtgtttctaaagccgcgggtattccagcaaccactgacgtaaagaagattatcgataccatcggcatctacaagttccgggaagtcactaaaaaggctgaccccctccatttggccgaaagcacggaagaactggaaaccagaatgtgccgggccatcaaggtcttgagaaaagagaccagcggcgaaggccgggtcttgctggtttcccacggggactttatcaagaccctggggatcaagtactggaaggaaagcgacggcctgcatgacatcaccttcccggacaacggcagcgtcagccgggggattttggacgaagaaggcaattttgaaattgtcgactacaactgcaaggctgaagatttatgaacaaggagacagactagaagatgaagtgggatacgcacacttttacgctcgttttgctggtgatcgtgggcctgtgggaatttgcccggggctataacatccagcggatggggaagaaggacagcctgccagccaagtcctactacctgaccggggccggcatcctggccgtggctatttattacgcggtaaagttgtggggctaatatgaacgttcattcctggtgggttccttatgccatcttgcttttcggcatctgggatttaattaccggcatcacgcgcctgcgccggcagaagcagggcgtcaagcagaaggggctggggggcaaggcttttgtcctcttaggcatcctcttcatcattactggaatctgggctttttggctctagaaggcaaaaaattatggcaaagttggcactgctgaggcatggggaaagccaggccaatgcggcaaacgtatatacaggctggaatgacgtccccttaacggataagggccggcggcaggcctgggcagcaggggagaaattaaaagaagtcggggactttcatccgactatgattcacacctcccttttgtcgagggcaattgagacggcgaacatcgcggccgaagccgcgggctttttatacctgccggttgcaaagacctggcggctgaatgaacgccactacggggccctgcggggcctggacaaggacgtgtccaggaagattttcggtaaagagcaggttttagagtggcggcggggctttgacgcggttccgccagcgcaagggtcaccaactatcgaccgccgctattggggagtggaccctcagcttttgccaagagcggagagcctgcaccagagccagctccgcctgttgccttactatgaagacgaggtggccagccgcttagtggctggggaagaccagctgatcgtggcccatggctccagcctgcgggcgctgatcaaatatttagaagacatcaacaatgtggatatcctcaagctggaggtgcctaacgcccaggccattgtctatgactttgaccaggagctgaacattgtggataagatgatcaccaactgattacaaaaacaggctgaggcctgttttttattttgcctttttttcttctttttttattcggaaaaaatcagcggttattgaaaaacttgacatcgcttttgggagtgctacacttagtcacaagttattagaaaacttgtgaaaagattttacaaaaggaaagtgtgataagatgccagtaatgacagcccaagaagtgatggatttgattcccaaccgctacccgatctgctatatcgaccgggtggaggaactggaagccgacaaaaggatcaaggccgtgaagaacgtgacgatcaacgaaccctttttccaggggcatttcccgggaaatccggtgatgcccggggtcttgatcattgaaactttggcccaggcggcctcgattttgatcttgaagtcaccggccttttacaagaagactgcttatcttggagcgatccaccaggccaagttcagaaggatggtccggccgggggatgttttggaaatggaagtgaagatgctcaaggtccgggctaagacggggagcgtggcggcagtggctaaagtgaacggggacctggtctgccagacggaactggtctttatcgtgggtgaccgggacggcaaggacatgcaggcgaaaaattagaaaaagcaaaaatttatggcgacttttgccagactgctaaatgtcgggggcaatctatggtaaaatctattttgatatattcaaaatagattttttaaaatggagctaaatatgcgcaaattatttcttttgagaggcgcgcccggctctggcaagtcttcatttatcgcccggcaccacttattgccgtacgcgatcagcggggatgcgatccgcctgcttttggcgaacctgaccgtttactatgaccagaagactgacgttctgcaccaggttattccgcggcatgtcacggaacagaccaagcggatgaaggacaacttggttgagcacaagatgtcctatggggaaaccgtcatcgtggacgggactcacattgtcgccagcgagatcgatcactacaagaagtggtgcgagaagtaccattacgagtgctatgtggttgatttgatgcagaaccagaccctggaaggtttgttgaagagaaaccagatccggacgcaatacgactgggtgaagccggaagtcatcacgatgatgtacaattcttacaaggcgcacccggagctgcccaagtgggttaaggggatcaagcccaaccagatggagcaggccctgcagcagagagagaacaatctggaccattattcacatgtgattgccatacctgacgaggtggcggaagaagattttccacgtgtgcacatttccaacttctacttctctttcaacgacaagttcagtgaaaagtacgggacttaccggaatgtggtgacgatcggcaagaccaaggaagaggtggtcgacgagttccgtctgccattctttgcctttaagttccaccacaagcactttttgatttcggcttacccgatcagaaacgagatgctggacccggtcaagaaggtcaaggggacctggtcttacacgaccggcctttacaacgtggctgactttatcagagaatttccgaaaaacgataaatcacacgttcaccagtttaatttgagcaatctggaccggaccagacttttgcacatttggtaaaagacagagaaaaagcttttcctcaggattgcggggaaaagcttttttcatgtgattacactaagctgacagacttgaatcacaaacagctggtttatcacttcttgtttagaaaacgggctgcgagaacggtggatgccttgatcatgccagaaggaggggggacgcggacggaaaaatacgtggacctcaataatgactggctgccaaaagcagatcaaaacatcgctattttgctgacgcatttgaatgccaaagacgtgattcaatgttttgttcaacactaaatttccatacataccaaaaaacgagttgcgcgatgcaactcgtttttcatatctattcaaatctattagaagtcgaaagccaaagcgcccattgggtcccatggcagaagttcgattgggttttccttgccttcgtcgtaagccttcttaacgtcttctggcaggaaggccttgttcaaaacagcctggtaaacgaattggtcgaaccattcgtcgctcatgacgaagtagcccttgaagcctggcttgtcaccccatgagttttcgatcttccacttagttggcttgtcgtcaaccaggtcaacggcagtgataaccatggcgtggttcatcatgctttcgcctgagtccaggcggtcagccttgctcattgagaagtcgtagtcaaaaagctggtctctttggtagatcttagtgtccaaaagcccggcttcccggtcaccgcccttggaaacgtctgaaccaaaccaaacaacttcgccttgcttcaattggttgatgatcaagtccttgaacttggacagttccaggttgaggtggcggacttgccggccgccaaccacgttgcccaggtattcaactgagaagaccttgttgtatggcttgtcagcagtaggcccgttgataactgagatgtagttttccaggtcccagccaacgtacttcttgaagaagtcttgcggggtgatgtccttgtcgatgtggtagttgccgtcatcgtcagtgtattcaaagttgaagctctttggcggcaggcccagtgaagtagccagcatgcggaagatagcgtccaaaagttcagccttgtgcgcctctacttcttctgcgctcttgccttcgttgaccaaagcccgcagttccaaaccgcccttgcggagcatggtgttcaaagtgtcattcaaagcgcgggagttttctgagttagcagtttccgggtaaaccttcttcggcacgatcccgtacttttcaatcaagccgcagagcatgtcccattgcccgccgtctgattgcggagtggcaaagaggaaggagaccttccggtcgcccagtggcttgtcagctgagccgatcacgttttcaaagaagaagtttgacttttcaaacttgtcccagaagaaggtgtagctctgtgacaattcaaagcccttcagcttgaattccttttggattgagtgacgcatggtgttcaaagcactgaacatccagcagcggcctgactgcttttggttggtaactgaaccagtgtcgatttccactgagaaggtcggatccaggtccaccttgctttgggtgctttggctggccttgaagatcccgttggtttgggcagcgttggcagctaccccgtaagctgggtgcttgctcaagttgctggtgaagttttcgatcgtgtcaaagctgatttcttttgacatcctattgcctcctgtttctcttttttctttttaaaaaactgtctaagctcattttagcccataaaaacaaggccgtctatcaaagtagcttaatttgttggtttcccggcccaaatgttcgctaattccccgtgcttttgacaataagcgatcacttgcgggtctaaaggccaaacttttaagcccgtctcctggcaaagcttttctacttgcttcattacttggtccaaagttccttctggtgcccccggcgcgataaaaagctggttcatggcccaaaccggcccgctctttctcttgatcaagaggaggggacttttggcaactaactgaccgtcagccttgatttcaatgactttttctctttcttctggcatagcttttcctttcaaagcagcaaatattttgcggtccttgccttttcctttgctgtcttaactagtgtaaaatagatgtctagataattaaaggagcaaaaaaacaatgaacagagtaagaggctttgaagtagttaagaactatgaaggacaaggcttgaccctgccccgccggcagactttggccagcgccggctacgatatcgaagctgcccgcgacatcaccatccccagcatctggagcctgaacttcgtcaggatcttccgcttgatcagaaacggccatgacttgatcgaaagcgactttttgcaggctgaagaagtcttgaagccgatcttagtcccaactggcatcaaggcctacatgccagaagacgaggtcctgatcctggccaaccggtcctccaacactttcaagcgcaacctgtccttgccaaacgggatcggtgtcatcgacagcgactactacaacaaccccaacaatgaaggggagatcttcgtccaagtcttgaactatggcgtccgtcccctcaagatcaaaaagggtgaacggatcgcccagggtatctttattaagtacctcaaaactgatgacgaccagccaatcgaaagccagcgcttaagcggctttggctcaaccggcaagaagggcggcaagtaatggccagagctagaacccagtataagtgccggtcttgcggctacatctccgcttcttacctgggccggtgcccgaactgcggggcctggaaccagtttgaaaaagaaagccaggaggtccgccagacttctactaaagctacccccagccgcctgatggccagcgtgggtgctaaagaagccgttaaaatgtccaccgtcaaggcggaaaaagaagggcgggtcttaaccaagtcctctgaacttaaccgggtcttaggcggcgggatcgtaccaggctctttggtcttgattggcggggaccccggcatcggcaagtccactttgatgctgcagatcatgagcgaactggccgaaaaatacaaggtcctctacgtctccggggaagaatctgccagccagatcaagctgcgggctgaccgcttaggcctgggccaaagccccatgcttttatacccggaaagcaacatggaacatatccgcgaccagatcgacgacgttaagccagattttgtcgtgatcgactccatccagaccatgaatgaacccagcctggactccatggtgggatcagcttcccaggtccgggaagttaccgccgaattgatgaagatcgccaagctggaccaggtcactgtctttgtcatcggccacgtgaccaaggaagggtccatcgccgggccgaaaatcctggagcacatggttgacaccgtcctttactttgaaggtgacgagcaccatgcctaccggattctgcactcagtcaagaaccgttttggggcggccaacgaaatcggcatgtttgaaatgaagaccgaaggcctggcagaagtgaccaatccttccgcggtcttcttagatgaacgcctgcccgactcaactgggtcagccgtggtcgtttctttagaaggtacccggccgatcttgggcgaaatccaggccctggtcaccccaaccgccttcggctatgccaagcggactacttcgggcctggactacaaccgggtctccctgcttttagccgttttggaaaaaagggggaacctaatgctgcagaaccaggacgcctatttatcagcgaccggcggcatccgcttaaacgaaccggccattgacctggccatcgccatggccattgcctccagttactatgacaaggaaatctccgcgactgactgctttgtcggggaaataggcctgaccggggaagtccgccgggtcaaccagatccaggcccgagtcaaggaagccggcaaaattggcttcaagcggatttttatcccgaaatacaatatgagcccggccttgcaggatttggggattgaggtaatcccggtctccagcgtccgccaggccctccactaccttttctcatagagaaaacgaatgtaatatttcatacgatttgcacttttctcttgctaaaatgctggtaagaactacaatgtagtatattgattgaggatagatggaaaggaaaaatattaatgacagttccagtattttattcaatcagtgacgacttcaccccatacgcggctgtctcactgcactctttagtcaagcatgctgacccaaagcgtgactacacggtaacctttttgcaccagggcttaagccgggaccatgaagaggccctggccgcttataacagagacaatgtccacattaagttctacgagatgtccgacgaactcctcaagccaatccaggaccggaaggagaactacttgcggggcgacttctttgccatgtccattttctaccgcctctttatcccggacctcttcccggaatacgacaaggtagtctacatcgacagtgacacggtcttaaatgacgacatcgccaagctttatgaccatgacttaggcaataatctcctgggtgcctgcaccgacacttccatccagttcgtggaaaagatgctccgctatatcaaggaagtcttggctctggatccgaaggaatacatcaattcagggatgctggtcatgaacgccaaggccttcagagaggaaaacttcgttgacaagttcttcagcctcttgggccgctaccactttgactgcatcgccccggaccaggactacctaaatgaaatctgctccggccggatcaagtacctggacggccgctgggacgccatgccaaacgaaaataccgcggccttggaaaatcctggccttatccactacaatctcttctttaagccttggcgctttagcgggatccagtatgaagactacttctggaccaacgccgaagaaaccatctttgcggatgaactgaaggcagaactggccaagacgaccgatgaagaaagggacaccgaataccacaagctggaccacatgctgggcaagctggacatgaccctgcaggatccccacaactgggcccgggttaaggaaaatgagcaggtaactttataattcacaagaagagctttccaaaattcgtttttggaaggcttttttagtaatttctatgtttatgatccagaaccaggtgactgggagcgcagatcatccgcctgcacacccgattaaagcgcctgcctttagccagccagctccgggtgcgggtcggagtctaccagtatgatgagaaagtcagtccttctttagcctgtgaccgggccaagctggcctgcgaccaagcaaagaagcagcctgagcagagctggtgcttatacacttcggccatgcaggaaaaggaagaattaaagcagtacttgatcgaccacctggatgaagctattgaaaagcactacctgcaggtttactaccaaccagtcatctggactttgaccggccgcctctgcggggcggaagacttgatccggtcaagggcttcttgtcaccgggcgactttattcccctccttgaagagatgaacttgtcctacaaggttgaccgttacgtcatccaagaagttgcccagggcctgcgcgggcgtatcgacaagggagaaaagctcgtgccagtttccatcaacttgtcccgggcagacttccagatgatggatcctttgaccgaattaaaccaggccattcacaacttccgccaggccggttatgaagtctggatggacgactttggtagcggctattctttcttaaactatctcaagaattttgaattcgatgagatcaagctggatatgatcttcatgaaggactttgacgaagcttcaaagaagatcttaaccgcctgcgtgaagatggccaaggacctgggaatccatactttggctgagggggttgaaactaagcagaagttggacttcttgcagtcgattggctgcgagcggatccagggcttttactacagcaagcccttgccaaccggtgagtttgccaagctggtggctgaaaaggggatcgaaattgagaactggcagcagagcaagttctaccagtgtgttggcctggtggacttggccagcgacaagccgacctgcctggccttagacgatggcagccatttccgcttgctttatgtcaacgaagaatttcagaaagaagtcaagcgggcaccggcagtctttaagcagatcgttaatgaatggaacaagccggaatcagaaattgccaagcggctgcaggcctttgccaaaaaggttgaccagggtgaggcaagctactttgactttaagcaaaccgagcaatatctccgccttagtgcccagcaaattgccagacacgaaaattaccagatgctcctgatcaacgccagcgacatcaccgtgcaatacctaaaataagtaagaagcagtcatttggctgctcctttttttactttcaacccgtaaaaaagttgaaaaaacaaaaaatttcaaaaaactttttatgcatttaacctagaaaagacataaaatccgaacaattttttcgaaaaagcaatttttccaaaagtgcgcgaggattttgaaaaacaaaaaaggaaacaacctttacaacacctcctggcgtttggcagaaaagacaattaaaaggcaaaagttgacgaaaaagaaaaaacaaggtaaagtagta

SEQ ID NO: 2207 - DNA, 244 bp, Unknown
  gut microbiota DNA sequence
cctttgtctaagactgctttgaggaagaaaataaaactgcttggcaagctcaagaatctggagcagaacaatatcggcagaaagtcgtatgacaagagctaccggtcagcgcaagaaactgtcagaagctttatcaaccatgcgataaacagaatgatcgagacagagcatccggcggtcattgccaaggaagacttgacgttcgtaaaagaaaaaggcgtcaaatcagataacagcagattcg

SEQ ID NO: 2208 - DNA, 10396 bp, Unknown
  gut microbiota DNA sequence
taagtgattaaggacaaaaaagaagccccgcttcatggtaaaggaggcttctgagatttatctgtgtttaattgcaaaagttatttttcgtccagtcctttttttcccttgaagatcaagttcaaaaggacggaagagattgaggcgatgacgatcccgttttctaggaaaagctgcagttcacttggcagagcctgaaagatggttgggtagacggaaacgcctaagcccaggcccagggagatggccacgatcaagaggttatggttgtcgctgaagtcgaccttgagcagcatcttgatcccttgtacggcgatggaggagaacatgaccaccatggccccgcctaaaacggccgttggcatgatggtgaccagggcaccgacttttggcagaaggcccatggccatcaagaggccggctgcccagtagatcggccgcttggaccggatgccggacagttgcaggaggccgacgttctgggagaatgtggtgtaagggaaggtgttgaagagaccaccgaaaatctgggccagcccttcagcccggtagccccgcttgaggtcatcttccgtgatgtccttgcccaagaggtcgcctaaggcgaagaagacgccggttgattcaaccatggagaccagggcgatgatcatcatagtcaagctggatgaccattcaaactttggcaagccgaaatagaagaattgcgggaagtgcagccaggcagcttcagaaactggggtcaaagaaaccatgcccaggcaggcggccaggagagtgccgacgatgaggccgatcaagatggagattgaggcgatgaagcccttggcgaaggcttgcagagccacgatcaccaagatggtgacgcagccgaccaggaggttcttcgggtcaccgaagtccttggcagtggctgacccgccgcccaggttctggatgccgaccgggatcaaggtcaagccgatagtggtgatcaaggtcccggtgacaactggcgggaagagctttttgattttggaaaagactccggcgatgaggaagacgaagaccccggccacgatgattgatccgtacatggtgccgatggagtacttctgcccgatcatttccaaaggagcaacagcctggatggcgcagcctaaaacgactggcaggccgatcccgaagtagcggttgcgcaatagctgcaagagggtggccaggccgcacatgaagatgtcgatggagaccaggtaggtcaattgctctgagttaaagtgcagggcattgccgatcaagatcgggaccgccacggccccggagtacatggccaaaaggtgttgcaggcccaggacaaaagagcggccttgtgaaggttcttgtgtttgatccatttttagtaaataactcccactgtcaaagattaattgaagataacttgcccgtcggcgaattccttgatgctggccaaagcttccaggtgatagccatggttaaccagccagtcgtggccgccctggaaggccttctccacgacaacgcccacgccgactacttcagcgccggcttgttcagccagggagatcaggcccttggctgcttcgccgttggccaggaagtcatcgatgactaagatgcggtcattggcatcaaggaacttggcttcaacagaaatggtgttggtcacttgcttggtgtaggagaagacttccgcggtgtagacggcgtcagtgacggttgaaggcttcttctttctggcaaagaccatcggcacgcccaggcagtaggcggccatgatgccgggagcgatcccgctggcttcagcggtaaggacccgggtgacgccagcatccttgaagaggcgggcgaattcctggcctagggtcatcatcaattggggatcgatctggtggttcaagaatgagttgaccttcaagacgtcgcctggtaaaacgacaccatccttcttaatgcgttcttctaaaagttccatgtgactccttccgagaaaagaaaaaggctccttttaccaagctaggcaaaagaagccgcgccggcaataccggcccttctttacctatagtccggagtttacggctccgggtagagactgctgcccgtatcgcagcgatatataagcagaaacatttgttaagttattgctaaattttacagcaaaaaccgaattaattcaataagattcgctgaaaaatttctaatctggcgcaaaaagtcctaaaatattaaaggaattagtgaataattcgctttttgttgacctggcggcgaaaaacgtgtaaagttgattaattaaaaagtatcaacgattgtttgaaaggataaaatcatgtctttgtgggaaaccaaatttgctaaagaaggtattacttttgacgacgtgctcttgattccagctgaaagtcacgttctgccgaacgaagtcgacttgtcaacccagctggcaccaaacttgaagctgaacattcctttgatctccgctgggatggacacggtgaccgaaggcagaatggcggcagccatggccaagatgggcggtcttggggtagtccacaagaacctttcaattcaagcgcaagctgacgaagtccgtctggctaagaacgctccggtaactgccgaagacacccacgctgccgttgacaaggatggcaagctcttggtagctgctgctgtcggcgtgaccagcgacacttttgaaagagcagaagccctgtttgaagccggtgctgacgcgatcgttatcgacacggctcacggtcactcagccggcgttttgcgcaagatcaaggaaatccgcgaccacttcccgcacaacactttgattgccggcaacgtggctactgctgaaggtacccgggccttgtttgaagccggcgttgacgtagtcaaggttggtatcgggcctggctcaatctgcaccaccagagtggttgccggtgtcggcgtgccgcaattgactgctatttacgacgcggctgacgtagcccgggaatttggcaagccgatcatcgctgacggcgggatcaagtactcaggtgacgtggttaaggctttggctgctggcggcaacgctgttatgctgggctccatgctgtcaggtactgaagaagctccaggggacgtgcagcaaggttctgacggccgtctggttaagtcctaccgtggtatggggtcagttggcgccatgtcccagcagcatggctcaagcgaccgctacttccaaggcggcgtgaacgaagccaacaagctggtgccagaaggcatcgaagctgttgtttcttacaagggtacggtaagcaacgttgtttaccagatccttgggggcctgcggtccggtatgggctactgcggggctgaaaacatcgacaagctgattgaaaccgcccaattcgtccgcatttcaaacgctggcctgcgtgaatcccacccgcacgacgtgatgatgagcaaggccgcacctaactacggaggaggcatcgacttctaatggcaaaaatcgatttaagcaattttgacaagatcatcgtcctggacttcggcagccagtacaaccaattgattacccgccggatccgtgactttggcatctactcagaacttttgccgcacacgattacggcagaagaagtgaagaagatcgctcctaaggggatcatcttctccggcggaccgaactcagtttacgatgaaaacgccctggacgttgatccggaaatttttgaactggggattccaatcttgggtatctgctacgggatgcaactgatgacccagaagctgggcgggacggttgaaaaggccggggaagctgaatacggctcagcccacattgaagtcaaggaagctgacagcacgctttacaagggcctgccagaaaagcaggttgtctggatgagccacggggacctggtaaccaaggtgccagaaggctttgaagttctggcttcaagcaagaactgcccgatcgcttccatggctgacccagaccggaagttctacgcaatccagttccacgctgaagtccgcaactcagaatacggcctggacatcttgcgccgttttgcctttgacgtctgcggggccaaggacaactggaccatggatgactttattaagctgtctgttgactcaatcagagaagaagttggcgacgccaatgtgatcctggggatctccggcggggttgattccagtgttacggctacccttttgcacaaggcaatcggcagccagttgacggcgatttttgtcgaccacggcctgcttagaaagaacgaaagcgatgaagttatggccgctcttaaagaagggctgggcgtgaacatcgtcagagttgatgctaaggaccgcttcatgtccaagctggctggggtaaccgacccagaaaagaagcggaagatcatcggtaacgaattcgtgcaggtcttcaacgatgaagccgagaagatcaaggacgccaagttcctggcccaagggaccttgtacactgacgtgattgaatcagggaccgacacggcccacacgatcaagagccaccacaatgtcgggggcttgccggaagacatgcagttcaagctgattgaaccgctgcggcaattgttcaaggacgaagtccgggtcttgggtgaaaagctgggtctgccacacgacttggtatggcggcagccgttcccaggtcctggcctggctatccgggtaatcggggagatcactgaagagaagctgcggatcgtccgggacgcggacgcggtcttgcgggaagaagtcaagaatgctggcttgcaggaaagcatttggcaatactttgttgctttgccagggatgcggagcgtcggggtcatgggcgacggccggacttacgactatgctgtctgcatccgggccgttacgtcaattgacgggatgacggctgactttgcccagattccatgggatgttctgcagaagatctccgtgcggatcgtcaacgaagtcaagcaggttaaccgcgtactgtacgacgtgacgagcaagccgccggcaactattgaatacgaataaaaaagcggaattttctccgctggggaaactacctggttattgccaggtggtttttttgtgtaaaaatgaaaaaatcacttaacttttttattttttaatatatacttaacacatggaaacgtgggggagaatttaagaaagtcgtgagtgttttgtattattcagattttatcaagggtaaccgggttaggtttatcgagatcattcttttagttattggcggcagcacgcttcttgccggcaacaatgctttgctgacgctgctgggggacagcttgcgcaaaggaaacctgctgcttttcgtgtcaattatcgggatcaatgttgtggttgattccatcggcagcagcctgtcttatatagccaattacttgtatgataaacagactcaggagtatttccacaaacttcggtttgctgaagtggaaaaaatctacaacagtggtaacaaggcaccaaaagtttccagcgttcagaacagtttgacccaagatttaaacatgctgggtgaaaatttcctggctccatggctgaaaattaccgcttgtggattggatgtagtcctttcctcaatcatcgtctttacctacagctggcttttattgctggtaattctgcttcttgcagtgttgatgtttttcatgcctcgatttttatctccagctttgcaaaaggctatggatgatatttctaatgaaaacaagcgttatctcgatatgctggaaaaatggtttagcggtttgagcgttttgcagagataccacgtcaagcagaagcttttggcggtgacgactgctcaaggaaagcaacttgaagatgccaatgtcagacggtccggccggatgcaatttgccagcggcgtcaacaatgccgcaaacgtgttgtcccaggccttgattttgctcgtttcaggtgtcttgattattactggccggatgaatttcggtgttttctttagcattggcaactttgccagcacgatttttactgaactgggggttgtggtcaaccaatatactattttgcagtcaagcaagactttaaacgccaagctcagaaagcagcttgcagttcagaccgaccacttagaaaagactgaaagtttggaccattttcagtcattgtcagttcaagccttgtctgtagcttttagtaatgaggaaaaaatcacttatccggattttcaaatcaagcggggagaaaaaatcttattgtcaggtgacagcgggactggaaaatctacgctttttaagctgatcctgcaggagttgccattggcgactggaaagatttgttttaaaaacgaagccgggcaagaaattgagcggccagacctgtctcaaattggttatgttccgcaagatccggttctctttccaggtacaatcaaggaaaacattacaatgtttaactccaagctgaatgaccgggtaatgcattttgttaagcaggtgaattttgaaaaagatctggctaaattcccggcaggagtagatacggaactcaatcaaggcaagcatgccctgtctggcggccagcggcaaaaagtggttttggccagagcacagatccatgacagtcagctgattttcattgatgaaggcacttcagccatcgatacacacaatggcttggaaattctgcagaatctgttgcaaaccgatgcaacgattgtttttatcgcgcacaacttaactgaagagatgcggcagttatttgaccgggagattcatttgagtaatactgcaggttaaacgaaaaaagcgggcaagtttggcttgtccgtttttttattcattgaaatatttgctaaaagctttgcgatattggctgggggtcatttttttccaggctttaaaattacgttctaaaactttggctgaagaaaagccgcagtaattggcaatgtaggcgacggaatagtttgtactcagcaagaggtatctggcgtgcatgagccggacttgttttaagtatttgcctaaaggaagtttagtcacttggctcaattctttatttaaagtcacttgtgaaattctaaaatgttcagcaatgctttgtgccgtgatattggtggaagagttgttggcgatgtaggcgatcaccgtgtcagccaaagattggtttggcggcgttgtgacggtagttttttcagtatattcgctgtcgatcagggcaatcatttgaaaaaattcgctcaaaattaaaaagcggatactgtcactgatcggctggtcgacgagttcagcgatggtaatcagattttttcttaactgccggtagctggctgtatcgcggctgatatggtccatcttgatccgccaatttttactggaaggatattctttttctaaaaaattattgtcaataatcagtcccattacataataagaccggtctttgtgccccgtcgcggcatgaatctgtgagcggtcaatagcccagatatcgccggaattgtaatggtgggtctggccagcaatgacaaccttgaagtcttccccagataccaaataatcaatttcgattccggtatgccagtgggtgggggctttaggagcgtaatttgatcttttgaaaaatttgaaggggaggcgggcgagattgtcgacctcttcgtaagcaatgggcatgttcttttctcctttatgaattgtccctaagtgctttaagaaatggggagtaatcgctttcctatatgataccatactgtttgtaagagcaaatagcttgctgctacaactgatttagacgaataaacctgaacttacaatttaggaggaaaaataatggctcattttagaaaagactttttgtggggcggcgccgtagctgctaaccaagttgaaggtggatacaatgaaggcggcaagggcttgtcagtgactgacattaccacggccggctctttggaaagtccgcgttatctgacttacactttggatggcaaggatggcaaagtagctgggatgttcgccagctccttgccaaagggcgctaaggggaagatttttgacaatgaatactacccgaaccatgtagcaatcgatttttaccatcattacaaggaagacatcaagatgttcgcggacatgggctttaaggtattcagaacttccattgcctggacgcggattttcccaaccggtgaagaagacaagccaaaccaggaagggctggacttctaccgtagagtctttgaagaactgaagaagaacgggattgaaccattagttacgatttcccactatgaagacccattggctttaggcgaaaagtacaacgactggcaagaccgcaagatgattgacctctacgttaagtacgcgacgaccttgttcaaggaatacaaggacctggttaaatactggcttaccttcaacgaaatcaactcatccttgatgttcttgaagctggtgggtgatggcaaggtatctgatgcagattaccaaaaggcttaccaaaagctgcaccaccaattcgttgcttctgctaaggcagttgttgcaggccacaagattaacccagacttcatgatcgggaacatgattgccggttctgtttactacccaggcacccctgatccaaaggatgctttggctgcccgctatgaagaagaattgagccagctttactgtgctgacgcgcaagctaagggtgagtatccaagttttgccaagcgtttatgggatgaacacaatgttcatttgaagattgaagatggcgaccttgaagtcatgaaggaaggtaaagttgacatgtacaccttctcatactacatgtcaaacatggttaccacccatgatgttggcgaaaaggctaagggcaacttctctgctggcgctaagaacccatatcttgaatactctgaatggggctggtcaactgacccagacggcttgcaactgtacttggaaaagatgtatgaccgttatggtatcccaatgatggtggtggaaaatggtcttggtgccgttgataagctagaagatggtactgttcatgacgattaccggattgactacttgagaaagcacatcaaggcgatggacaaggcagttgaacatggggttgacctgcgtgcctacacgacttggggctgcattgactgcgtttctgccggaactggtcaaatgtccaagcggtatggcttcatctacgttgaccgtgatgacaagggcgacggtacgcttaagcgcctgcctaaggattcatactactggtaccaaaaggttatcgcttcaaacggcgatgaattataaaattaaagcgtaagaaaagcggacagtttgccaatgtcattaagttaaggcattgactttgaacagggaacgctttaggacactcatctaagttagatgggtgtcttttctgttttttggggcatgacaaataagcagtcaattgactgcctttttataaaattcgatagtttaaactaacagaaccttgaaaccgtaaaggtcttggatattttcggccttttcggactggatgatgataagcttctatttcttcgatcatctgctttgaattgcctatcatgggcgttgtataatagcggtgaactatgttggccacctctttaaaatctatctcatgaggccattttctgtgagcatcagctatccggcaaagggatatgattctgttgaccacgttaaacataatcagctgagagtacaactcgatttcttgaaacgctggttttttcgaatgaaaacatactgcaccgagatcatactttagcttgcgaaatgagctttcaatattctagcgcagatgatacagatttctcatttcactaagtggaaagtcactcgggcttagattagtagctagtacttcccacacttagtctttcccgatagtgggtcgttgatcttaagtttaacgattctgcagtggaccggacaaaaactttccaaatcccagtgcgctgtacggtacttgggtgaatatttgtccttatagcgacgatttggggcattgattttgtgatactccggatgaagcttcttttgcttggcgctattggtgatgttaaacgtcatctcaagatcacattcttggtcgggaaaagcactgatttcccgaatagcacctttatctttagttctgaggcgaacaacatagttgcagtcaggcagtcgatttccatgctcgaaaagactaaaggattcatagccacgatccatcagtacgatatagcggtgctgaagtcttaaggtctaaagcatgtgcacagccgtactgcgttcatccataccctttcgtgattgcaataaacagtctaggtaacaacaatttgcgatatcgtaaaggatattggcaagaatcaagcaagcacctttgg

SEQ ID NO: 2209 - DNA, 513 bp, Unknown
  gut microbiota DNA sequence
cctagcagtcgatagccatgatacaaagcgggctgtttcaaagttgaattgaattcatacagaattgccttaaataatctaggattaaccttcgatttctgctgttcgtaagccgacgcggtcattcgcttagagggcttaggaaatgcgtcagctagctccttgttcaagcagtttccttgcatggcaatagtggtcttaatgaatgtcttagcatccaattttcttttacgcctgaaatctttgctcggatgataagcaaagtaattgatgcattcggcagccatgtctgtaacagaatcaatctgtcttaggacttgatgtttcttagtcatgaaaatacaccacctttgataaaatccctaatcaaagatagcgtaaagcggtttcaaaaaataagcaaaaaaacactcatcaaattctgatgagtgttctaagacgttctccgttcagagtcaatgccttaacttaatgacattgcccaacatgggtgcctcttttgagtaattattt

SEQ ID NO: 2210 - DNA, 3853 bp, Unknown
  gut microbiota DNA sequence
gaaggatacacctgttcccatgccgaacacagtagttaagcttcttaacgccgaaagtagttggtgggaaactgcctgcgaggataggaagctgccgcgcgaataaagagtcagacggaagtctggctctttttggtttctatagtaaaataggtaagagtctagagaataagaaagatataaagacatggacagaatcgacagagaaaacaatctgatcagaattaacgctttcgatgatcccagactaaagctgtttactgattacaatgaagctcagctctttcattactatgagccagaagccggtattttcatcgctgagagtccgaaagtaatcgagcgggcaattagggccggctatgagccaatcgccatgctggtggaggaaaaggccttagaacgtgatttatcggactttgaccgggagctggctgctaaccacgatcacttgcttgactttccgatctttgtcgctcagtctgaccttttgcgccagctgccaggctataatctgcttcggggcgccatttgtgcctttcgaagaaaaaagcggccaagtctgcgtgaatttgcggctgccttgcccaagcatgccagagtcggggtcttagagagcgtcgtcaatccaaccaatgttggcgctattttccgctcagccgcggccttaggcatggacggggtcttgattacaaccgactccagtgatcccttataccggagaagcggccgggtcagcatggggacggttttccaggtgccttggacttatctggatcaaaaactttggcgggaaaaaggcgtggccagcctgcaggaattgggctttaagaccgcggccatggctttaagggacaacacggttgacatcgacgacccggtcttaaaagaagcagaccgtctggctgtcattttaggttctgaaggaccaggcctgttgccgcaaacgatcgcggagagcgactatacgatcaagataccgatggctgaaggagtggactccttgaatgttgccgccgctagctctttagccttttgggaagtcaaaaaaggactggattaagttccggtccttttaattttgtattttcttttttacttattcaccgctagccccgtagttgcttaatacccgggcacttgggtcggtgacgctttccaggctcttccagcttctgtttggcatccagtagtccttgatccagtcagccttgccagggtagaattcttcaaaaatatcccggtaaagaagtgattccttggtaaatggcgtccggtatgggtacttttcgcctgctttagccaggtcttcatcgctgtacttgctttcagcgtattccttaaggtcatcaaccatggagtggcccacggcgtcgctgaaggctgctttttcccgcataaggacgtcgcggggcagccagtcgccttcttcaaaggccttccggagcaagtacttgcccttgtggtagtggttcatcttcaagtccggatccacgctcatgacgtagtcgacgaattcccggtcagcgaaaggtactctgccttccaaagagttggcggaaatgcagcggtctgcccgcaagacgtcgtacatgtagagctctctgagccgcttagctgcttctttttggaattcttccgggcttggagcgaagtcggtgtatttgtagccaaatagctcatcagagcattcaccagtcaagatgaccttcaagtcagttgtttcatggatcttcttgcagagaatgtacatcccgattgaagcccggatagtcgtgatgtcccaggtttccaaagtatagatgacttctcttaaaacgcccaacacgtcttctctggtcatgatgaactcggtgtggtcagttcccaggtagtcagccacttcccgggcatatttaaggtcgatcgggttttggtccatcccaatggcaaaagttctgatcttcgtatctggctgcaggcgggcggcgatcgagcagaccagggaagagtcaaggccgcctgaaaggaggtagccgaccggggcgtctgaggccaggcgctggtcaactgattcaaccagaaggtcatgaatcttgtgagtcgcagtctcaaaatcgtcagtactcatcttgggggtgaggtctggttcatggtaggccacgatcttttccccgtcatagtagtggccaggcaggaaggggtggatttcgcggcagaggtcaagcaggttcttgccagttgaggcaaaagcaatcttgccgtcttttttggtaaagccgtagaacattggccggataccgatgatgtctctagccgcgtaaatcgtctttgagaggtgatcatagaggacaaaggaaaattccccatccagcatcttaaccatcgtctcaatcccgtatttgcggtaaagggggatcagaacttcacagtcactgctggaagtaaattcgtagtcggtttccaggttctttttcagttccgggtagttgtagatttccccgttgcagaccagggtgcagtccagggtttcaaaaggctgcatcccgctgtccgtcaagtccatgatggccaagcggttgaagccaaaagtaactccccgctcgtcaaagaccctggtcatgtccggtccccggtcctggcatttggccagggcttcgtcaaaggtcttcaagtcaaattctttggagtcgatcgctaaaaatccgcacatattcgctgcctctttctttttaagcaaaaaataatttaagtgagtaaaaattgctatttaatgaaaaaagggtcgccaagcaaagaaaaagcccttcgctccccggtaagggacgaaaggctttgttccgcggtaccacccaaattgctctgataatagagcctgcttcttgagcacaaatatgctcatccggtggtaacggaccagaaccggccaagcctactggagctaagtctttcggttggcagctgaaaaagtgtttttcaaggggggcagagcctgctgaatttccactctcaccagctcactggaggttgcccgcctttactcgtctttttatggcttacttttttaattaagaactattgtaatccaaatgagaaataaatcaagtctaaattaaaataaatttaaaaagaaaagcagagaaggcttgccaataaagtttttgattttttcgctgaaaagtgttgacattttccctaaaccctgtagaatactaattgttgcgtcgccgaggcgcggcagaaaattccgccttagctcagttggtagagcgcttgactgttaatcaggatgtcgtcagttcgagtctgacaggcggagtatcgggaagtggctcagtttggtagagcacctggtttgggaccagggggtcgcaggttcaaatcctgtcttcccgatcaaacgaaatatgcggaagtagttcagtggtagaacatcaccttgccatggtgggggtcgcgggttcgaatcccgtcttccgcttagcatcaagcgatgcttaattgaacagatgcacccatagcgcaactggatagagtgtctgactacgaatcagaaggttgtaggttcaagtcctactgggtgcattggaggattagctcagctgggagagcatctgccttacaagcagagggtcacaggttcgagccctgtatcctccatctggcccgttggtcaagtggttaagacaccgccctttcacggcggtaacatgggttcaaatcccgtacgggtcattgccggaaggcaagaattgaatatttttctatctatcaaatggaggattacccaagtggcttaaggggacggttttgaaaaccgttagacggggcgactcgtgcgtgggttcaaatcccacatcctcctttttattat

SEQ ID NO: 2211 - DNA, 13806 bp, Unknown
  gut microbiota DNA sequence
tccctgatcgttgacaagcggtgggcgataacaaaagccgtccgcccctgcatcagccggtccatcccttgctgaatcaagagctcagtccgggtgtcaactgatgaggttgcttcgtccagaatcaaaatcttcggatccttgacaaaagcccgggcaatcgtcaacagctgcttttgtccagcggagatattgctggactcttcattaatcatgctgtcatagccttctggcatctgctcgataaagtggtcagcatgggcatcgatggctgcttgccgcaattcttcatcactggcattgagcttcccgtagcggaggttctccttgatcgtgccgttgaagagccaggtatcctgcaggaccatcccaaacatggaccgtaaatcaaaccgcttcatcttgctgatatcctggccgccaatcgtgatcttcccgctgtttaactcgtaaaagcgcatcaaaagcttgaccagggtggtcttgccggccccagtaggtccgacgatagcgatcttttgcccggcagaaacatccaggctgaagtccttgatgatgatcttgtctggattgtagccaaagcggacatggtcaaaagtcacatcgctaggtagtttggctgcttcttctgttgaaatttccacctcttcttccagcatctcttcggcttccaggaagtcaaagacccgttcactagctgccgccgttgactggagcaggttgataatctgcgccatctgcgtgattggctgggtaaagctcttcacatactggataaaggcttgaatgtccccaatcgtgaccacgctgttgaccgccaggaaaccaccggcgatacagatgccaacatagccgatattgccgactaggttggaaatcggcatcatcaaggagccaaagaattgggacttccagccggaagtgtaaagctcatcattgtacttcttaaaagttgccactgacgcggcttcaccgttaaaggcctggacaatctggtgggccccgtacatttcttcgatatgaccatccgcgtcacctaaagccttttgctggccgatatagtacttttgcgaccggctcatgaccattcctaagatgccgaaagtcactggcaaaatcgctaaagcaattagggttaattgccaggaaatcgtgaacatcataatcacgaccccgacaacggtgacggttgaggtgatgatctgggccatggactggttgagcgactgggcaatcgtgtccacgtcgttggtaatccgggacaaaatgtcaccgctggcatgcttgtcaaaaaagctgagcggcaggcggtcaattttttccgcgatatcttttctcaaagagtaggccaccttctgggaaatacctgaggtaatccagctttgcacataattgaaaagcatggacaggaggtaaaggcccaggagcagcaggaggatcttgttgatgtaggtaaaatcaattcccccggtattctggatcttggcgctgatcccggcgatcagcttgtcagttgccttggataaaattttcggcccaataatcgagaagacggtcgaagcaatcgcgaaaatgattacagcgagcaagaaccagcaatagggctttaagtagcggaagagtctggcaaaagttccggaaaaatcctttgccttctcagttcctcttgcattgccatggttatgcatcggctaattcctcctttgaaagctgtgagtaggcaatttcccggtagacctggcagttcttgagcaggtcctggtgtttgcccttgccgacgatcttgccttcatccaaaacgatgatctggtcggcatccatgattgacgcgatccgctggccaaccaagaggacggtcgtcatttctttagcagccatcttggtcagttcccggcggaccttggcgtcagtcttaaagtccagggcgctgaatgaatcatcaaagactaagatttctggatccttggccaaagcgcgggcaattgccaaccgctgtctttgcccgccggaaacattgctgccgccttgagcgatcggggcctccaatttgcctggcaggcggtcaacgaattcttctgattgtgagacccgcaaggcttctgctaagtgggagtcatcctttgccccatacaagacattagattttactgtcccggtcaaaagctggcctttttgcggcaccaaaccgatccgctcgcgcaggtcttgcaggtcataatccttaacatctattccgtcaaccgtgactttaccgctcgtaacgtcatagaagcgggggatcaagttgatcaaactggacttgcccgacccggttgatccgataaaggcggtcgtcttgccggcagaggcagtgaagctgatatgctctaaagctgcttcctggctgcctgggtaagtgaaggtcacgtcgtcaaaaataacgcccgtgttttccttgcttgacttactttcagctggagattcaatctcagcttcggttttcaggacttctgccacccggccagccgaaatgctggcccggggaatgaagatggcaatcatggccaccatcaagaaggccataataatcatcatcgcgtactgaacgaaggccatcattgacccgatctgcagcttgcccaggtcgatttgcttggcgccggcataaacgatcaccagagcaactgtgttcatgatgaacatcatcaccggcatcaaggttgacataacccggttggtaaagaggttgaccttggttaagttgcggtttgattcatcaaaacggtcttcactgactttttcattaccaaaggcccggatgaccagcatcccggtcagattttcccgcatggacaggttcaatttatcgatcagcttctggacaatcttgaacttcggcatggccaggcccatggtgatcatgagaatgataaaaatcagcagaatcaccaggccgataatccaagtcatcgatggggaagagtccagggcatgtaggagggccccgatgcccaggattggcgcgtaagccaccatccggatcatcaagacaatgacctgctggatctgggtgatatcattggttgaccgggtgatcaaggacgcggttgagaagcggtccatttctgtattggaaaaggattcgactttttcaaaaaaggccagccgcaagtcccgggccaccccagccccgactctggaagctaaaaggccagccaggatcgttacgacggaaccaagaagggcaatgcccagcatcttcaggcccgcagttttaatgtagctggtctgtagcttactggttgatgcacccaggcgcttgtattcaagcttgaccgcccggctgccggccatgttcatggtgctggtccccatcttcttcatctgcttgtcgattgagtcgtagatcttctgcttttgtttcgtgctcatctgcttgaagaagtaggccaggtcctttttctggtaagctgtctccattgcgtcaatttgctttttggcctgatcaagttgcgccttcatttttacagcctggggagctacaggtgcaactttggccagttgctgataagccttttcacccttagcatatttgtctttagcagtcttgattgccttagagatattcttcaagaactttttgctggtatccgagttcttattgccggtgagggtgtagtagaggatcatcccccgcagcatggccgtgttcagcttgtcccggtcaacgtttttctttaagacatagagatttttgcctttaggaaaagtctgcttcaaatcattggaaatgtcagctgctttgacatagcggtagctgtccttgatcgtctgctggtgagccttagttgaataagtcatgacctgccggtaggtctgaggcgacaagacatcagcaacgctgtctttaaagccgcccgcctggatcccattagtcacaatatcactcatatagtccggcagggccagttcggtttgggcctcaccaaagataaaagcaatcgccaacagaattggcagcaggtagggaaggatatattttctaagcttgatcatccgcgtcctccttgatcattgcttccagattgtggcaaacttgctcatgaatccggataatctcctggaaatcttcgtcggtcaagccctggaacatctgcttattgcgctttttcatcttgccgataacctcatccagctcttggttggccttggcggtcaattccagccggtacttgcgccggtcatttggatctgtcaccctgaccaggtagccgtcccgctccaaacgcttgatccggccagacaggctggcctgggtaatatgaaagaggtcggccaggtcggtctggttgtagttggttttcttgattgcgaacagcaggcctccggattcccgggttaagtgaatatctttgaactcctgctggtacaacttatgcatgagcatgttcaaataggctcttttttggatgatttctcccaaacgggggtcatcaaaatatgttggctccattctccacctcgcttaaaatattgattagcttcctaataattagcatactaaggattttacttaatttactaagtaattgcaagagatttttttaattcatataaaaaacgccagcaaatgctgacgtttaaaactattgagtagagtgtgatgaattttttacagcttggtgatgtcgaccaaggagatcttgttgtcgtgcttggcttccagggcgtggatcaaggcccgcgccgtatcaagggaagtgtagatcggcacgccggcttctacggcaaagcggcggatcaggaagccgtccttcaagttgttgtttctggttgggatgtcgatgaccaggtcgaccgtttccgtcaagatcaagtcaaagatggtgttctctttgtcattgatccggttgaccaggcgggcagggatgccatgactctgcaagaagtcgtatgtcccctgggtcgcgtaaaggtcgtagccaaagtcgtggtattccttggcgattggcaaaaattcttccttagccgaatccttgaccgtgcagataaccttcttttgcttaggcaggtccaggccagtccccataaaggccttgtacatggcttcttcaacgtcatcagaaatccccagaacttcaccggttgacttcatttccggccccaaggcaatttccgccccggtaatcttttcaaaggagaagactggcatcttgacggcaactgtcttcttttccggagccagaccgtagtcatagccttgctccttgatggacttgcctatgatgacattggttgccacgtcaaccagcggaatcccggtaactttggagatataagggatggttctggaagagcgggggttgacttcgatcacgtaaactttgttttcgtaaacgataaactggatgttcatcaaacccttgaccttcaaggccttggccaggcgcttggagtattctacgattcgttccttcatctcctgggagatcttttgcggcgggtagatggagattgagtcaccagagtggacaccagctctttctacgtgttccatgatccctggaatcaagatgccttcgtcatcgcagatagcgtcaacttcacattccttgccggccaggtacttgtcgattaagatcgggtggtcttcaatgttgaactgggaagtgatgtggtcaataaagcgcttgaggtcgccgtcatttaaggcgatttccatcccggccccgcctaaaacgtaggaaggacggaccaaaaccgggtaacccagctcattagcggcctttaaggcttcttcagccgtaaagacggtttgccccttcggccggtcgatctggcacttttctaaaatctcgtcaaatctttcccggtcttcagccgcgtcaacactgtcggcagaggtaccaaggatcggcacgcccatcttcatcaagtcctgggagagcttaatcgcggtttgtccgccgaattggacgatggccccgtctggctgctcaagttcaatgatgctctgcacgtcttccgccgttaatggttcaaagtagaggcggtcggcgatgtcaaagtcagttgagacggtttccgggttgttgttgacgatgatggtttcgtagccagcttccttcaaggcccagacactgtgcacgcagcagtagtcaaactcaatcccttggccgattctaattgggccggagccaaagacaatcacctttttcttggaccggtctggctggatttcatgttcaccgccataaacgctgtagaagtatggcgtttcggcgtcaaattcagccgcgcaggtgtcgaccgtcttgaaggcagccgtgatcttcaagccctttctgaggtagtaaacttcatcagccgtcttgccggttaagcttgcgataacccggtctgggaattcgcagtgcttggccagtttcaaaagatctggcgtcagttcttcgctcttgaggcggtcttcaatttcaaccaggtgcttgatcttgtcaatgaaccagacgtcgatcttggtaatggcatgaatttcctggatggagacgccctttcgcaaggcttcggcaattctgaaggcccgcttgtcgtcaatcttgcggaggtctttccggagatcatcagctgacagctgggcaatttcttcattataaaggtagtagctgtcttgttccagggaccggagggctttcatgaaggcaccttcgaagttgttgcagatagccatgacttccccggttgccttcatttgggtgcccagcttgcgggaagcgtcgtagaatttgtcaaaaggccacttaggaatcttgcagacgatgtagtcaagggttggttcgtaagaagcgtaggtcttgcccgttacggcgttgacgatttcatccaagttgtagcccaaagcaatcttggtagcaagtttggcgatagggtagcctgttgcttttgaggccagggcagaagaccgggaaacacgagggttgacttcaatgacgcagtattcaaaggagtctgggttgagggcaaactggacattgcagccgcccttgatgttcaaggcagtgatgatgttgagggcagaggagcggagcatctggtagtccttgtctgacaaggtttgagatggcgctaccacgatactgtcaccggtgtggacaccgaccgggtccatgttttccatgttgcagacggtgatgcagttgccggcactatcgcgcatgacttcgtattcaacttccttccagccggcgattgattcttcaatcaaacattcagtaactcgggagaggcggaggccgttagaacagatttcacgcagttcttgttcattgtaggcgatcccgccgccagtcccgcccaaagtgtaggccgggcggacaactacgggatagccgatttccttggcaaaagcaatggcgtcttcaacgtagttgatgacaactgacttggcaaccggttcaccgattctttccatcaagttcttgaattccagccggtcttcagccatcttgatcgtgtcggtgtcagtaccgatagtcttgacatggtgcttttccaaaaagccttcatcagctaatgccatggcgatgttcaaagcgttctgcccgcccatggttggcagaagggcgtctggcttttctttttcaatcaattgcttgacgactggcacagtcaaaggttcgatgtagacgtggtcagccatgtcgccgtcagtcatgatcgtggccgggttggagttgatcaggacaacttcgatgccttcttctctgagggcccggcaggcctgggtcccggcatagtcgaattcagcggcctggccaatgatgatcgggccggaaccaatcactaaaacttttttgatatcgtcgcgcttaggcattcttgtgttctcccatcatttcaataaagctgtcaaagaggtattccgtgtcgtgcgggccgccgcaggcttccgggtggaactggacggacttgatgttttcttttaagtattccaggccttcgatcgtcttgtcgttgacgttcttgaaccagaccttggcttgctttggatcaatcgtgtcttccttgatcacatagttgtggttttgcgtggagatgtagacccggccagtggtcagatccttgactgggtgattgctgccgtggtggccatagaccattttttccgtctcaaaaccgtgggctaaggctaagagctggtggcccaggcagatggcgaagatcgggatgccggaagaagcaagaatcttcagctggtcaataatttccgtgcattcactcgggtcaccggggccgtttgaaagcatgatcccatcgaagttgtggtctaagacatattgggccggggtgtcagccggcaggactgtgacacggcagcctcttttggccagttctctggcgatattgcgcttggcaccgaagtcgtagagggcaacttcgtagtcaccttgaccgacatggtagggttcaaggcagctgcacttttcaacgaccccttggatcttgaaggccttgatctggtcaattacttcgctgacttcgtaatccttagtagtgatcatcccgttcatgcagccttctttgcgcaggatccgggtgatggcccgggtgtcgacgccttggatgccggggatgttgttttcaatcatgtagtcgttcagactcatgttcatgcggaaattggaccccagtcgggaaagctcgcttactacaaaggcttcgacaaaggggtgggcggcttcctggtcatccaggggaacaccgtagttgccgatcaggggataagtcatgaccacgctttgaccggcatatgacgggtcggtcaagacttccacataaccagtcatcgccgtgttgaagacgaattcgctgataacatcatggaccgcgccgaagctttcgccttcaaaaacgtgtccatcttccagtattaaacgcgctttcattgattgtttgactcctataaaaaaagacatatcaacgagtgacatgtcttaagtgatgaaatattaataatttgaaaaaatggaaaaggaacagcgaatgaagctgggcagatatctgggttaatgttaataaatgcggccatttttgctgcttcctttctgttttttcaatagtataaaggatagatgcaaggcttgcaagtagttttcttgatcttcattaagaaagctgcatattttatatgcatttagttggtaatcgttgatttatctaggtgaaagcttgacttgtctggataatcacgaatattcgcttttttattattgaaatgatatttaaattaaaaagttttccgcttctatgctatacttttgactgaggtgaaacaaatgacaggaatcggatcagtaatcaacgtcaccgccattatctgcggcggtctgctaggaattaacttcggccacctgctcaaggcccgggtgtaggaaaaattaatggtcgcctgcgggctggacgtggaaaagagcgaattcctcagtgagaacgacctcgtaaccgggatcagaaaccgcaactattaccaacacgagattaataatcttttgcaagcagctcaagagagcgttacttatgttttctgtgacgtcaatggcctgcacgaaaccaacaacaagtttggccatgaagccggggaccggatgctgattgccctggctagtgaattagccaaaagcttcgggcaagacatgtcttgccgctttggcgaggatgagtttttagcaattgccttagacgagcgcttggacaaagtccaagcaaagtctgactaaatcctttctaacttgagaaagcaatgctaccacgttccaatcgggatcaagcaggaaaaggccgaccacttaaatgtcagtgacctgctctaccaggcagacaaggccatgcgcaaatccaaggaagaattctacaagaaagccgagagcgaccgccgggcccggtaatcttctttctttactacatttatgactgcagagaaaaagccggtattaaccggctttttctattgcttctaaagcttgcatttctttaataaccaagatggttgagcccaagacgcagatgattctggctcccagttccgcgctccagaaagcattagtctgaagaggcgttaaaagcagccaggtagcggctagcttaagggctaattcacccaagttgcagtagaggtattccttcatcaaaaccatgcttctgagcaatccttcattcaagaacttgaagatggagaaaagctggatgccgacaaaaacatagaggtaaactctgaagaaggagtaagctacctggttttggcctggatcaaagaacatgcctgccaatagctggcagaagatgaccgacagggctgagctgaccagccagtagatgagggagacattgctgcagtagcggtaaactgctttaacagctgagtacgtttttgccgccaataactgagccgtcatcagagttaacgtctgggcaaagccaaccaggacgatccgggccaagttcatgaccttgacgatagcgacatagcccaagattgcctcctggccaaaggggttgacccaggcctgaaccaatgttacgccgaaggtgatcgcgaattgctggaagatggttggcagggcgatatgaaggatggacttgatttttgtccaggagaggtcaggcttaagggagacaggctcttcttcctgccggtccatttttgccaaaaggtagagggtgaccagcatggtgatcccttgggctaaaaccgttcccagggctgaacctaatatacccagctgcaagacgagaatgaaaagaagatttaatagtaggtttaagatgctggaagttgccaggagatagaaggagattttggctcgctcattggagatcaagatggcccggccaacgtcatatatgtagatgattggcaaggcaaagaggtaggcccggccatataggagggcatcccccaccatgttttccggtaaagacaccgccttataaagggcgggcagggagatccaggcaattaccactaagaccagaccgctaatcgcactgagaaagagggtgtcccgtgccatggcggccttctctttatttttaccggcacctaacagccgggagaccatgacgtcaaccgccatttcgaagccgccggagacaaccaggaaaagcatgatgatattggccgcgttgcccacagcccctaattccctggctcccagatagcggccgatgatggccatgtcgatgacgctgtagagctgctggacaaacagctcgctgatcatgggcaggctgaaggcccagactttctttttcaattcttctgtcatttttcttacctgctttcaaagttcatacctttagggtaaactatgccctaagggaatagtcaagggctggagagttttagtaaggaaagagattgacatgaacgaggaattaattaagaccggggattttgccaaaatgtgtgctgtcactaagaaggcactttatgtctatgaagcaaaagggctcctgaagccggcagttgtcaaagataatggctaccgctactaccggctggaacaggtggaccaagttgccacaatccggctgctggagaaattgggcagcagcctgcaggaggttggggactttttcgccttaaaggatttgaatgaacggcagaagtatttaggcaagcagcaggaagcagtcgaaagagagatggctgagctggggaagatcaagtccagcttagaattttttgaccggagaatcagtgacttgaagcagactggtttaaaaaaagtggcggttgagacttgcccggaagaatacctggaagtcagtccttttaggcatggtgtttcgctgaatccaatcagcttcgggcctagatatggggtgatcgtcgatgactttgaaaaggcagaaatcagccgcttttttaaagtagtagaaagaaaagagggcaattacgtcaaagcggctggaaagtatgcctgcttttaccaggaaatggagaacgacgatgttgctggcaatggaccgaaggcactggaatatttaagaagcaaggcaaaagttgtcccgcctttttaccaggaagacttcagcagttccgtttcaggtcatgacggatcggtaatcatcaagtattctgccaagttggatttatgagcaaataagcagcatccctgcagaattttccgtcaggggatgctgctttttagttgaaactttgcctaactctttttaacctcatttgagggaaaaagggcaagtaatcatctcaaaagatttgcgtgcaaatgagagcttttctcagcatttttggcggaaaatcgattttttaccgaatgcgtagaaataggcatttttacgcattcgaatcttgattagttaggacggaatttttaacaatttttccgcttcaatgcacctttgtgctagaatgaatacataaagacgcattcaatggggggaggattttgctagcaaaatgggccgaaaagttaaaaaaacagagagcagcagaaatatccggccgctgaaaacggcaaaggaaatcaacgctatgaaacgggctctgcaatttggaaccgggacagttaccgggcaaaacaggaatggtctgcggaatgctatgatttttgtctttgggatcaacacaggtctccggatctccgacatcgtcaaggccaaggtctcagacattgaagacggcgaatggtacaacctggtcgaaactaaaacccacaagaaccggcatgcctatattggcaatatcagccaggacttggaaaattacattgaccagatgcagctgaagccaagtgactggctcttcccttctagaaaaggagaggggcatattgaaggaaagtcattctataaagatttgaagcgggccgcccggcagtgcgagattgatcccaatacagttggtacccacactctaagaaaaacttttgggtatcactacatcaagagcgcgacaaccccagcgggtgatccagatccccgggccttgtacaagctgcagaagatgctgaaccacagcagcccaaccactactctgagatatattggcttggaagacgaaagcatggaaaaagatttgaagtctttccgtttgggataaaatacacctttttaaggagtgagttctattgcacttaaatgtgcaggtgatcaactttaactttttaagagcaacagaatcgctttatcagcactatacatttttaagtaaacatatatacataaactttgttatgtaaagtaatttgttgtaattaaaaaccggtctcaaaatttgagatcggtttttgcttacaaaataaattccatatttgtttctttgaccttcaaaccattcttcctatagaagtttatggcagaatcattaccctcccatacattaagcgtcacttcatagcatcccagtcttttggcttcagctttgacataatcaagcagggttcggcccacgctttgcgagcgctgggtgctgtcaacacagaggtcatcgataaagagtgacttaaactgaaccatattggttgaaaagggctgctcttgcagctgagtgaatgcatagccgagcacttgatcatcttcgtcaaccgcgacaaaaactgctttctggtcatcgttaatgattgtcgtcagctcttccaccgtgtacttggttgtgcctggaataaaaatgtctggacgaatcgaagcgtgaatttccaaaacttggctcagcagcttcataattgctggaatgtctttaacttgcgcgcgtctaatttgcatgatgccacctctaaatagtatctagttactgttaattttaacatg

SEQ ID NO: 2212 - DNA, 577 bp, Unknown
  gut microbiota DNA sequence
tgcgacgtcacactgccgagaaaagcttctagccagaaacggtgcacccgtaccgcaaaccgacacaggtagtcgaggagagtatcctcaggtgagcgagagaactctcgttaaggaactcggcaaaatggccccgtaacttcgggagaaggggcgctggtcgcaagatcagccgcagtgaaaaggcccaagcaactgtttatcaaaaacacaggcatctgcaaaatcgtaagatgaagtataggtgctgacacctgcccggtgctggaaggttaagaggagagcttagcgcaagcgaaggtttgaattgaagccccagtaaacggcggccgtaactataacggtcctaaggtagcgaaattccttgtcgggtaagttccgacctgcacgaaaggtgtaatgatttgggcactgtctcaacgagagactcggtgaaattataatacccgtgaagatgcgggttacccgcgacaggacggaaagaccccatggagctttactgcagtttaatattgggtatctgtcaagcatgtacaggataggtaggagccggagaagataggacgccagtcttatc

SEQ ID NO: 2213 - DNA, 883 bp, Unknown
  gut microbiota DNA sequence
gtagcgcacacaaatacccccttgaagcaaagagagcacgtttcaagggaggcgcgcggaaagaacatttattcctcactagtgtgattagagagtgtaaaatgcaaggcactattaacccggtcagcgattacatcgtagtcgagcgggtgatggctgagggggttgtcaatcatcgtataggtcaagccaatgctgaaaaccgtcacgaagtcactggccttgtggttgtcggtcatgccttcttctttgatgatctttcgcagcaacactgtaatatgccgcgaaatctcaccaatcacgtcgatctctttttgacttgaatacacacttttgtaaaaatccctgttcagctcagcactatagaagacttgtgggataatttcctcccaattcagcctgtcgatgttgctttcgacatcggcctccatcattgcctggatggtataaccgagcaaatcatatttatcttggaagttatcgtaaaaagtctgccttctaataccactcttcttcatcaagtgaactacactgacgtggttaaagccagtttcagcaacttcagccctaagcacgagtgcactgcgcgacttaagatcttcggacatcggatcacgctttcttaaggctgattgtcgccaaaagctgttgtctcatttttaaaccatagccgctagctactataacgtgcaaaccaaacagaccgtccggtactcacgctaagccgggcagaatagaacatatcgtatattgcgttttaggagatagtatcaattaccccagcctgttatatattgcctatcgttaatagcggccagcggctaccatcaataatatgcccgaaagcggattaaatcaacggataatttgtaagcgcttgtcc

SEQ ID NO: 2214 - DNA, 10795 bp, Unknown
  gut microbiota DNA sequence
tcgatttttaggctaaaaaataagcgctgacctagataaaatctagtttttgctaaaaaagccgcttttttgagaaatgtcattttttatactgaaaaaaacgaaaaaaggcttataatgtaagtggaagaaaagcgcttgcagcgttaacgcgaaaatatgtttttatagtaagtgaggtaagaaatggacgagctggatcaacatttacagaactttgccgctggtaatgaattgtatttgcagaattatcttggctgtcatgcggctggaaatggctatgcctttcgcgtctgggcacctaaagcacagcaagtctggctggtcggcgatttcaacaattgggagaaagacctgcccatgcagcagaatgcttatgggatttggtctattgaaactgaccgcgcccagcctggccagctgtacaaattcttagtcaagcaggctgacggggaagaagtcatgaaatttgacccgatggccctggaatatgagcgccggccaggcaacgctgccgtggtaagcaacttgccggagaagcggtggactgacggtgcctggctcggctggcacaagcggtcaaaccactttgcccgcccaatcaacatatatgaggtgcatgccagctcctggaagcagcatgaagatggcagcctctacactttgcgtgacttgcaaaaggaactgattccctacgttaaggaacaaggctttaactatattgagttcatgcctttgacagcccacccgctggacgcctcctggggctaccagacgaccggctactttgccttggagagagcatatggcgagccgcgggatttgcaggacttcgtggaagcctgccacaaggaaaacatcggggtcttggctgactgggtaccaggccacttctgcatcaacagcgatgccttggcttactacgacgggacgccttgctatgaatttgaagaaggctggcgggcccaaaacaagggctggggtgccttgaactttgacttgggcaagccacaagtgcagtccttcctcttgtcaagtgccctcttctggctggaatactaccacctggacgggctcagagtcgacgcggtatccaacatgctttaccgcgactatgaccggggaccgggcgagtggaagcctgaccagtacggcggcaaccgcaatatcgaagggattgaattcctccacaagttcaacaagaccatcaaggagatgcacccggaaagaatcttgatcgcggaagaaagttcctcccaagtcaagattaccggccggattgaagacggaggcctgggctttgactacaagtggaatatgggctggatgaatgatgagctccgcttctattccatggacccatacttccgcaaagacaactttgacctgtccactttctcattcatgtaccggatgagtgaaaacttcatcttgccgctgtcccacgacgaagtcgtccacggcaagcgcagcttgatgaacaagatgttcggcgaccggcctgaccagttcgcccagttgcggaatttgaataccatgctgatgacctacccgggcaagaaattgctcttcatgggcggggaattcggccagtacctggaatggcgttaccaagaaggcttggagtggtcttctttaagtgatgagttaaacgccaaaatgctcaagtacaaccgggaactgaaccacttttacttaaacgaaccggccttgtggcaattggaacaggaagacaagtcagtgagaatcatcgacgcggacaaccgcgaccagtccgtcctttccttcatcaggcaagggaaggtgcggcatgatttcctgatcgtcctgctcaacttcacaccggttcagcgtgacggctttaaagtcggcgtgccttacccggggacttacaaggaagtcctcaacagctcacgcagtgaatttggcggcgattggaccgcgaaaccacaggaaatggttaccacccaggagaaattcaaggatttcgactaccagatttcggttgacctgccaggcttcagtgccatgatcattaagcctgaccaggtaacaatcaagagaaagcgttcgaagaaacgctgatgtaatgtgataaaagattaaagataagtagggaaggattttttaccatgagtacaaaaatgctaggtttaattttagccgggggcaaggggacccggctgggcaaactgaccgccaatcaagctaagccagccgtgccattcggcggccgctaccggatcatcgactttccgctgagcaattgcgccaactcaggcgtgcgcaatgtcggcatcatcacccaatacgaaccgctgcggctgaacaaccacatcggcaacggctccagctggggtctggacggcttgaactccagcgccactatcctgcagccatacacggacaacggcggcagcaagtggtttgaagggaccgcccacgccatctaccaaaacatcgactacatcgacagccaggacccggaatatgtcctgatcctgtctggtgaccacatctacaagatggactacgccgacatgctggaagaacacgaaaagaaccacgcttccttgactgtggccgtgatcgacgtgccttgggaagaagcaccccggttcgggatcatgaataccgactccagcggccggatcatcgaatttgaagaaaagccagctgaaccaaagagcaaccacgcttcaatggggatctacatcttcaactggaagcggctgcgggaagtattgaccgcgggctttgctacggccgacgacatggtcgacttcggcaagaacgtcatcccttactacctgaagagtgacgaaagagtctttgcttaccagttctccggctattggaaggacgtcggcaccatcgactccctctggcaagccaacatggaattcctggacgggtcagacggcctggctctggacgaccgcagctggcggatctactccaagaacaccatcgacgcgccgcaaatgattacggaaaacgcggaagtaactgactccatgatcgttgacggctgctacattgacgggaagatcaagcactcaatcatctcagccaacgttgacgtccaacgcggcagcgagattgttgactcaatcatcatgccgggcgccaagattggcaagaacgtcaagatcaccaaggccatcgtcggcgaaggcgccgtgatcggcagcgactctgtcgttggtgaagaaaatggggaaattgccgtagtcggcaacaaggaaaagattggagtgttaccaaatgaaaacaagtaagatgtgtgcaatcttcagcaaccagcacgaatacagccggctgaagccgctgaccgacgaaagagccctgtcaactctgtactttgccggcaagtaccgtttgatggactttgccctctccagcatcgtcaacgctgacatcaaccacgtttacaccctgatcagccaggaaaaggtccgttcatacctggaccacctgggcgggggcaaagaatgggggatggacacgatcggttcctacgaatacctggacttctaccagaacttgatgcggcggcggtcaagaggggaaaactactttgacgacttgatcctcttccttaagacctgcaagatgccatacactgttttcatcggcaataagatggctgccaactttgacttaaaggccatcctccacttccaccagtcaaatgacaaccgaatcaccccggtcttcaagcggatggaaaaggacaacctggctccagatgaccacacctttgtcttgagcgacaacaatgtcgtgactgaacaaagagaagccattgaactgaccagcgaaggtcctttcaacctttcagccaacgtgtacgtgatgaacactgactggctgatccacgaactggaaaatgcccaaaagagcggggcttcctacgatgtttcagaacggctggccgctttggccgtcaaggaaaaggccaacgcctacgaatacactggctacctgcgcaacatccacgacattcccagctactaccaggccaacctggacatgctggaaaaggacaagcgtgactccctgctttacggcaaccagaagatcatcacccggatcagaaacgaagtcggcacttactacgacaaggaatctgacgtcaagaacaccttgatttccactggctgcacggtcaagggtgaaatcaagaacagcgtcgtttccagaagagtaaactttgccaaggactctgttgctaagaacgccgtaatcatggccaactgcaagatcaagagcggggctgacgttgaatacgccatcttagacaagaacgtggtgatcgaaaagggcgtgactgtcaagggcaagcctgacagcccagtggttatcaagaagggcagcgtcatcagcaaggacttcgtactggattaatcgggaggaaaaatcgtgagagttttatttgtcggggccgaatgcgcgcccttcttcaagactggcggcttaggcgacgttttgggctctttgcccaaccagctggctaaagacggcgatgaagtcggcgtggctttgcccctgtaccaggacatgccggaagaataccgggaaaagctggaataccaaggcaacttctatgttccagttggctggcggaaccagtactgcggggtcttcaccctggaaatgaacggagttaagtacttcttcatcgacaacgaatactacttcaagcggccaggcatctacggctactacgatgatggcgaacgttacgccttcttccagcaagccgtaatcatgatgatggaacgctttgacttcgtaccaaacatcctgcactgcaatgactaccacacttccttcatcccattcctgcttcgggaaaagtggggctttgtcgatgcctaccgcggcatcaagactgtcttgaccatccacaacctggaattccaaggcaagtacgacgccaagaccctgccgaacttcttcggcctgggctatgaatggtttgacaacgggactgtccgcttcaacaacgacgtcaactggatgaagaccgggatcttgtacgccgaccgggtaactacggtcagcccatcttatgctgaagaaattcagacgccggaattcggccagggcctggatgaaatcctccgctcagtcaacttcaagctggtcgggatcttgaacgggattgactttgaaaagtacaacccggccactgacccggtcatcaaggtccgctacgacgtcaaccacttgaagcacaagcgccgcgacaagactgacctgcaaaagcaggttggcctgccggtagcgccaactaccccggttatcgggatggtcagccgcctgactgcccaaaagggctgccagctgcttttggaagaactggacaacattctccagtttgacctgcaggtagtcatcctgggcagcggggaccagtactatgaacatgccttaagcgacattgccagccgctacccggacaagttcaagctgatcctggcttttgacgtcaacctggcccagaagatctatgctggcgctgacgccttcttgatgccatccgcctttgaaccatgcggtttgtcacaactgatcagcctgcgctacgggaccctgccaatcgtccaccaaatcggcggtttagcagacacggtctgggtttacgacaagaccaagaacgaaggtaccggcttcggtttccgcgaattcagcggttaccgaatggttgaagccattatgaagatgctggaactctaccatgaaaaggacaagtgggccaaggcgcaaagaacggccatgcggtctgacttctcctggaagaactcagcaagcaagtaccaatggatgtacggcgaattactgggatagtcgcaattaatgaggaagatgagcatgaaatcaagtaaagtatcagcagtaaacagcaatttgcgggaaattacccccgaagaattcaaggaaagactggccagcaagctggaccggcactttgaagaaagcgtagaggaagcttctaaggaagacatctttgctgctttggcttcaatggtgcgcgacggctactctagcaagtggcgcagaacccggatcgcggaaagcgccaatggtcacaagcaggcctactacttctccattgaattcctgccagggactttgctgagaagcaacctgcttaacctgggctggctggacacggctaaagaagccctggctgacttaggcatcgacctggatgaaatcgctgttgttgaaccagacatggcgctggggaacgggggcctgggccggctggcttccgccttcatggactctttggcttcaactggctatgccggcaacggcaacggcctgcgctacaagtacggcctctttaagcaaaagttcgttaacggctaccaaaaggaactgccaaacgactggctgaagcagggggactactgggaagtccgccgggaaagcaagtctgtcctggttaagtttggcggccgggtcaacatggttgacgacaatggctggctgactccgcaatacgaaggcgctactgttgtccgggccgtaccttatgatgtagccatggttggctaccacaacggggtggccaacaccctccgtttgtgggacgcggaaattgccccggaagacgaattgaagtacccgtcaatcgctgaccggcggaaggtggaagacttgacttccatcctttacccggatgactccagctatgacggccgccttctgcgtttgaagcaggaatacttctttgtttccgccggcctgcagagcatcttgaacaacttcatcaaggactacggtgaagacagcttgactgacctgccgaagtacgttgctgttcacatcaacgacactcacccggccatgtgcgtggctgaaatgatgcgccttctggttgacagataccggatggactgggacgaagcctgggaagttaccaagcaagtcatgagctacaccaaccacaccatcatggctgaagccatggaaaagtgggacgtgggcatgttcagccagcttttgccgcggctctttgacatcatcaaggaaattgaccgccgctacgtggctggcctggaaggcaaggtttccggtgacgtgatcgaaagaaccagaatcgtcaagaacggacaagttcacatggcccacctggccatcatcggttcccactcagtcaacggggttgcggctttgcacacccagcttttggaaaccgaagttctgcgcgacttctaccagctctacccagaccgcttcaacaacaagaccaacgggatcaccctgcgccgctggatccaaatcgccaacccggacctggccaagctcttggacaagaccatcgggactgactggcgctttgacagcaaggaaatgctgaagtttgaaaagttctaccacgacacggctaccttgaccagcctgcaaaagatcaagctggccaacaaggaaaagctggccaaggtcattaaggacaagaccggcatcgtggttgacccggaagccatcttcgacgtccaggttaagcgtctgcacgcctacaagcggcaaaccttgaagctgctccatgttctgaagctctaccaagacctcaaggccggcatcgaccacccaaagcgggtagttatcttcggggctatcgctgctccaagctatgtctttgccaagcaggtcatcaaggtgatcaactccgtggctgacctggttaacaatgacccggacatcaagggcaagctgaaggttgtctttctggaaaactacaatgtttccctggctgaacaaatcattccagccgcggacctcagtgaacaaatctccacgaccaccaaggaagccagcgggaccagcaacatgaagctgatggccaatggggccttgacggtcgccaccatggacggggccaacatcgaaatcaaggacgcggttggcagcgacaacatctttgccttcggtttggacaaggatgaagtttacaactactatgcaaaccactcctaccacccacgtgacctctatgaaagcgacccagtcatgaagaagacggttgacgccttgattgacggaacgattcctggctgcgtcagcgaaggccgggccttgtacgacgacttcctgaaggacaatgaagaattcctggttctagccgactttgaagcctacttgaaggcccagaagctggttgaaaaggtttgggcaaacaagcggcaatgggcccagatgagcctggtcaacatcgctcactctgaacgctttgacgctgacaagaccattgaacgctacgccagtgaaatctggcacctggacaaggtggaagtggacgctggaaaagcgtaagagtgactgatgagagctatatttaattcttgggacactaaatacaagcagccctttggcgccacgcaggccaataccagcgtcaagtgggcggttgaagtcgatgaagagatccaggagattaccctctggctgactaaaaacaatgagtcgccggtggcttaccccatgactttcaacgatgaaagcaagatgtatgagaccagcgtcaagattagcagctccgggctctactattactacttcaacatcaagcaaaacgaccagttttacttcctggaaagaagccaggacggttttggcgacggggagatcacccaggacggccgggatatccggaccttccagctgacttgctatgaccgggcggtcccgcaggctccctggtacacccagggggtggtctaccagatcttcccggaccgcttcaacaacggcaacccgcatggggagatccagggccgcaagaaggacagtttcatctacgcgaccaaggaagacagtccttactatattaaggatgggcatagtgatatagcccgctgggacttttttggcggcaacctcgaaggtatccggcaaaagattccctatttaaaggatttgggagtgacggccatctacttgaacccgatcttccaggcttccagcaaccaccgctatgacacccaggacttcatgaagatcgaccccatgctggggaccgaggaggacttcaagaacctgatcaaggacctgcacaaaaacaggattgccttgatcttagacggggtcttcaaccatgtcggggccgacagcaagtacttcttgagcgcggtcacggacaagacgggcccttactactcctggttcaacttcatcaactatccgaccaagtaccagtcctggtggggggtaaccacgcttcctgaagtcaacaagaataatgctgactaccagaacttcatctgcgggcccgacggcgttttagccaagtggacccggatgcatgtcgacggctggcgcttggacgtggcagacgaactcccaatgccgctcttgcgggaaatccgcgagcgcctgcagaatgaagactgccatgtcctgatcggggaagtctgggaagacgcctcccacaagttcgtcaacagtgaattccggacttatatggccggggacaatttaaccgggaccatgaactatccggtccgcaactttatcgtttcgctcttgcaggccaataacgaaacggaagaagtggccgccttgaatgacctggaaaagctggttgagaactaccctaaggcctttctggaaaactgcctgaacaatatcggcacccacgacacggccagaatcaagaccgtcttggggggaggcgagcagctggtcgctctggcctttggcctcttgttctctattcccggcgttccttgcatctattatggggatgaagccggcctggaaggggacaaggacccggacaaccgccgctacttcccatggggcaaggaaagcgactttttggaaaaaaaagtcaaggaactggcccactggcggcgggaaaaccgggcactagtcgacgggaaagtcggctacgtcaagattgcttatggcatcaacgccctagtccgctacaaccaaagggaactggtcatttactgctacaataagaccgaccaggatatgatcctggacgcgggaaaacttcagccatattgcctgccagagaagattgcagaactggtaagtgatatactggatcaagaaagcgtagctcagaaggcttatctgttgaagacatttaagctggacaggaatgaaaaagaataaaaaggttgtgactgttaaaaagtattaatttcatccagtactaaatagtaatatttcttaccaattcatgatataatgccggtatcaaaagattggaaggaagaaacgatgagcgaatacatgtccatatcaaaagcagctgagtatcttaacgttgccaagtcgactctccgcaattgggaagctgagggattgattactccgcttagaactgcctccaatcaacgtcgctacactaaagaaatcctagatgagcttctgtaaggcaatatgaaagcagctaagcctaagaagctgctgaccatcggctattgccgggtttcttctggtcatcaaaaagaagatctccaaaggcagaaggacgtagtgtccagatattgcgaagtcaatggctatcagtttaagatcattcaagacgttggatctggtctcaactataagaaaaagggcctgacagagctgatcaacatgatctgcaagaagcagtgcgagcgagtcgtggtaaattatcaagaccggcttgttcgttttggctttgaaatgattgggacaatctgtcaggcaaacgatgtagagctggttgtcatcaatcagacagacaacgttgatccaaattcagaacttgtagaagatgttttatctataatcaccg

SEQ ID NO: 2215 - DNA, 9573 bp, Unknown
  gut microbiota DNA sequence
gaaggatacacctgttcccatgccgaacacagtagttaagcttcttaacgccgaaagtagttggtgggaaactgcctgcgaggataggaagctgccgcgctcaacattccgccttagctcagttggtagagcgcttgactgttaatcaggatgtcgtcagttcgagtctgacaggcggagtaccgggaagtggctcagtttggtagagcacctggtttgggaccagggggccgcaggttcaaatcctgtcttcccgatctcgcattaagcgaacatgcggaagtagttcagtggtagaacatcaccttgccatggtgggggtcgcgggttcgaatcccgtcttccgcttaacgcagcagcgttagcgaacagaatattccagcgcacccatagcgcaactggatagagtgtctgactacgaatcagaaggttgtaggttcaagtcctactgggtgcatcggaggattagctcagctgggagagcatctgccttacaagcagagggtcacaggttcgagccctgtatcctccatatggtccattggagcagtggtctatctcgcctccctgtcacggaggagatcgcgggttcaaatcccgcatggaccgtaattaaagcagcgacttaggtcgttgctttttttcgtttctattgctttttattcccatggaattgctgattgaaaagaggagtaagataaaaaagatctgcttcctgcttgacagggctttcaataacaggtaacataagaaacgtgaattgaataatgttcttcggggcagggtgaaattcccgaccggcggtaaagtccgcgacccgcgatatgcggttgaatcccaagtgagggtaccgatagttaaagtctagatgggagacagaacgatacaatttttgtcatgtcgtatcgcttatttagcgatgctactatttaattttgatatcgatcattaggcctcgaggatttcctcggggcttttttcgtgcaatgaaaggagtgattggatggcatcagatgaagaatacatgcgtctggcgcttgccgcggcccgtaaggctggcaatgctacctggcgcaacccaagagtcggcagctgcctggtcaaggacggcaaagtcctggcgactggtttccaccagcactacggcggtttccatgctgaacgtgataccatctccaaattgactccggaacaattatccaattccactatttacgtgactttagagccttgctgccattacggcaagcagccgccttgcacccagctgattattgacagcgggatcaagcgggtggtggtcggggcaaccgatccccactctcttgtaacgggcaagggtatcgctgctttgcggcaggcaggccttgaagtaagcactggtcttttagcaaaagaagcaagtcagctgaatgaccactacaactacttttaccaaacaggtctgccttacgtgactttgaaacaggccatgaccctggaccacatgctggcgaaaaagggtgagcggaccgcgattaccggggctgaggcctggacccgggtccaccaggaacgggctggttaccaggctgtcttgatcgggtcagaaacggcgatcatcgacgatcctttgcttttgaccagcgaggacctggttcacccgccagtcagagttgtactggaccggcggggccggctgcttgagcacttggatttacgcttattttccgacaagcgggctaagacctggattttgacggaaaatccggctttcttggagcaggatatgccaaagcaggtaaaaatttttgccctgccggatggaaaaatctcgaccagcataaaaattctggctgaccaaggcgtgcagagcgtttacgctgaaggcggcgcacatttgcaagagagcctactggcagcgggcctggtcaatgacgtgatcagctatgtcgctccccgctttttgggccgggggactgaagcagccgtagccgcggaagcactggacttgaaagatgtccaaactgagcaagttggcgacgatgtaagaatctatgggaggatcaaggatgtttagtggtttggtaagcggcaaggcgcggattcagcgcctggagcaggaaggcaagacgatcgttttgacggtcaaaacattcccggaaaacctggccggggtaaaaatcggtgactcgatcgccatcaatggctgctgcctgacggtggaggctttttccaaagacagctttacggtaaccatgatgccgcagacttttgccaagacgacttttaaaaatctgcaggctggcgaccaagtgaacatggaacgcagcgtgccagtaggtggccgctttgaagggcatatcgtcagcgggcatgttgatgagacggtagaagttgttgacttgaagcaaaacgaaaatgccttagagctccgctttttcctgccggaccgcttgaaaaagcaggtcgtcccgcaagggtcagtggccatcaacgggactagcttgacggtgatgaacactggtgatgactggttctcagttggcttgatcccccacacccaggatgaaacgaatttatctggcctgcaagttggcgaccaggtcaacctggagactgacgtgctgggcaagtacgtggaagccaatctggctgcttttttaaaaaatgaattggacaagtagaaaacgcgaggaaataaagatggatgtcaaaaagattcaagatgcaattgcctggatgaaacagggcggcctggtaatcgtggccgacgacgaagaccgggaagctgaaggggacatgattggtttgggcagcaaggttactccggaaaaaatcaacttcatgaccaagcatgcccggggcctgctctgcaccagtattggccgggagatcgcggaaagactggaactgccgcagatgtggcaggacaacacggacccgtttgggacggcctttaccgtcagcgttgactacaagacgacgaccacggggatctcagcttacgaccgggcaactacgatcaaggctttggccgacccggaagccaagccggaagactttttcaagccaggtcactgcttcccgctggtcgctaaagacgggggcgttttggaaagaaacgggcacacggaagcctcagttaccttggccagactggctggtgaagcggaagtggcctacatctgcgaaattttgaaagaagacgggcacatggcccgccggccggaactggaagaaatcgccaaggaatacgacctgccatacttcacgatcgcggaattgcaggagtactgccggagcttcgcgagtagccggtcagaattcgtaaacctgccaactgactacggcgattttgaaatcaaggattacggcaatggcaacctggtgattaagaaaggcgaaattgccaaaaatgagccggtaatgctgcggatccactccaagtgcctgaccggggacgtcttcggctccaagcgctgtgactgcggccaccagctccaccaggccatgcggcggattgaagaaaaggggtccgggcttatcctctaccttaaccaagaaggacgggggattggcctgactaataagctccgggcttatgccttgcaggaccaaggtcatgatacttatgacgccaacctgcttctgggctttgctccagatgagcgcaagtacgacgtggccgccaaaatgatcaaggattttgggattaagcaggtacagcttttgaccaataacccggacaagatcaagcaattggaagaggccggggtggaaattaccgaccgcctgcccctggaaatggcggcaacggctgaggaccgcagatatctggaaaccaagcgggaccgctttaagcacatgttagtcagtttatagtgaggaagaaaaagatggcagtaattcaaggtgattttaagcaagtccacggcaaggtagcgatcgtggtgtcccgctttaacgagctggtgaccaagagcctggcaaccggcgcggccgagactttgcttaagtttgggatcaaggaagaagatattgatacttactgggtaccgggggcttttgaactgggcttcgcggctaaaaagctggttgattccggcaaatacgacgggatcatgactttgggggcggtgatcaagggcgagaccgaccactacgcgatgatcatcagcaatgtaaccagcgcggtcatggaattgaatttggcgggcaaggtaccggtgacttttggcatgctgacgacggagaatatcgaccaggccttgcaaagatccggcttgaaggtcggcaacgaggggagcgcgaccgcccagagcctgctggaaatgatgagcctgcaggaaaaaattggttaagctccataacttgcaagcgcttaacttttgtgttattatcctaagtagagaaagtactttcgaatatcgtatcgaaccttatggaaagggcgtatgcgaatgacagaaaagatggttgatgaatgagcctcttgaaagggcgtatttgtcagtttgctgtcggcaagaccaaggctaaggtagcagtcgcgatttagcgggaaagccttccgcgcaagggtgttctgtttgtgcacagcgactgggccgatcaaaaatgacgacttgccaggcagtttgtaataaaattgaatattattgtggcataaggggcttcgtgttagtgttgagacgcggggcccttttcctgttaaaaaagctgaccaagtcagctttttatttttgtttaattaaggtcctggtgctccttcaagatctccagatactgcttttgaacctcatttggaatgaaattctcgcggatccccaagctggagtagcagtagcttcgctggcttggcaccaaggggatggctttgacgccgggaacgttttccacggcaatatccatcaagtagctgacgcccattccttgccgaactaattgcaaggtagcgtcaatattgtcgacgatcagctttttggttggttgaaaaccagtcttagcaaagagccggtcaagggatgttcttgataaaaagcgcttgtgccgcatgatcaagggcgtgtctttgatctgagcaatgcggatttcatccagctgggccagggaactgtcttcagcaactaccaaaacatattgatagcgctgcaagggggtagtcttgattcctggtaaggactcatcgtctaatctggagaagacgattacgtcaaagcgtccctcccgcagatgttgttcaagcaggtgggaattttcttctttagtttcgatatttgccagcatccggccttggtttaagtgagtgatcactgatgccagccaggccttgccggccagttctgaatagcctaagcggaagttattggcgttggcccgtttgacttcgatcttaattgaattttcctctttgactaatttcttggcccttttatataagacttgtcccgctggcgtgatgaccaggggagcccggctggactttttaaagatcagctggaccccgcattcttcttctagccttttgaccatggcgctgatggctggctgggtgacctgattcttttgagcagtggcatgatagctttcgctttccaccaagtcgataaaataacgcagatctctgaattccatataaaaatcctttcgcttatcgtaaaacatagctctaacgtgcttgtttattgataaatcagatttatcgttaaatcgattatgtttattttaaacacttttttgctaaaaatcaaaaaaacatttattctgcttcacgagctattaagccgcttatagcaaagatctagctggctatttgtgaataaagcgtttgcaaaaaatcttgccaagtagaaatatctttgctataaaatgcttgttctgaaagagaaaaataatttatcaaagagagtaaggcaagaagaatgtacgtgactaaaaatacaaagtggaatgcagattatgacgtcctggttttaggtttcggtggtgccggcggcaacgcggcccggttcgcggctgatgcaggtgcccatgtcttattagttgatgcggctccatttggccatgaagggggcaatacccgttactcagcccagcacgtagccatggcaacggactacgcgaagatcaacaagtactttaagcgcttggccgctcctttccaaattccagagaagatgatggatgtttacaccgatgggatctaccacatgactgacatgttcaaggaacattttggcattgatgctttcgtttggtcccgtgatgttaagccaggcgacatcctggatgaaaaagaacatatggctgaatatccagaatatgatggctctgaagcttttgactttgccttggtccacaaccgtgactttgacgcggaattttggaagacgatccggaagactgtcttggaccgcaaggaccaaatcgatgtctggctgaactcccggaccagtcacttgctgcaagaccctgaaaccggcgctgttgtcggggcagtagttacccgcaaccacaaggactactacatccatgctaaaaatgggcttgtattggcaacgggcggctttgaaaacaatccggtcatgcagcagaattacctgcacattaccaaattgacgccatttggtactctttacaaccgcggtgatgggatcacgatggctgaagaagttggcgctaagctctggcacatgtctaactatgaatctcttggcgtagttcctagttacactttccaagaagaggatggtgaacgtggccggcagatcggccactggaaactgctttacaacggttcaatttttgcgatcgctgatgacgggacccgttttatgaaggaagacgccaagttccggcacggccacatttacgaacatggtgactacgtgatgcctcatgcctatgacaatgcctggctggtctttgaccaaaagcaatatgaccgctttgtggaagaaaaggaaaagactggccagctgcgctacccgaagtttttggataagaccatttccgcggcttcaagccaggaactggcggaaaaaatgggcgtgccggcaggcaagctggcagaaacgatcaagagcttcaactcctttgctgaaaagggcagggatgctgaatttggcagagagccggaaggaatggaggcgtttggggctggtgatttatacgccatcaagctggctccagccgttttgaacacgcaaggcggtccgcaaagaaacgaaaagggtgaaatccttgacgccaatgaccaggcaattccgcacttgtatggagcaggtgaattaggcggcatttgtgccaaccgttaccaaggcggcggcaacctggctgaatgcttgatcttcggcaagatttccgggacaaacgcggctaaggtcaaggcggatgcccaagcagttgctttgaccaatccggttcctgcaatcaacgacctggcagatggcgagcggatggacaatattgaactcggtgaaaaccagtacttaggtgcaacggaagccggcatcggtggcaagatcgtggtccgcgtgacttacaaggatgaaaagattgaaaacattgaagttttggaaagccatgaaacggaaggcatcggggccgtggctattaaggaattgccagctaaaatcgtagcggcaaattcaacggaaattgatgccatttcgggtgcttcaactaccacccgggctttagaagaagccgtaaataaagctatcaagcaggctaagtaacggaggtggccatgatgaatcaaataaagtggaaaaattggattattcccttgttccttggccttgccctctggctcttgacaccttttaagccagccgcaatcagcaacagtgcctggcagatgttcgcgatctttgtggcgacaattgccagctgcgtgaccaagccaatgccgatgatggccacaaccctgactggagcaacaatcgcggttgttctgggcttgctgaaaatggatgaggtcattgccggttttggcaattcaacggcctggatggtggccatgtgcatgtttatggctgctggttttatcaagtccggcttgggcaagcggatcgcatatctttttgtcagagcttttggcaaaaagacactgggcctggcttatgcgttgtcagttgttgaagcaattctggcaattgggattccgtcaaacaacgcccgggttaatggaatcatgtatccaattatcggtaatttagcccgggaaatgggttctgatcctaaggatgggacagaaaggaaaatcggctcctacctggtcttcaatgaatacgaagttaacaacgcgaccagtggtcttttcctgaccggcttggctgggaacatgatcgcgctgggtctggccaagacgcaaggaattacgatcagctggatgcagtggttcctagccgctagcgtgccgggaattttgtcagttttggttattccctttgtcttgtacaagatctatccgccggaaatcaaggaaacgcctaatgctaaggcttgggctgacaaaaagctgactgagatcggcaagatgaccgcgtctgaaaagatcatgaccggagtttttatcctggcgattggcttatggctttttggcacgaagatcggggttgacgcgacggagaccagctttatcgcggtagtcatcctgcttttgaccggggtaatcacagctaaagatctgttaaacgaaagctttgcctggaatatcttgacctggctgtcgatcatcatgctgatgtcgaaaaaactgatggacctgggcttcttcccatggttctcaaaggagcttggggcattgcttcaagggatgaactggatttgggctttggttattttgttcttggtttacttctacttgcactacattttcccaagcattgcgacgcagatttcagcattgtatgctggttttctttcaattgctttaggcgcgggcgtgccaaagatcatggccgctttgatgctggctttctgcgggtcggtcttcctgtcgacttcgacttactcagctggcccggcagctatgctgtccggtacgggctatgtgtcaaacaaggactggtggaagctgagcgcgatcatcggtgtgattttcaatgttatttggctgggcggcggtttgctgtggaccaagtgcattggatattggtaaaaaatgaagagtttgctgacactagagtgcttcactctagtgttttttcttgtttaaagcaaaaaaataaaaagttttaccttttttctcccggcaaaatcacgataatccgaactattcttctcaaagaaaatgattttcccacgtaggcgaaaacaaaggcaaaactatatcaagcagcgcttattacaactctgccggctgtacctatgataaagcgaatgaaaaggtggatttgacctttcagaaataacgagtatactaatatttgttgccgcggcgaagaaggaattcgccggagacacgaaaaagaaaatatccaaaacttgttgacaagaatcaaacaagcgagtaagatataaaacgttgcgtcactaagacgcaagttggtactttgaaaactgaacaaagtttcgcagtgtgcg

SEQ ID NO: 2216 - DNA, 23888 bp, Unknown
  gut microbiota DNA sequence
agcccgcccacttcttcatcccccggtcttgataatgggcgaaaaaatccgtcacccgctggtcaaactccttactcataggcgttgcccccattgtggccgccgaccaagcggcttctggcaattgccgtggcccctggcaaaaggctggaggctctgacgacactggcaaaaccatacttcttccgtaatttgtcaaccacctgatcccgcttctgctgcttgatctgctcggctggcggcaggaagaaggtcagctgctggcagccggccggcgctaaattgctgtaggtcactcccagccgtctgaccgcctgcccccgccactttcttctgaaaagggccctgagcttggccaccaaatcgctggaaatatcggtcggcgtgatcttctcttgaatactgaagccagctggatctgcctcgtagtcagcgtaaccgacataaagactgacccggccagccagcaaatgctgggcccggattctggccgtgacctggtcgccgatttcctgaataacgatctcaatttcccgctggtcttcatagtcccggcttaagatttgggagtttccgtagcttttgcttttgggccggtacttctgcttgatgatgctccggtccactccccagctcatggcaaaaagctgatcgccgatcactccgaactccttcttcaaaatagccggatcgctgtgggccaggccatacatgttgttgatccccagccggcgcaggcggttggccgtcttgacattgatcccccaaacgtcttccagcttgggaatcttccagatagtatcgggcacgtcaatatagtgccagcaggcaatcatcgaagtccggtgcttggcggaaatgtccatggccagtttggccaaaagggggttctccccaatcccgcaagtcgtgtacaggcccaggctgtcgtgaatatctttttgaatcttccgggccaccagataagagtcatccccaaataagtgccaggactcagtcatatcgatcatgctttcatcgatcgaatagacatggatatcctcatctgccgcgtacttgcggaaaatctgcaaaacctccatgctgcgcttgatgtaaagatacatatgcggctcaaccagcattaggtccggggcctggtctttaggcggcaagtctctggcccgcatgacattgctcaggccgtactttttcttggccaaaggcgaggcagccataatcaagcctgacccccagtcagtccccggctgctgggacacgacggctaaagcgacttccattgggttcaggcccaggcgcagggcctcgcaggaggcatagaaagatttgttgtcgatcatgaaaataacccggtggggctcatagcggtaatcgtacatcaaaatccacttctttcttgaacatttgttctaataaattatatcgaacttttgttctaaaaagcaagcaaacagaaaataaaagcaaaaataaaaagaggcctcagcctctttttacaaaattcagtttaatagtcgccgttcatgatcgtgttcttaacgatcacgtagtcgacccgcttgattgattccaggtcccggccaccggcgtaagagatggaagactgcaggtcttccttcatttcttccaaggtgtcagcgatgctgccccggtaagggaccagcatctgcttgccttcaacgttgcggtaggcgcccttttgcacttcactggctgaaccccagtactgcttgtaagtcttgccgtcgatcttaatcacgttgcccggggattcttcatgcccggccagcattgacccgatcatgaccatgctggccccgaagcggacagacttggcgatgtcaccgttgtggcggatccccccatcagtgatcaaaggctttctggccaccttgctgcacattctgagggcagccagctgccagccgccagtcccgaaaccggtcttgagcttggtgatgcaggccttgcccgggccaacccccaccttggtagcgtccgcgccggcattttccagttcccggacggcttccggcgttgccacgttgccggccgtcaagaaggtgtccggcattttttccttaatgtacttgatcatgtcgatcacgtatactgagtgcccgtgggccacgtcgatcgtggtgtattccgggatcaagtccttttccaccagttcgtcgatgaagtcatattcatcgcctttgatgccgacggaaatcgatgcaaaaagtcccttctcatgcatcatcttgatgaagtcggcccgcttttcgggctggaagcggtgcatgacatagtaatagccattttgggccagccagaccgccagcttttcgtcaatgacgctttccatattggcgggaacgactgggatcttgaaagttcggtttccaaacttgacgctcgtgtcacattccttccggctcttcacgatggccttgttgggcaccagttggatatcatcatagtcaaaagcttccatgctgaaataattgttcattttttgccagctccttttttaaagtacctttgatactttactgacatttcccataaaagtcaaggcttattcgaaccattcacgaacgttctgaaaatattattcggatttcctgttgactaattgcccggcaaatgctaacctttctaacgtaagttctacgaaatattttttgaggtgaaaaaatgacatcaatcgcagttgtcggcagccaatggggcgacgaaggaaagggtaagattacagactttttagggacgacggcagacctgtcagttcgcgctaacggcggtaacaacgctggccacacgatcgactttgacggcaaggaattcaagatgcgcttgattccatccgggatcttcgcggctaaattgggcgccgtgatcggcaacgggctggttatcaaccctgaagtcctcctgggcgaactggacaacttggaaaagagcgggatcgacaccagcaacttgaagatctccaaccgcgctcacgtcatcatgccttaccacgtaatgcaagacacttatgaagaagaagccaagggcagcctgaaggtcggcaccaccaagaacgggatcgggccaacttacatggacaaggcttccagaatcggcatccgggtctgcgacctgatcgatccggaaacttttgcggaaaagctccgcttcaacctggaaagcaagaacgccctcttcaccaaggtttacggcaagccagccatggactttgacgaaatctacaacaagtacgttgaatacggcaagcggatcgccaagtacgtttgtgacacttccctctacgtcaacgacgccctggacagggacgaaaaggtcctctttgaaggtgcccaagggatcatgctggacatcgaccagggtacctacccattcgtaagttcttctaactcagtttccggcgggatcgcttccggcagcgggatcggggctaaccggatcaagactgtcctgggcatctgcaaggcctacactaccagagttggtgccggcccgttcccaactgaactgcacgatgaaaccggcgacaagatccgggacatcgcccacgaatacggtactgttactggccgtccgcgccgggttggctggtttgactcagttgccctccgtcacgccaagcgcgtagccggcatcaacgccttgagcttaaacctgctggacgtcttcagcggctttgacaagatcaagatctgcgtggcctacgacttaaacggcaagcaaattgactactacccagccagcttgaaggaagttgaagcctgccagccagtttacgaagagctgccagcctgggaagaagacatcaccggcgccaagagctgggaagacctgccagaaaaggcccaggccttcgtcaagcggatcagtgaaatcactggcatccctgtcgtgactgtttctgtcggcccagaccgggaacaaaccatcgttttgcaagacccatggactctgtaagacggtaaaaaagctatcaacacaaaaaccgtttcgcctggcgaaacggtttttcttgtctttatattttcttctgctgtttgctacttgaccgacaaaatggtcacttcatagtcccccattggggcttcaaccgtcacccggtctccggccttgtgcttcatcagggcgtggcccaaaggcgagtcaaagggcagttttccatcccctacggcctcttccatccggccgacgatccggtattcttcaacctcctggtcgtcttcatagcggatttccacctgcttgcccaggttgaccttgccgtcgttgaccgtttcgatgacttctgcgtatttcagctgcttgttcaagtagcggacccggctgtccaggtggcggagttctcttttagcggttgaatattcagtgttttcggacaagtcgcccagggcccgggcctccttcaggttctgcacccggcggggccggtcagccttcaaagccgcgatctcgtcttcaatctgcttgtagccctcgggggtcattttctgataatataccatgcttgccagtcgcctttcacttccattttttaatcattatagcccgcccaggtctttttgccaaaaattttatttagcagtcaaaaaagttgaatgctaattacgccatttttcccaaaagggactataatatagttgtcgggaaagaaagcggctccaccgcttctctccccgcctctgtttgtaaaaggcaatttgaataatttgttgaagggaagttttagactatgactaatgatttaatgaaccgttacaacgacttgttcgatcacatgggcggctggcttgacaactccaaggacttcttggacagccacgctttcagaaacattttgcaatcagacgttgctgaagatgagcacgaatacaccgtcaaggtcgacgtgccggggatgagcaaggatgacatccacctctcttacactgacggaattttgacgatttccggccaccgcagcactttcaaggatgacagcgacaagaagaagaacctcctgcgccaggaacgcagcgaagggtcagtttccagaagcttcagcctgccgaacgttgacaagaaaggcatcagcgctaagcttgacgggggcgttttgacggttaccctgccaaaggcagctccagaagaaaacgaagacacgattactatcgaataagcccagagtgcttagagaagcccgcgagggcttctttttttgtcctctttagcgtaagattattctataatcatctattgctaaaggagatttttcatgtcacacgaattaagcccccagctcctggagtccttcagccgggacttcaacgctgatcctaaaaatcaagtaatttcccgagccgccagaagaagcggcctcttggaagctgcctacaacccggccgtcagccagcggctgaaccggactttttccatcgagctggacactgacaatgtcaccaaccagcagcaatccggccgctgctggctcttttcaaccttgaacgtggtccggcacaattttggcaaggccaacaaggctaagaacttcaccttctcccagagctacaactttttctgggacaagattgaacgggccaactacttctacgaccggatcattgctacggctgaccggcctttgactgaccggacggtccgcggctactttgactggtgccagaccgacggcggccagtggcacatggcagcttccctcatcgccaaatacggggtagtaccggcttacgccatgccggaaagcttcaacagcaaccacagccaggctttggacatggttttggccgacaaggaaagaaaagatgccttgaccctgcgccggctggcgcaagcaggcgaccaggaagggctggaggcagcccggaccgactttttaagccagatctaccggatcatggctacggccttgggtgaaccgccaaagacttttgacctggaattcagagacgacgacaagaactaccacttggataagggcttgactccggtccagttctacaaaaagtactgtgcgaccgacctggacgactatgtggttttggctaatgccccagaccatgaaatgaaccgggtcttgcacctgggctttgaagacaacattaagggcggctaccctaacctcttcatcaacgtgccgatggaatatctggaagacgcggcgattgcccagctgaaggacggggaagctgtttggttcggcaatgatgttggccggcaaatgaaccgcaagaccggcttcatggacctggatctctaccagctggaccagcttttggacatcgacagccacttgtccaaggctgaccgcctggcgaccgggatcggggaatcttcccacgacatggccctggtcggcgttgacgtggacggcgggcaagtccggcaatggaaggtggaaaactcatggggcgacaagtccggggaaaagggctacttcaccatgagcgctgactggttcagagaatacacctacgaggtcgccgtgcaaaagaagcacgtgccggctgaaatcctggacctgctcaagaaccagccgatcgaacttgatccttgggattccttaatttaagcaggtatgttaacattgacttgttaatattaaaacaaaaggagaaaaaaatatgagtcatgaattaactctgcaggaattggcggaattcagcgccaatttcaatgttgaccctaaaaaccaagtcatcgcccgcgctgccgccagaagcggggttctggaagcttcctacaacgaacgcgtggctggccgcctaacccgggtcttttcaactgaattgccaacggacaacgtcaccaaccaaaagcagtccggccgctgctggctcttctcaaccttgaacgtcttgcgccacgacttcggcgccaagcataaggccaagaactttaccctgtcccaaagctacaacttcttctgggacaagctggaaagagccaaccttttctatgaaaaagtgatcgaaaccgctgataagccattagacgaccgggaagtccgcagctacttcgacttcgccggccacgacggcggccaatggcacatggccatctctttggtcaagaagtatggtgtcgtgccaagctacgttatgcctgaaagcttcaacacttccgctactaacggtttggccagcgccctggctgacaaggaaagaaaagacgccctggccttgcgccgcctggctcaagcaggtgaccaggaagggctagaaaaggcccgcaagaccttcttaaacgaaatctaccggatggttgccatcgccgttggtgaaccgccaaagacttttgacctggaatacagagacgacgacaagaactaccacctggaaaagaacttgaccccagtctccttcttcaacaagtactttgacgtcgacctggacgactacgtggtcttgaccaacgccccagaccacgaatacggcaagctctaccacctgggcgctgaagacaacgttgaaggcggcagcccgatcctcctcttgaacgtgccgatggaatacctggagcaagccgctgttgcccaattaaaggacggggaagctgtctggttcggcaacgacgtcctgcggcaaatggaccgcaagaccggctacctggacactgacctctacaagctggaagacctctttgacgttgaccttagcctgtccaaggctgaccgtctggctaccggcgctggtgaagtttctcatgccatgaccctggtcggggttgatgaagacaagggcagcatccgccaatggaaggtagaaaactcctggggcgacaagtccggggaaaagggcttcttcgtcatgagccacaactggttcaaggaatacgtctacgaagtcgttgttcacaagaaatacttgaccaaggaccagcaagaactgctctcttcaactccggttgaacttgctccttgggactcattagcctaatgggtacgctgattatcgtcggcttgatctcgctcgtcatgctgggcctggtcatcgccgcccttcaccgggattaagcatgaaaaaaaccgctcaagttctgttagagaactgagcggtttttactttggacttaatccttgctcttaaactgatcgccggctaaagtccggtagaactcagcgtgagccgcgttgtagtaaggcaccagccagaggaagccgatccccaaggacaggccggccagaatgttccagccgataaagctcaattagaagaacgaaaaatagacgaaacacaaaaaagagagctcgctggagctctctttctttatttgctttatcaaactacttctcgtagctttgggcaaccttttcgtagtaggcaacttcatcgtcagtacacttaacaaagtggcctggacggatttcgtgcatggaccgttgatcgtccttaccgtcgccttcgaacttgccgtattcgtaatcgatccgcttccgggaccgttcgatttccgggtctggttgcggcacggcagagatcaaactcttggtgtagtcgtgcagcgggtggtcgtaaacttcgtcagcactgccgacttccagcagcttaccgtagtgcataaccccgatccggtcagagatgaacttaaccatggacaagtcgtgggcgatgaagaggtaagtcaagtcatgctgcttcttcaagtcgatcatcaagttgacaacctgggcttgaatggacacgtccaaggctgaaataggttcgtcggccacgatgaacttcggttcaacggccaaggcccgggcgatcccgattctttgccgctgaccaccggagaattcgtgtgggaaacgggaagcgtggttacggttcaaaccaaccgtttccagcaggtcttcgacccgcttgcgccgttctgccttgtccttaaccaagtggtggatgtccagcccttccgcgataatgtcttcaaccgtcattcttgggttaagggaagcgtatgggtcctggaagatcatctgcgcgtcgcggcggaaagccaattgttcgtcgcggccatgcagcttggccacatccttgccttcaaagaggacttcaccggccgttggcttgtacagctgcaaaattgaccggccagtggtggtcttaccagaacctgactcaccaaccaggccgaagacttcaccttcatagatgtcgaagctgacgtcgtcgacacccttggtgacggtgcgtccgttcttgaagtattgcttcaagtgcttgacctctaaaatcttttttctttcttctggcatattctgcttctcctttaatccttgtcagctgcttgcagttccttgtagtgttcccagcgacgcacgatttcatcaggcggagtaacctttggcgcgtctgggtgcaggagccaggtagcagcttggtgggtttctgaaaccttgaagaacggcggcttcatttgcgcgtcgatcttcatcgcgtacttgtttctcggggtaaatgggtcgccctttggcggatcaagcaagtctggcggggtccctggaattgattccagcttttcactggtcagggtcggcatggagttgatcaagccccaagtgtaagggtgttgcgggttgtagaagatttcgtcaaccgtccccttttccaaaaattccccggcgtacataacattaacgcggtcagccatcccggcaacgacacccaagtcgtgggtgatgaagatgatggaagtcttgaccctcttttgcaagtccttcatcaagtccaggatttcagcttgcacagtaacgtccaaggcagtagttggttcgtcagccaaaagaatttccggctcacagatcaaggcaatggcgataacgattctttgccgcataccaccagagaattggtgcgggtattggttgattctttcttcagcgttcgaaataccaacggccttcatcatttccaaggccttagcccaggcttccttcttcgaaacgcccttgtgcttgatcaatggttcagcaatctgctggccgatcttcatggtcgggtccaaagaagtcattgggtcctggaagatcatggcgatctggttaccacggatctgctgccattccttttcggaaatcttcagcaggtccttgccgtggaaaaggatttgcccacccatgatctgggagttcttagccaaaaggccgatgatgctccgggtggtaacggacttgcctgaaccggattcaccaacgatcgctaaagtttcaccttcatcaaggtggaatgaaacgtcacgaatggccttaacttcaccagcgtaagtgtggaagtcgatctttaagtttttaacgtctaaaattctatttgccatatgttcgtctcccttatctttggcccttagggtcgaaggcatcacgcagaccgtcaccgagcaggttaaaggcaatcatcaaaacgcagaggactgctgctgggtaccacatttggtatggcaggaactggaagttcttctgcccttcgttcaaaagtacacccagggaagtttcaggcgcggaaataccgataccgatgaaactcaggaaggcttcgaagaagatggcactcgggatggtgtacatggtttgaatgatgatgatactggacaggtttggaatcaggtgcttagtagcgatcttaaaggttgattcgcccaaggaccgggctgccagaacgtattcttcattcttcagcgacaaggtctcggcccgaatctgccgagccatggtcgtccatgaggaaatggccagggccaagatgatggaagtgatgccgggcttcaagacaaccagcatcagcaccacgataaccagggtaggaactgaagaaatgatttcgataatccgttgcatgatgttgtcagtcatgccgcccttccaaccggagatgatcccgtaggcaaccccgatggccaggtcgaagaaggcggcaaccacggcaacgatcaaggagatcttggtaccgtagatgattctttgggccaatgaccggcccaggtagtcggtcccggcaacgaagtacttgccagctggcactgaagcgtaagcatcagtccaaacgccgttttgcttgatcttcccgttcaagccgttgagccactcaaagcccttccacttggccgggaggttggcgtattgcggagctgacttaaccaagctggagttgttgatccagaagctggaaccaaaagcgataactaccatcacgatgatgatcacagcggaaatcatggctgccttgttgctcttgaatctgatccacacgttctgcatgaaagaaagtgagggaccagaaatgtgttccgcactttgcgtgtcacccttttccacgtgttcaaaggattcaggtgtgatctttacgttacttgcgtcttgatccattgattttaacctcgctttccgttagtcagtcagtctgatccgtgggtcgatcagactgtacacgatgtcagtgagcagcaggattaccaccaaaccgaagcagtaaaccatacttacacccatgatggtcgggtagtcattagtcaggattgacttggtgaactgttccccgatcccaggaatgttgaagatgttttcgataaccattgaaccagtcatcaaagcaacggcgtatggcccgatcaaggtaaccaatggaatcattgagttacgcagggtgtgctttctgatgacttcgatccggctaagacccttggccttgcccagttcaacgtagtcggaactcaaggtgtcgaccatttccgttctgataaatctcgctgtttcggccagcggccctaccgagagggcgatcgtcggcatgatcgtctgtgcggcttcaccccagccggcgattgggaaccagcccagcttcaagccgatgtagtattgaagcaataccgccagaacgaagttaggaaccgacttaccgatgatggaaacgatcgtcgcggtggagtcgatccaggtaccttggttcatggccgcgattgagcctatgatgatccccaggataatcccgacaaccagagcttgcagacccaattgagcagaagcgcccaaacgcgccccgatcaagctggaaacaggctggttgctgtattggaaggaaatcccaaagtcaccatgcgcggcgccagccaggtaagtgatgtattgttcaataataggtttgtccaagccgtattgcttgttcataattgccttttgggtagccgtcatctttgcttcgttggcgtacggagaacctggcatcatcttcattaagaagaaggtaatcgtcgcaacgaggaacaaagtgaggatcatgtagaaaatacgttttagtaagtatttagccatagtattgctccttacactttttcgctttaatcagcattgcatttttaatgtttttcttattataccaaaaaaataaagaaattaccatatgatgatataaaactgtgcccctaaaagtcaagcactacgggctttttgtccatttttcccatcatttggcaactaacttaaactttgattttttcttttttgagtctatctggaacttagactgaccttttttcaaataagtgttcggctaagataaaaatattagtcttttttcctgtaaaaactaattttcttaactttcagccagcagacatctttagtggcctccctcctttagcccaaaaaatatcctattcccggacataaatcccggaataaagaaaaagttgagcgttattgctaacgtctcaactttcaattataccacggttaaattttaatttttaaccgcgtaagttgtcttaaagtctgggtattcgccgttgaagaccaggttcttgatatttggtctgatcatccaggcctgacccatgtggtaaagcgggctgatagcttcctggtcgattaggatcttttccgccttgagcaaggccttgcggcgcttggtcttgtccatggtcagggaagccttgacagccttatcgtattccttattagaccacttgccaaagttgtaagtctgtcctgactgcatgtaagccaggaagtgatatgggtccgggaagtcgctggtcaagccgcccaaaacgacatcaaagttattggcaatttggcgggaaacccgggtcgtctttggcaagttgttgacggaaacggtcatcttaccgccaaaagcctcagtcaaggcactctggatgaattccgtctgcttcttgtagctgtcgtcgtcgtcagccatcagagtaaaggaaaccttcttgacgcccagttccttcaaggccttcttgaagtaactgcgggcggacttgaggtcgtattccacgtacttgttcacgctggagttggcactttccgcttcctgggcaaaattcttcccgtctaaaaccacgttggtggctgagaaggtcttggcctgggtgttgtaggtaccgatcgtggacaagagctgcttgcggttgatagccatggagatggcccggcgcaagttggcattacggaagatctttttcttcttgtagttgtagcagaggtaggtggtgttgcccaaggtcagaacccggtagcccttcttgcccttcatgctcttggctgcctgggtgtccaggatagccgcgtccagcttcccggtctggtagaggttgtagtcagttgacggggtcttctggacactgtagttgatcgtctccagcttaactgccttcttatcccaataatacgggttcttagctagcttccaagtcaggttggacccagtccagcccacggacttgaaaggcccgttgtagacggcataggcggatttggtaccgtagcgcttgccgtacttcttgacagctttggagtccagcggcttcaagctgatggccgtaacgaccttaaaataaggaatcttcttttcaaaagtcacaaccagcttgtatttgccttcggccttgacacccaggctggacggcttcttcttgccttcagagatcttgatagcattcttgatgccttcgtagttgttgacctggctggaagcagtcttggggtcaacctgccggcaccaggcataaacgaaatcttccgccgttaccgggtccccgtttgaccacttggcatcctttctcaagtaaaaggtccaggtcaagccgtctttagaggtcgtgctcttggtagccacgcccggaacggttttggagttttcgcccagccggtagaggccttcataggtattggcgatctgttcctcactggctgtatcgtcggccttggccgggtccaggctttccagttcagaagtggtcatccagttgattgacttttcatatccgctgctggacacaggcttggctgacttggtcgcggtcttgctgcaggctgccagcaagaaggcgccggatacggcgacagttgccgtcagaagctttttaaaattactcactgttttgtcctctcttggtcaaaaaacttttttgtaaaacacatttttagcaatccatcagcatctaatcattttttcattatagaagatttccagtcttttgacaattctaaatttaccagcaaagagaaatagccagaatagtatatagcaaaaagaaaacggagccctggctccgttttctaaaaaatctgtcagcttaatctgttgctttccagactacttaagctacttaatgtaagcttccttgaagttgtaaggtgagccggcaccgttgaagacaacgcccttgacgctggtcttaaccggggtagcttcgttggtgtagtacagcggggtaaccccttggtcttccagcagggcccgttcagcagccaccattgccttccagcgggttgcggttgacccagtggtcttggacagggagatggccttacgcaggttggcgttggctaagtacttgtccttggcgatgttgtattgcaggtacttggttgaggcaaactttctgacagtccagccggtcgtccccttaagctgcttgctttgctgggcgttcaagttggtttcgagaagatgtagaagcccatcaacagcttgaagtatgggattctccggtccagggtcaccgtcagcttgtacttgccgtcagccttgatgcccaaagtgttgactgctttcttgccggcaacgatcacgtcagcgttcttgatgccggagaacaggtaggcgtattcagaagcagtctttgggttgaccgttcttctccaggagtagacgaagtcctgggcggtaacttcatccccgttggcccatttagcgcccttgcggaggttgaaggtccaggtcttgccgtcagagctttccttccagctcttggcgatcctcggggttggcttggcattgttgcccagcctgatcaaaccttccatgacattgttgaactggtcagcgtcgtaacggtcggtagccttggacgggtccatggtcgtcaattcggcagcttccgtccaggacaatttttgtgccttggatgatgagcttgacttgcttgatgagctgccacaggctgccagaagctcagctgaggcgagcaaaactgagccggtagcgaatagcttctgttttctcataatctcacctcgttttattaaaaagcgaacttagattagactataattaaaagctataacttaagtctaattatagaggggtttttttaatttttaacccctttttaaaaattaaaacagacaaaaaagaaaacgccttccggcgttttcttctaagctttagctagcttgtttttacttgatgtaggcgtccttgaagttccaagtcccacggttttggatgacgttcttgacgcttggacggatcatccagacattagtgtcgtagtacaatggtgagatcccggcatccttcagcaggatggtttcagccttgctcagatcgctccagcgcttgcttgcggaagcagtggtcttggagtcagcaaccagcttgtcgtaagttgcgttcttccacttaccgttgttttctgggttagttgaagtgaacaggtccaggaaggagatcgggtcggcgaagtcggcgctccagccggagacaacgatgtcgaagttgccggcagttgaccgggacagacgggtcttgaacggcaggttttgcgcgctgacgctgaccttgtcgccaaaggttgattcgaagttagactgcagggcttcagtggtcttgttgccggcgtcagtgtcgtcagacaggatcttgaagctgaacttgcttacgcccagttccttcaagcccttgttcatgtacttaacggcttccttcttgttcgggttagccgggtacaggctttcagctgagcttgggatcagcttggtgtagtcttccccgttgacgttggtcaattgggttggagtcaaagtgtcggctggctggttgttgccgcccagagtggtggtcaggcccttccggttgacagccagtgacagggccttgcggacgttagcattagccaggtacttgttcttggcaatgttgaattgcaggtagaaggtagcaccttggttaagttcggtgtagcccttttggttcttcaattgcttggtttgtgaagagtccaaagcagtcgcgtccagcttgtttgactggtagaggttgtaggcagttgatggagtcttttgaacagtccacttgatggtgtcgagcttgacgctcttcttgtcccagtagtatgggttcttgaccatcttccaggacaggttggacccggtccagccaacgtgcttgaatggcccgttgtagagcatgtacttagaagccgtgccgtacttagaaccgtacttggtaacagccttttctgactgcgggaagaagacggcaaagcccatcagcttgtcaaagtatgggatacgccgttccagggtgataaccagcttgtacttgccaacagccttgatccccagagagctgactggcttcttgccggcaacgatagcgtcagcgttcttgattccggagaagaggtaagaatattgagaagcagtcttcgggttgacggtccggcgccaggagtagacaaagtccttggcggtcaattcactgccgtcgctccacttggacttacgcaaggtgtaagtataggtcttcccgtccttagaaaccttttcgctggtagccaggcccttttccagcttggaattcttgcctaagcggtagagaccttccatggtgttggaaatctggttgaaggaagccgcatcggtggcctttgagaggtccatcgttggaatttcggctgagtccatccaggtcaaggtcttcttactgctggatgaagaagaacttctattgctgccacaagcagcgagcaacgctgctgaagccagaaccgtggctcccaggcttaaagtcttagataatttcatctttttctccttgcttttaccgactgttccagcgcctacacaaattaaagctctacagcagcctttaatgatattttcattatagttcttcgcttatgcttcttcaagtatttttaagaaaaagcgctattttatttcaacaatctaaatatccaaaaacagatacaagtcaatctaaaaatacttatagcacaaaaaagaagaggctgagcctcttctttttgcttgattacttgatgtaagtgtccttgaagttccaagtaccacggttttggtatacgtccttaacagttggacggatcaaagcagcgttagtgttgtagtaaagcggagcaacaccgacattgttcagcaggatgtcttctgccttagtcaagtcgtcccaacgcttgctggttgaagcagtagtcttggagtcagcgatcagcttgtcgtaggaagtgttcttccacttaccgttgttttctgggttagttgaagtgaacaggtccaggaaggagatcgggtcagcgaagtcggcgctccagccggagacaacgatgtcgaagttgccggcagttgaccgtgacagacgggtcttgaatggcaggttttgaactgaaacgctaaccttgttgccgaaggttgattcgaaggttgattgcaggaattcagtagtcttcttgccggcgtcagtgtcgtcagacaagatcttaaagctgaacttgcttacgcccaattccttcaagcccttgttcatgtacttaacggcttccttcttgttggttgaagctgggtagaagcttttagcagacttggagatccgcttagtgtagtcttcaccgttaacgtcagtcaattgagttggagtcaaagtgttggctggaacactgttgccgcccagggatgaagtcaagcccttccggtcaacagcaagtgacaaggccttgcggatgttggtgttagccaggtacttgttcttggcaacgttgaattgcaggtagaaggtagcaccttggttcaaggttacgtagcccttctggttcttcaattgcttggtttgtgaagcgtccaggccagtgtagtccagcttgtttgactggtacaagttgtaagcagttgatggagtcttttgtacgctccaagtgatcgtgtcaagcttgacgttcttcttgtcccagtagtatgggttcttgaccatcttccaagacaggtttgagccagtccagccaacttgcttaaatggcccgttgtagagcatgtacttagaagccgtgccgtacttagaaccgtacttggtaacagccttttctgactgcgggaagaagacggcaaagcccatcagcttgtcgaagtatgggatacgccgttccagggtgataaccagcttgtacttgccaacggccttgatccccagagtttcaggcttcttcttgccggctacgatcgcgtcagcgttcttgatcccggagaagaggtaggaatattgagaagcagtctttgggtcaacagttctgcgccatgagtagacgaagtccttggcagtcagttcgctgccgtcgctccacttggacttgcgcagggtgtaagtgtaagtcttaccgtccttagaaaccttttcgctggttgccaaagccttttccagcttggagttcttgcccaaacggtacaaaccttccatagtgtttgacaactggttgaaggaagtagcgtcagtggccttggacatgtccatggttgggatttcagaagcaaccgtccagttcaaagtcttctttgaagaagaggattccttactgctgttgctgccacaggcagccaagagagcagctgatgccagcacagttgcaccaacgctcaaaatcttagataacttcatcttttttctccttataacacatatttgtttgggctgaaaagatggccaacacagcttaaagccgtccctcagccaacatgataaattaattataattctaagttagactcttttcaagggctaacttaaagaaaaataaatttttgccgaaaaatgagcgaaaaatgacaagaaaaagataaaaaagaagcggccgtacggtcgcttcttgtcaaattcttttaattttgctgttataccgctacttgctgctggtgatgtaggcgttcttgaagttctaagtcccccggttctggatgacgcccttgacgctcggccggattaaagacgcggtcgtgctgtagtaaagcggagctacaccggcatccttatgcaggatgttttctgccttagtcaggtcgctccagcgcttgctggttgaagacgtggtcttggagtcagcgatcagcttgtcataagttgcgttcttccacttcccgttgttttcagaattggtgaaagtgaacaggtccaggaaggagatcgggtcggcaaagtcggcgctccagccggagatgacaaggtcaaagttgccggaagttgaccgggaaagacgggtcttgaacggcaggttctggacggtgacgctgaccttgaagctgaacttgcttacgcccaattgctttaagcccttgttgaggtacttaaccgcctcgctcttcttggttgaggacgggtagaggctttcagctgatgatgaaagcagcttggtgtagtccttgccgttgaggcggggtcagagtattggccgccacgttgttgccaccaagtgatgaaaccagccccttccggttgacggccaaagagatggctttccggatgttggtgttggccaggtacttgttcttggcaatgttcaactgcatgtagaagattgccccctggttcaaggtggtgtagcccttggttgacttcagctgcttggtttgtgaggagtccaggctggtgtagtcaagcttgccgctttggtaaaggttgtaagaagttagttgatggcgtcttttgcacactccaagtgatcgtgttcagcttgacgctcttcttgtcccagtagtacttgttcttaaccatcttccaggaaagattgaacccggtccagcccttttgcacgaatggaccgttgtagatcatgtacttggaagccgtaccgtatttagagccgtacttcttgaccgccttttcagactgcgggaagaagaccgcaaagcccatcagcttgtcaaagtaaggaatccgccgttccaaagtgataaccagcttgtacttgccgacagctttgatccccaagctgttgactgacttcttgccagctacgatggcatcggcatttttaatcccggagaaaaggtaagaatactgggaagccgtcgaccgtccagctcaaggcctttctggtcgacttggaagatgaggaacttgagccgcaggccgccagcattaaagcagataatgttaccgctgctccagctcctaaaaatttggaaactttcattgtgcttcctccttacttgtctatactgatgattgactcacatgtctaaccaaaagtttaatgtttgtgttagagaaaagcgaggatagtttcatttgaaatccatctgttatttccaggatcaattggtatagcaaggattatcggcattatttaaatgtttctatattttcttaagaagaggtaaacttctttaaatttaatctaaatcccattcatgtctaaattcccggacaaaatcccgcatgtattctgtccgccggcgggcttctttttgggccgcccggctgttcatcagcccttccagcttaaaaagcttttcataaaaatgattgatcgtagtttcttcatgattccggtattgatcatggctgaccagttccatcggcgggatttccggatcgtagatcttgtcatcgtgcttgccgctgtaaacgaaggcccgggcaatccccatggcccccaaagactccagccggtcggcatcctggacgtactctccttctaaagagagccggtagtggcggtcaatatttttggaaaaagacatgtgctcgatcgcgaaaaagacattgtcctggtcgcttgcgcttaagccggcagccgtaaagacttcccgcaatttggctaaaacttcacttgggtttgggcaaaccttctcatcgatcgtgtcgtggacaaagcccgccgtataagcaatatcccggctcttttgcccagcctccgggtgatccgccagcagcattctttcagccaagactgccacccgcttgccgtggtaatagtcatgccccgttctttcttcagccaggttttctttgacaaaatccgcgatcagtttccgttccatttttacctccatgtattctgtaattacttaaacttcccacttacaaaagtgggcttgtaccttgaaaattcaatagtttagccaataaaaaagcacaaggcctttgttcgcttgatataattaagtcgaccaaaacatcatcaatatcaaacgaaaggcttgcgctatgtctagtttaccatcattcgatactgaaaacgaacctaaaattgccccttctgttgaaaagttcttcaaggactacaaagttatggagcttctccgtagatgtgggctccgcaagtccaaaggaatcccactttggtcgatcctttcatctaaaatgctcataatgtaatacctccgaatttttgttattttgtctctaagatttttagtgtgttatatataaatttatgaaattcagtatagtatagggtagcaataaaaaatggaagaggataatttaatcctcttccattactgacatttgaaatctgttttgattttgatgccgcagctgcaatatataaaatagcagcaaaaagagtttatcctgaataaacgatgttactattaccaatgtctgaaaaaagggtataatatccctatatcaggctaatatggcagcaataactccgtttttattcatgataaactctcaactccctataatataatcaatagccatttatattattatatagtttttagaaatttgtaaacatctatagttgaaataataaaaattaaattaaagcaaataaaaaaggagaccctaaggcctccctgaaaactatctataacttctgttgttgaagtttcttctttcctgttttcttgcttttctgcattcagggcatctctgaggttcgttatcgaaacctttttccttgtagaattcctgttcaccctcagtgaatacgaattccttgtggcaatctttacatactaaagttttatcttgcatttaaatatctcctcttcattatggattaagctaattaaggttcatatcatatctccaaaaatgaagagtgaaatgcacaaaaattggttaagccattgatttaccaatgcaacacatactatatcatatgatttaaaaaaatgcaagaaacataaaaagctttattatatcttaaacttcccacttacaaaagtgggcttgtaccttgaaaattcaatagtttagccaataaaaaaacacaaggcctttgttcgcttgatataattaagtcgaccaaaacatcatcaatatcaaacgaaaggcttgcgctatgtctagtttaccatcattcgatactgaaaacgaacctaaaattgcccgttctgttgaaaagttcttcaaggactacaaagttatagagcttctccgtagatgtgggctccgcaagtccaaaggaatcccactttggtcgatcctttcatacatcttcagtaatgtgtttccagacagaagcatgtacatgtaacagaagtctggcaagtgtactgctggcttctccaaaaacacctactatcgattcatgcagaacccacatatcaactggctttgcctcactattctgctagctgagaggatcgtaaatgggcacctgaaagatctgacttctgaccaacgccccaatcgcttcatcactcttgtcctcaaagaacgatcagaatgtcatcgggacgacccagaagatcgacaagcgcacaatcgcggccaagaggtggattatggcccaatcaaaggggaccgatgtagttatccagctgctcgatcaagccttgaaagtagggctcactgccaagtacgtcatgtttgacacttggttctccaagcctcatcagattgtccaaatcagtcaacgtggtttgaacgtaatcgccatggtaaagaaaagctccaagattacatacgagttcgaaggaaagcggatgaacgtcaaacagatcttcaacgcatgcaagaagcgtcggggtcgttcaagatatctcctgtccgtccctgtaaaggttggagatcctgccaaagatagtgcccagattgatgccagaatagtctgcgtaagaaatcgttccaaccgcaaagactggatcgctcttatttgcacggacatgacgatcgatgaaaatgagatcatcagaatttacggcaaaagatgggacattgaggtcttcttcaagacctgcaagagtttcttgaagtttggcactgaataccatggcctgtcatatgctacaaatcctggtggaagccatgttcgagagtctgaaagagatcttccaaccgacagaagagcagatggaaaggttcaccaacgctttcatttcacgcctcccgaagtacatgcaagaggctatatcgccatcacta

SEQ ID NO: 2217 - DNA, 6781 bp, Unknown
  gut microbiota DNA sequence
atagaatgaatacggtaacattaatgctttgtattggaggataaaaaatgaaggcaatcaagcagctctaccatgagcacaagatcatcaccctaattctgacctcgccaatctggctctttgtcctcttctccgtattgtttacggctaacgagatctacaaatcgacccaagaaggcgtggtaactgaagttctgaacaagactctgccccagcatggctacagcgacatctactacttgaatcaggtcaaggctgacagccattttggcatggggaccacctatgtcagcagcttctcaaccaagcggacagttaagcagaaccaggatctctttgcaaaagctggcaagaagattgacaagagcgacgccaacctcccttattacaaggaagtcacggtccgccgaagcggcatgggctggaaggtcaccgtttctgattcaattgggcaagaagaaagcagttatagcgtgaaatgacaaaaaagccgccagaagcgtacttgcttccagcggcattcttactattttgcagccaagctatttacttctttagttttcgttaagcattttgatcatgaaacagccgttcatgtgaacccgcacgtactgcaactgctactaaatcatggcgctctacataccaaattaccaatacatcgttaacgtcgcttggttgaactcccttaggcgtatcgcgaacatggaactcacgatatcctgctaaacgacgcttaagaggatggtcaccatattcatccagcaacgtacctgtctccaaaatctcatcaattgcggctctaatgtcatcgatgatcgtcgggtctaggcggcccaatcgctttaagtcggcattaaatgttgcacgtggcctaaatcttaacttcgacattatttgaactgctcccaataatcatcgttagattccacaataggatcttctggcaatacattgcgacgaatcagttgatcacgtgcaactgcataatccaatgagtcttctttagcctgtagcgctttttccatccaatacaatttttcctgtgaaagaactgccacagaccgactattagaacgagcgatatatactacctcatcgtcatcgttaacttgatctagatattttttgatgtgagctctgaaatcactttgagttaatgctaaagtcatgattcatccctccttgtacttaatattgtacttcattccgccaatgaagccaacaaaaaagccgccagaagcgtacttgcttctagcggctttcttaactcaaggcacttgccaaacggcaaatgtgactccttctcgttcacatcaagggtgtgtcagcatcgacgcttcccgcgtctggccaaaggcctgatgccctctatcttaaaatacgcacctttgcgttttcctcgactcgtcgatattagattatacgctctttcccaggccttgtaaagctactttttcaacttctcccgcagcttgagccgcttgatgtacttgttccaagcttcctggaacagggttgacagcaagaagcccaaagcgatcgacacagtcacgatagccacccgcatcatcatctgctgggcagcaatatacttgccatcaatcagccgtctgaccaccatataagccggcgctcccggcaccagcggcaccaggcccggtacgctgaaaagggtgacgggacactttttccacttagccaaaaccaccgcgaccaagcccacggcaaaggcccccagggtgttggaaatcatccgcccgccagaagcctccgtcaccagccagtagaccatccagcccgcgcaaccgcaaatcccgctccagtgaatcacccggtggggaatattcaccgtcaaggcaaagcccaccgtggcaatgtatgaacagaccaagttgatcaagacgtcccagatgttgaaactaacctgcatccccagcatgactaagctcctaaaaatctaatcacgatcccgacgccgccgcccagggcaatcgccgtcattgccgcctcacacatgcgcacgatccctgacacccagtcgcccataaacaagtctctcaaggcgttggtcaaggccaggccgggcaccagagtcatcaaggccccagtcaaaatattgtttacattgcaggccggaaaaatcccattaatgataatggtgagtagccccatctccatggccgcgatcatttccgccaggaagcggatcttggtgtggcccttaagccaggagtccatcaaatagccgctggccccgatcagcccggcaaccgggaagtcgatccagtcatagacatccaaaaagagaaccatcaaggtggcactcaagatcccggccccgatgacctgcagccataaaggaaaagtcgggatgttctcctcgatttcccgcagcttctcttccagctcctccaggtcaatccgcttgtcggcgaattcccgggagaattcattgacctggtcgaccagttccaggttgatggcccgcttctttacggtttccagttccgtcaccgtgctgcattccccatcatccaggctgacgaagaggccggttggcatggcaaaaacattgacctccttgatgccggcgttgacagcgatccggcgcatggtgtcctccacccggtacatttcgctaccgccggccagcatgaggcggccagccttcaaacaagtatgaacgactcttttcatgtacgcgtctgtgctcattttttcaccgcgagcctgcctaaaggcagctaaatcaattattcatggcttcaatatcgacgaccttgtcgacccagtcacctctgaaaaagtcccgttcgtgactgacgatgatgaccccgcccgggaagttgacgatggccttccgcaggctgtccttagtttcattgtccaggtgattggtcggttcgtcaaggaaaagcaggttggccggctcaaactgcatctcagccagcttcaccttctcctgctcgcccccggacagttccttaagtggactcatgaccaattgggcggtcagccccatccgggctaaagcctgccgcaattccttgggcttcttctggtcaaattcactctctaagtactgcagaggcgtcatattctggttgggccaggtcaagtcctgcttgaagtaggccagcttagccgtagccgacaggtcaaagcccccatagatcggcggaatctgccccaagagggtcttcagcagggtggtcttgccgatcccgttaaaaccggtgatggcgaccttttccccattgccaacggagaagttgaaggcttccttaaccaaagcctggtcgtagccgatcaccaggtcctgcgtctgcaaaagcaagttagaggccgtttccacgtatggaaagtcaaatttggccttcttgccgttttgcggaggggtcagaatttccattctgtccagctgcttttgccgggaccgggcacttttggcccgggtgccggctttattttttctgatataggcttcagtcttggcgatctgccgctgctggttggcataagccttcatataagtctgccggttggcttccttttgccgcatggcttgctttaatgtaccggtatagcgggtgatggtcccgaagtcgatgtcgataatacagttggttatccggcctaaaaagtcgtagtcgtggctgacaacgataaaagcgccggtaaaatcattcaagtagtcgaccagccagtcgatgtggccgacgtctaagtagttggttggttcgtccaggaccaggacttgaggctgctctaagaggagcttggccaggatcagcttggaccgctggcccccggaaagctgggagacgtcccggtcaaagcccagttcagccaggcctaagccgctggccacccggtcgatttctgtgtccaggtcgtagaagttgttttcttccaggtaggtctgcaaacgcccggctttagttaaaagggactcatcgccgctttcgctgtaatcgatgtaaagctggttcaaccgggcttcatcttggtagagttggtcaaaagcagtttttaaaaagtcccgcatggtcagaccgggcgtcagtttggcgtactggtccaggtagccgacggagagcttgttttgccacttgactgacccttcatcggggaggatttccccggtcaggattttgatcaaggtggacttgccgaccccgttttggccggtgacccccatgtggtcttccttgtttaaaacgaaattggcgtcttcatagagggtcttttccgcaaagccctgggtcaagccgctgacggtgagtaaactcaaaattttttcctttcttacaggtgaaagttttccgcctgcttgcgctcatggtcgtacttctgcagggtcttgaggatccgcggccagagatagcgcggggcggtcaagtgcaggtggtcgtcagccacccggaagtagctgggactgagcttggttaagccggagaggaattcctcatccaggtggtacttgtcagagatccgctggatttcggcaatcgcgtattcggtgtaagacgagctcacgaagaccaggatggcgccgatgatgccccagaccagggactgggtgttggttaaggcgaaagagtgccggcagatgtagaacatggcgatgaaagtcattacgccggcaatcccgccgtagatgtatggataatagcgttttttcacgaaaattcctcctaattctatcaactatcttaacgtattttgccccctggatagtaggaaaattattgctaaaaaggaaaaaatgcccctagctaagctagaggcatgattgtcagcacctaccaagaatcactgcttcttggcgtaattgagttggcttcataaattgtgtagttggtgatggtctcattgctggagaagtcgaccccgttataggtctcgttcagactgttctgccgggtttcctggttggtcaaagtctgcgtggacaggcccaggctctttctcagcttgttggaccacttctgcaattcttcagttgacgctatctggaagctggttccggaaatcgtcgcgtcgtggccctggatgtagccgctggagatgttgctggccgcgcttctgtagttgatggccaggctggtcatgtcgccaaaagtcaaattggtcttgacgtacttggcaaaaaccttgagcagcttctggtagttggctaaaccgttgacggacaggcccttcttgaccacagcctggatgatctgccgctgccgcagctgccggccgtagtccccccgggggtcgtcatagcgcatccgggcataagcgatggcatggcggccgtccaggtactgcttgcccttcttaaagtcacaccagtcatagctgaagctgaacggcacgttgacgtcaaccccgcctaaagcgtcgaccaggcccttcaaggccttcatgttaacttccacataatagttgatcggcacgttgagcatggccgaaaccgtcttgaccgacccgctgctgcccccaaactggtaggccgagttgaccttgaacatgtagtagctagtgctgctcgtttcacccagaatttccgtcaaggtatcccggggaatcgaagtcatggtcgccttcttggtcgttgggttgacggttaccaggatgatggtgtccgagttccccttgtcatttctcccctcaagcccctggtcgacccctaaaaccagaatcgagatcggcttcttggccgcgatccgggcactggtcgtggtcgcagtgctgccgttattgccgttcatgctcaccaaggctgaatgcagggagaagtaggcatgcgccccccaggtcgccgcgatcatgacggcaaaggtcaccaagaggccaatgatggtcggcaaagggcggcgggactttttcaaaaggccagcctggacaagagtcacattacgaaaaattttctgttgtcttctgctgtgttgctcttccatggactaccccctttagtaatttgctattatttattttcgcatgaaaaaggcatttaataaaccaggcgtggtaatatttagactatcttatttttttgcaaaaagccgctttgagaggacaatactagtggcgaaaaacgtacttaatgtgtttgattatatgtaagagataacaggtaggttctaagttcaattaatttagggaaatccggaactttgctttaggatagatcccagctttcacccacacttcaaaaaacgtatgtttggaaatcagcaggaatacctgctaaaatattcctcgaaacaaagatataattctgaaaggcggtgaaatcaaatggcggaacaggtaaaagaagcaccggcagaattaattcagacaagagtctatgaactacgtcccaacaagactatgagaaaagttttggatgaagcttgtgactaccgtcgttattgctggaatcaaggcctcgccttgtggaatgaaatgtataaggcaagacaaacacttaaatcttctttgtccaccgactccaaaaagctgaccgaagaacagaaagtgctgcttaaagacaagccttcaccgagtgaacgaagagttcgtaatatgttagttgccgataaaaaagactggcagtatacacagtcagcccggattctgcaactggcaatttctgatttgggtaaggcttggaacaatttctttgacaaggcccaaccaggctggggcaaaccaaaatttcggtcaaagcgggaagccagacaaggcttcaaaagtgaccagagcaagatcaaagatggaattctttatttggaacgggcaa

SEQ ID NO: 2218 - DNA, 281 bp, Unknown
  gut microbiota DNA sequence
gcgaagatcgtccgtaataatttatggatcgatgcgatagcggccttcttgtgacttgcagtctcagaagaccgttttcgtttctcgtaataatccgcaatatggcaagggtttcccactttcttagccgactgaatttggtttatggccaagtacagcacctttctgccaatagccgtcccacgctttgaaattgacaggtgggccgtgagattgccagattcataaacttgaggatcaacaccaacgaaggcatttaattggctagggttgttaaaacg

SEQ ID NO: 2219 - DNA, 554 bp, Unknown
  gut microbiota DNA sequence
gataagcttgatgccttgtaccttgccaagctgcaatctgagcacccgcagcggctggcctacgttcaaagcgaagaatatcaagaattgatggccaataaccgtatctatgagcaggcttcgcacgatctgataaccaacaggaatagactgcacaaagccattcagctcactttcccagagattgagcacttaatggttaatccgagagggaaaaactactggagtattgtcctcagattcccacacccagatatcgtactagaaacaaaagaagccgatatcatcgacttcttaaagggcttaaccggtattggtaaaaaacgcgctaacgacatagcgcaaagtcttattcggttggctaaagtcgcatgcccagctgtcaaaaagaacagtgctcatattcgtggcctcaaaatggctattaacaacattctgagcgctgaagaagagtgccagactgctttacaggagatggctaagctggctcctaaacgggatctggagatcctcacaagcattccaggcatcggcgaaaacactgctctaagaat

SEQ ID NO: 2220 - DNA, 3008 bp, Unknown
  gut microbiota DNA sequence
ttcttagtagtcttagctgccttcttggtgttcttagcagccttcttagttgacttcttggtagtcttagctgccttcttggtgttcttagcagccttcttagtagccttagctgccttcttagcagtcttagctgccttcttagttgacttcttggtagtcttagctgacttcttggtgttcttagcagccttcttagttgacttcttggtagtcttagctgccttcttggtgttcttagcagccttcttagctgccttcttggtagtcttagctgccttcttagttgacttcttagtagtcttagctgccttcttggtgtccttggcagccttcttagttgacttcttggtagtcttagctgccttcttggtgttcttagcagccttcttagttgacttcttggtagtcttagctgccttcttggtgttcttagcagccttcttagctgccttcttggtgttcttagcagccttcttagctgccttcttggtagtcttagctgccttcttagttgacttcttagtagtcttagctgacttcttggtgtccttggcagccttcttagttgacttcttggtagtcttagctgccttcttggtgctcttctttgcggccttcttggcagccttcttagctgccttcttggcgctcttctttgcagccttcttgcttgatgatgaagctactgaagaactgctctttgaagcttctgatgagcttgaagcctttgatgattctgatgagctagtcttctttgatgaagattcagcagcagtcttgttgcttgatgatgaagctgctgaagagctgctctttgaagcttctgatgagcttgaagcctttgatgattctgatgagctagtcttctttgatgaagttgctgagcttactgagctggtcttctttgatggagattcagcagcagtcttgttgctcttaacttcagtcttgttttcagttgcggccagaactgggcttacgccagtagccagcagagcagcagcaacagtagctttaccaaggtttttcattaaacggttgttcttcataatacggttccttttcctatatcggtatcaaaacaatttccattacttgcccttaattatactcaactattgaaagatgttaagccaaaaaatgaagaaaattataattaaacttttatcctcactgaaggcaaaattatccagcttattttcaagttaaaagagtttttagtctgttttttccacctatgaacattatatgattgatttctatatgtctacacaaaaaagtaaaagttatatttttaataaaaaagtataaacaagaagtataaacaaaaaacagccctgctgctcagcacaggactgttaaaagccttattcttgctattttactgccgctttcactcttgcgcccagccccacataaaattatacagttccaaatattcaatacaccggaaataaagactcatggtggtaatgaagactggtatgacgagctattggaagaaaacaagctcttcttcacaatagacttcgtcaaagacctgctagatcaggcatataactcacatgacgaggtggaaatgcacgtcagacttgaagagatcatagatatctgtaaggcaactgaaaatagtcactttatttggtttgcacgtctcttataccgccatttgagagggatctacacgtttgccaaatacgggatatcaactggcaaatttgagggtattaacaataagatcaagaccgagagacgtaaagggtatgagtatccaaatgatgaatataatgtagctatcacggaaggcttcctaagtctctcaatcatttacacaattttttatactgaacccttttaagcaaaaactggccaagcgacgatttttcagattaattttcaattatcagactattcttgtttttttagagttaaaattaaattaactttgggagaggaggaaagactatgcaattcaccaagcaatttgaaggaacttttgcccaagtcaaggaacaaatcgacaagttcgttgctgaaggcggccacatcgacgcggtcatcaccgaccacactggcgaaaaggttaccgaagatcacacctttggctacaagatgcgggtcatcgctatctgcagcgaagaagaaagctaaataagcgcaaaaggcgccatccccaaatcgtgggatgacgccttttttgtctataaattattcaacgcttggcaacttaatgtccacgtcatgtttgtcagtaactaccgtcatgaccgttgggtcgtagccggcttccttaatgccgtccaggtcaaactcgatcagagtttgcccggccttaaccaggtcaccttgcgcaaccttgacgttaaagcccttgccctttagcataaccgtgtcgatcccgatgtggatcagcacttccgcgccagccgtagtcttcaagccaatcgcgtggccagtttcaaacaaggctgctacttcaccgtcaaccggagccttaaccacgccctcagttggcactaccgcgaagccttcacccatggcaccagttgaaaaaactgggtcgttgacgcttgacaaggcaatcaccttgccagctaccggagcagtcaaagtttcgctcttttgcttagcttcactgcctggccgctgcttcttttcaaccttcttgccggcaaccatttcatcattgtagccccaaacccaggccacgatgaaggaaattaccaaagctgccgcgctggacagaaggaaggcgtagaaactggtcaagtcacttggattcttcgggttgaagaaggatgagaaaccgatcaaagaaccagtaaagccgtacatggtcccgtgcatcaagccagtgatcaaaccaccgactgctgacccgatcaaacctgaaataaagacctttttaaagcggaggttgatcccgtaaatagctggttcagtaaccccgcagaaggctgaaacagctgcggagatccccaaagtcttggtccaaggaaaagctg

SEQ ID NO: 2221 - DNA, 7678 bp, Unknown
  gut microbiota DNA sequence
ctcactgaccttaacttcaaaaggttaaaaatctgatttcttttgccaagttgaatctaaccatagatttaactagaaaggaatatcagaaaaacttaccaatattgatgtgattatcaagatttagtaagttttatgattcggaaacatctatgaagattaaattgatcgcggtggacttggacggaaccttgctgacttccagaaagaaggtcagccctaagaccctggcgactttaaaaaaggcccgggaaaaaggaattcttgtggtgcccctgtcgggccggcccctgcctggcgtcttgaaggtctttgaacccttcaagctggacccggcagacaactttgctatttgctacaatggcggcctggtccagcggatggacggggaagtcctaagcgccagccccttgactgatgaaaacgtggagcacattctggccttgaagcagacggggatttttggcccttacttcatggacaccaaggatttctatgtagccccaaagggcagtgccttcggtgtcggctttctggccaaggcccggaacatgggggtcaagcggatggtgcccggccagcactacgaattcatcaagggcgagtttgtttctttgcctagcaagatgaagaagttccgggctggcttcagtccggcgattgagcaggaattcgaaatctctgcttccggcggccagtgcctggaattcaatactcctggcacctccaaaggccaggccctaaccactttgctggaccttttgaacatccagccggaagaagccatggtttttggcgacaacaacaatgacctctctgacttccagttgcctggggtcttcaaggtggccatgggcaacgcgatcgacgagatcaaggccgcggctgactacgtcacggccagcaacaatcaggacggcatcgctttggcggtggagaagtttgtagacatgggagaataagatggcaaaatcagttatcggtatttcagcttcagaagttacgatccagtccggccccttcatgggcgagccccggacctacgtcaacgctgcttacgtggactcagtcctcaagaacggcgggattcctttggtaattccttttaccgctggcgggagcgagatggcctttaagcagctggacttagttgacggcttgatcctgtctggcggccatgaccttgacccccacttgtacggggaagagattgaccaaaagagcggggaaacctggccagaccgggatgccttcgacatggccctcttgaagcgggcggaagaaaccggcaaaccggtcctgggcatctgccggggcgcccagatcatcaacgtggcccacggcggcagcatgtggcaggacctgtctttgcggccaggcaacactttaaagcacatgcaggctacccggcctgacgtgggcacccacgtggtcaagatcaagagtgggacaaccctggaaaagatcatgggggaaagcagcctcatgaccaactccttccaccaccagctgatcaaggaagtggctccggacttgaccgaatcagccagcgccagcgacggggtgacggaagctttggaaagcactgacggcaaggtgatcgccgtgcagtggcacccggaagaaatgcacgctaaccctgccccggaagcagccatcatgaaccgtctcttcaagtacctgatcgacaaggcggaagaagagaagcagtagaagaaaagaagcaagcagcgttttcgctgctttttcttttacctttttcagaaagggactaacaaaaatctcataaaactgtcataatgtaaaaggatctgtctttccaggcagaaatggaatgttacacgtgaaacgatgacggtgaagaaatgaaagacaagcatttgggaatcctgttggcaattaccggggctgccttatgggggacctcggggacggcagcggaaatgctctaccaaaaccccaatatcaataccttctggctggttgacgtccggtcatggctggccggggcgagccttttgctcatttccctggtccacaaggggaaggggacctttgctattttcaaaaatccccgcgaccttctctacgcggcccttttctccatgctgggcatcaccggggcccagtttacctacttctacacggtagcggcctcaaacgcgccgacggccactgccctggtcttcctggccccggtcttgatcatttgctttatagcggctaaaaccaggcaaatgccccggagaatcgatctgatcgcggtcttgctagcggtggtcgggacggtggttttggtgaccaacggaaatttcagccacttggcggtgacgcctaaaaccctggtctggggcttcttcagtgccttgacccaggctctggccattgccatgccggccaagctttttaaaaagtacgggaccatcactattttggcctgggggatgctactgggcgggattatcctcagtccggccctggccgtgatgcccgccactggagttacggttaaggaatggagcctggtgatctacatcgtgatcgccggtacggttttcgcttactcgctctacctttccagcgttatgtacatctcagccggcctggccagcatgctggaggcctttgagccgctggtagcgacgattctgtcggttacccttctgggcagcgactttggcatcatgaagatggcgggcggggtcttgattatcctggccacctgcctgcaggtcgtgcccagtccccgccggggcaaattgcgaagaaatctttagaactttttatccatattgccgaaaaagcccgtcagagcaaggaaaactgtgttaaaaccaaaacgatgatttgatcattaacatgggggaaaaacaattgaataatgtattagacgccaaaaccggggtcaaggataccctgccgaccgtgctcggctacgtggggattggcaccgcttttggcattatcgcgcataccaatggctttagtcctttggagacttttatcatgtccttgctggtgtacacggcttcgggtgagttcgccctggttagcatgcttccggccgggagcagtctgttttcaatcttcgcggccaccaatttgatgagtgcccggatgcttttgatgacgatgaccctggccccgaaattcaaggacgagaaattgatcaaaaatctctggctgggcagcctggtaactgatgagacttttgctttggcaatcaccaagctcaactacaccaagggcgagctgaaatacgaatggctgaatgcggccaacctgttggcctatgctgcctggtgcctgtccagcctcttcggggctttaatcggcagcgtgatcaccgacaccaaggccctgggcctggactacgcggtggtcgccatgttcctgggccttttgtacctgcagctgatcaccgaccagtcggtcaaaatcgagctgcagctggtcatgatcggggtaacgatggtcctaacctacttaggtctgatcttcctgccggccagcgtggctacgattgtggtgacggtagttggttgtttagtggggatggtgatcaagcatgtctttttcgagtaaattactgataacttttctggtctgcggcggcggggtaacccttttgcgtatcctgcctttcctgattttgaaaaaattctgcctgcccaagtggatggtggaattcctgcagttcgtgccgatcgtcatcatgaccactctctggttcggcagcctctttacggccaggcaggggcagctgcccaaggttgactggcagtatctgacggaaactctgccgacacttttagtggcctatttcaccaagagcctgatgtggatcgtggtcaccggggtagccagcgtggccctgttcagatttttttaaaaaattaggcaaaaaagcttgcatttagctgagaaaagtattagattataaacaagttaaaaaacgagttgaaacactgaaaagagcagagtagccccggacggaagtcttccagagagccgcggtcagttgggaaagcggcagacgggtccaaggcgaaagtaggctctgagtggttggcgcgacgtctttgcgaagtgtcaaatgggttcgccctttacagcgacaacgtcttggccgatggaccagcacggggtaaggccgttttggtgacaaagcggtgaagcaaaggtggtaacacgcgcaagcgtccttgtagaaacaatcgtttctgcaaggactttttttactcgttttttagcaacttgggattagcgctgatctccggacatcattagtgattgcaaggagatttatcatgaaaaagttaactagcaaacagtatctgatcatcgcctctttaatttttggcatgtttttcggggccgggaacctgatcttcccggttcacctgggacaaatggccggtaaaaactggcttttcgccgccatcggcttcatcatttccgggactatgatccctctggccgccttattggccttggccgttacccgggctgacgggatctttggtttagcccggccgctggggaaaaagtttgccctgaccttcttgatcctggttcacctgaccttagggccgctcttcgcgactccgcggacggcaaccgtgcctttctccatgttctctgaccacttctcaaaggggatgcagccttgggccttgctgatctattcagctgttttcttcggtatcgtttactactgctctttgagcgaagggaagatcaccgaccgggttggcaaaatccttaacccgtctttcctggccctgctttttatcatctttttaattgccgctatcaagccaatgggggcaaccagcagcacgcaagctagcgccgactacctcgctgctcctttgaccaacggcttcctgcagggctacaacaccctggacgccctggcagctttggccttcgggattacggttgttacggccatcaagggcttcaagatcaaggaaggcaaggaaacttccctggccctggccaagactggtgccatcggctttgccggcatcgccatcatctaccttatcctggttgccctgggctccggcagcctgcactacttcaaattgtctgaaaacggcgggattgcttttgcccaaatcgcccaccactacctgggcactttcggggaagccctcctggcgaccttggctaccatcacctgcatgtccacggccatcggcctggtagttgcctttgcccaggacttccacaagcgttttccaaaaatttcctaccggactttcctgacctttaactgcctgctttcatttgccattgccaactttggcttgaccaccatcatcgcctggtcaactccggttttgatgttcctttaccccctggccattgccttgatcttctgcggcttgaccagcaagtttttcaacaatgatccggcagtttacaagttcgcggtttacttcacgatcatcccggccctctttgacggcttgaacgcggccccaagcattattagcaatactgcttttgctaaggctaccctgacctttgccggccactacctgccattcttctcactcgggattggctggctgaccttcgggattgccggctatctgctggggctgggtatccacctttacaaaagcaaggccagtagccaggcagtcgaattagccgactaaaagaaagtatttccttgcaaaaaatacagcgtgaaagcaaattaagctttcacgctgtttctttttactcatattcaaaaaaattcggctggaagggactgccgcagatgtccttgcggcagttctttttaacctggtaaaggttgtggtcggccaggcggatcatgctcttgatctcgtcgctgttattggcgatcccgtaagtatagccggcagagtcaagccgtagtagtccaaaaagtgttggttagcccccgggaagttccgctgtctgtccttccagaagacgcccagcttgatttggtgggtgatggcatcccagaggttttccggcttgatcttcccgccacttggtattgaccgtcgatcaactggtagatcaaggttgggaaaggggagcgctagtaaacttccctggcttcctcactaaaagcgtagaatttatcttgcataaggcaaccttccgtaagcaattttatattacctatttattataatgcaaaaatccggacaaagtaaaaaaggcagtcatttgactgccttttttacgattgtgcaagatctttaacagaatcctattatttatcttcactgataaccagggccccgtcgaccatgtccgccttcagcttcttgacgtccaggtggtccaggtagtaatcagttactttgtcacggatttcctgttcgatgactcttctcagcggccgtgcccccatagcttcgtcgtagccttgttcaatcaagtagtccttggcgctttcactgacagtcaggctgatgcccttcttggccagagtcttgtttacgtcagccagcatcaagttaacgatttccttcaagtcttccttggttaggtgtttgaattcgatgaccgcgttgaagcggttgaggaattccggtctgaagtaaggagccagccggtccatcagcttctcgtccttcttagcgtcgcccatcagctgttcattaccgaagccggcgttagaggtagcgataatgatggtgttcttgaagttgaccgtgttgccttgcccgtcagttaagcggccgtcgtcaaggacctgcaagagcaaggtgatgacctgcgggtcagccttttcaatttcgtccaaaaggatgattgagtaagggttgcggcgaaccttttccgtcaaggtgttggagttgtcatcgtagcccacgtagccggccgtggtcccgatcagcttggaaacggctgtccggtcggagtattcagacatgtccaggcggatgatggcatccttagagccaaacatgtccaaggccagctgcttggccagttccgtcttgccgaccccggtcgggccaacgaagaggaaggagccgattggccgattgccttcgtcaaagccagcccggttgcggcggatagccttggctactgcttcaacggcttcatcctggccgatgaccttggcctttaagcggctgctgagccccttcaggcgttcgatgtcgctggcgcccatcttggaaaccggaatcccggtcaggcgttcaacggcagcggccacgtcagccggggtagccacggtctttctttcctcgtggttttcactcagctgcttttccagcttttcagccttggccttgtggtcaagggcggcttcgtagtcttccttttcagcggccttttcctgagcctgcttttcttccttgatctgcttttcgatggtcttggcgtcagtcaccgggtgctgggcagccaggtgagcggcggtcatgtccaaaaggtcgatggccttgtcaggcagggaccgctgcggaatgtactggactgagtagtcgatggcggccttcaagacgtcgtctggcagttccacattgtggtgcttttcgtataaggaccggatccccttcaagatcttgaaggtctcagcttgactcggagcgttgacagttacttcgttgaagcggcgggccaaagcggcgtccttcatgatggtgttccggtattcatcctgggtggtggccccgat

SEQ ID NO: 2222 - DNA, 18842 bp, Unknown
  gut microbiota DNA sequence
gggtgaagagcaaaagttattaagcttagcaagaatcactgctcaaaagaagaacttgagcttgcaatataagtaaatagcctttaaaaaataggagcgtgattatgatgaaaaactttgcaactaagccagccgttaaaaccgtcttcttgctggccggcatctgtttagccttgttcatggcagttcagtggatctttgccttaggcacccctggtccagtatcttgggcaattgtcggcatgattgcgatcactctgctgacccttttcttgggaatcattcccctgaccaagctcagcccggcggttggctacgtaactgctgcagcattagcggttatcgtcttaatttttgtcttcaatattcatgggtacatctcaatcggcatctggtacttgctttacgctgccctggcctgtggccttttatgggcgaaaaaatagaacagtaaacaaaaatggcttccaggattttctcctagaagccattttctttatgctgatttgattaagcgaagatttcttcaacttcaactactacggcagtatcagttttcttgccaaccttagcagcgtattccttagcgaagtcgtcgccttcgtggatagtcacgctgccgagcacgcgtacgttagtgtggcttggcacgtcagcaactacaacagcaaccttgctgccgttcttgatgttttcccacaagtgggagaaggtaacttcactccagaccaggtgcttgtcgtccaaagcagtcaatgattccttaggaccaacttgtgggttgccgtccttgtcaacggaagcaacgaaggccaaagcgtcgttaaagaacttttgttggtcagcagtcaaagtagtagcgtctaatttcttcataatggtaatttcccttctttttacttaagtagtaatttcttctcttgatacttagtattataggccctccccaggcaaaagaaattgatttaggtcaattttataacttttttaataaaatttttttgcaatttctacgggagtaaaaaagcgcccagattcaaaagaagaaccgcaataataaagagcagccaatctttgttagttagcggcacctcaacgatcacggaccgcggagcgccttcctggtagccgtgggactccatcccctgggccaggttgtcggcactgtttaaagctaccaaaatcgcgttaaagtagaggaccggggaccaaaaggagaggtagactccccgcatcatccctgccacccggatctgcttgaccgcggcttgcatgcggggaatgatgttcaaagccgccaaagttccataagcaaacttgctcggcaagtgcaggttctgctccagcgaccgggccatctcttctgccgtggttgaaatggtcaggcaggccgtggtgaaggtgtatacgaaggcccggctggagatgtccaaagcataccagaggtcgcggtggtcactgaagatgtagcctgaagaaaagacggtaattgccgctaagcccgttgccaaaagcatcctgcccagggtcttaggcttgatccgccggtataagaggtaggctaaggataaaacaataacgatgatattgctgaaaaggctgaccttaaaagataactccagtgaaataatcaaggtcagcaggaattttaagctgggattcattttgcttttagtcattttctcctcctaatcctggacaaaagccagctctctgtcggccagacgcaggtggtagtcgcaccaagtgctgatgccgtagaactggtggctgatcagcaggatcgtctgcccgctcttttcctggcacttttgcaaaagctgcacgacctgctcaatcgacttctggtccaggccgctcaaaggctcatcgatcaagagcacttcctggcccgacaaaagcatcaagaggatctgcagcttctttttctgcccgcccgacaaggagtagaccacctggtccatgtggtcggccaaatccaggtcagccagggcccggtctaagacttccggagtgaagtagggggaagcgtgcttttggctcaaagccagctcctctttgacggtgatggccatgaactggtcagccgcattttgaaaaatctgggccacatgctggaagtaggtccgctctttgagcttggccacttccttgccctcccaggtcaaagagccctggtagtccagcaacttggtcatggccttaaatagggagctcttcccgctgccgtttggccccgtgatcaaggtcaccttccccttggggatggctaattccttttgctcaagcaaaggccggccttgcttgatggcgaaatttttcatgacaaaagccgctggctcgttctccggcagggggaagtgcaggccgattggctcagtagccaggagaagcgcttgttcatccttagtcaataagtccacttgcttgcctttgaagcggtagaccccgtccaccttgccctggtagtcgtcaaaaaggtggtcggtgatgatgatggtcttgccctgctctttcagcttggccaagcggccaatcaagaagcggcgggccgccggatccacgctggcaaaaggctcatctaataagaaaagatccacgtccatggcgaccaggacggccaaggctacccgctgcttttccccgccggacatggttacgatcttctggtctaaaagagagtcgatttccgcgaattcgctggccagcttcagccggtccgcaaattctgtcttgcttttgcccaggttttccatggcaaaaataatctcttctctaggcgtggccatggtaaactgctcgccggcttcctggaacatcatggcctgacttcgcccgcccaaagaaacctgcccgctggtcagctggcccccgtatttcgggtagaggccggccatgatcttcaacagggtcgacttgccgcagccggtcggcccgatcaagagggaaaaagtccccgccggcagggttaaggaaaggtcgcggatgacctcccggtccccgtaggaaaaagttaagtggtcaattgtcagttctgcttgcaaaataaaaagtcacctcaaaactggggtgaccataagcagcattttcccttgccagcattacctggccaggttccatgggtatcatctcagccttccggcaccccgttgattcgtcaaattgattcttattctattatattggatttgctaaggcctgtctaattcaaactttgtccaaactgattgaaaatgccgatttatagcacttttcttaaaataatctgggaagtagctttaacgaaaaaatttttagttgtatcctagaattacagacttttagactttagtgggagagaaaaatgtcagatcaacgaagacgagtaattaccgtggccttgatgttgtcaaacgtcatgtccggcctggacaacacgatcatcaacaccgccttgccgcggatcattgccgatttgcacgggattgagtataccggctggctggtggccatcttcttattggggacggctgtttccacgccgctttggagtaaattgggcgagcggcgggggaacaagctggcctaccagctcgcggctgcctgcttcttgctgggggcgctgcttcagggctgcgcccagcagatgtcctttcttttaaccttccgcctgttggccgggatcggcaacggggggatggtgtcgcttccttatatcatctactctgacctttatccaaacgcccacaagcgcctaaaggtgctggggatggtctctgccttcttcaccacggccaccatcttaggaccgctctttgggggctggatcgttgatgccctgtcctggcgctgggtcttttatatcaacatcccggtggccttgatttccatcgttttgatccagatctttttcctggatgagaaaaaagaccggccagttcgcagggtcgacttaggcggggccatctgcctgtcctttggggtggtggccctcttattggggacccagctggtgggttcagccggtctggccacggcgcttttgatcttcgcggcggccttgattttcatcggacttttggtcattattgagcgccgggcggaggacccgattattccaggccgcttgttcaaaaatatccccctggtagtcgactttactttgttcgttttgatctgggccgccatgtcggcttacagcgtctacgcgccgatgtgggctgaaggcttgatggccacgactgccctggtcggggggatgacccagattcccggagcctttaccgacatgctgggctccttgtccgtggaaaaaatgcgccggcgctggtcagcctaccaggttatgctggccacctgctggcttttagcggcaggctacctggctatggccgtggctccgcgctatttcccttactgggggatcttgctggccgggatgctgcagggctggggcaacggggtcatgttcaaccagcttcaggttaaggtgcaagaagacgcggaaagccaggacgtgccggttgctacttccttctcctacctgatccggatgctggctatggcgatttcttccagcgtcttcggggtcatcttgaatgagcacttggctaaaggggtcaaggctagcggaggcaagatcactttgtccatgctcaaccacttgtcagacgccaagacccgggccagcctgcccaagcaggatttggtccagatggagaatatcctctacggggctattcacgcgattttttgggcggcctttatcctggtcttcctgtctctgcttttggccatctgggcccgctggcgggagaaaaaattggccggcaagcggtaaaatccggtaagatccagtataggataaaaagaagataagtttttgctggaaaggagagagctgatgactgaaattgccaagttgcagaaaaaattgcaggaagcaggggatgccaccctgccgctgagcaaggggaaggggcagaccgcggactgtacgtttgttttactaggcgacaaggctgaaggctggaagaatgactctttgactgccttgctgcttttagcggggacggggcgcttccgggctggccagaaaaagtggcaggttaagcccggtgactggttcctgctggcagctggccaggactgcaaggccagtctgaaagaggggctcctagtccagcttgtcttgccagaagctttttcagtgaaagacttgaaaaaggagctcatgctgggagaagctgaagaagtagggacccacggccgggtggcggttgacgggccagctggggcggctttcctggcggccttgaatgagtaccagactagcgattctgtatcttcagtcttgctcaaaagccagctgctaactgccctggctctggccttgcgggcactaaatgaagtgggcagcctgagtgagcgggagatccgccgctatattagtgaaaactatgtctcgaccagcgtgaaggatgccgcggcttactaccagctcagtcccaactatttttccgacctggtcaaaaagaagaccgggcagagctttattgagctggttgacgagcagaagatggaggcagccgtccgccttttggcccggccagacctgtcgatcaagcagatcatcggcctggttggctaccggggcaagtccttcttttatgaaaaatttggcaagtactacgggatgtcgccggcggccaagcgcaaggagctcttccgccagcagggcatcaatttatgaaaatagaaaaccgctgaactgtaagttcagcggtttttgcataaaaaacaggaattttcaaatatgaaaagtaaggatgcaggaacagtttgagcgctagaatgttaaacaattattaacgacatatgaggaggagaaaagtgattgaaatcgaccagctttcttttgattatcggacttttagcaaggaaccgggattaaagggagctttgcaggatatcttccaccggaaataccagctggtgcctgccttgaaagatctgaatttgactataaaagatggtgaaattattggcctgattggcccaaatggagcaggaaagacgacattgaccaaactgctgacagggattattcagccaaccagtggcagcgtgaaagtagcgggactcattccgggaagtcatcaaaagaagctgttacggcaaattggggtcatgtttgggcaaaagtcgcagctgtcctggaacttacctgctgttgatactttgaatatgctggcggctatttatcaattaaagtcagaccattatcaagccagattgcgggaactgtgcgatttactggatattggcgagatcgtaaaaacgccggtccgcaaattgtctttgggccagcggatccgttgtgaacttgcctgttccttgatccatgaaccaagctacctgtttctggatgagccaaccattggcttggacctattgacccaggagaaaatctacaattttttaaaagcagaaaatagactgcgtcagacgacgattattttaacttcgcacaatgtccgtgatattgaggccttagctcagcgcttgctgattttgagcaaaggagagctgatttttgatgacagcttgaacaaattgcctcttcagatcgatcatgctgatagctattgcttgaagtactggatcaatgaccaggctgacgtgcgtgaagaaatcattcatgatcctcagcagctttttgtgaagatggaaaagtttcagccggaacagatcatttctttaagcaaaagtggaatatcaatcgaagaggtcatcttgaaaatatatcaaagagagaaacaatgaaaagatatctgcctatttattatcttggtttgaagaacagtttgatctaccgggctaatatgattatgaagctggtcctgcaattggcgagtctgctggttacggttttaatgtggaagtttatcttaacagagtccggcagttttcagcaaatggcccgttatctgctggtaaccaatttgattagtttgatttttacgaccgggccggttttccaattcgcggacatggtcgaatctgggaatctttccctctatttaacgagacctttatctttgtactggtacctgttcaattacaatttaggcctgcagacgccactattgctattatatttgatcttgcttctgtttttgttaaaaagcgctggaccagtgcttttgctcttgatctacctgtttttgagcagtctgatgtttttcagtttgatgatggtcctagctatgcttagcttttggttgatcaatatgtggccgcttagaagtgggattaacgcagtttacctcttgctaggaggattatattttcctttgaatttattgggcccggtttaccagtatttgaaatacaaccctttttccttggtgacggattttcctgcccgcttgttgacgggaacaacagactggcgcgatttttttgcaaattgtctggctgtttgctgctggctgtttcttagcgtgctgctgggaaaaacgttgttcaaaaaaggtattaaaacttttgagggggtaggagcatgagaaagatcaaggctatttggcggcaaagcttagctgagtttatgatttaccgcggtactagcattattacttttcttttggcagctgtctttctgctgatcgagctgtttgcgggacaggtttattttagtcagcgtgagaacttggcaggctggacagcgaaccgctactacgtcatgatcagtttcatgaatagcgcgacctatctttacaatttgtttttcattttgggccatgaaggactaagtgaagacattcttgaaggtaacctcgactatctgctgattcggccaagttcgagttactggctggcggttggcagaagtttggatattccaagttttttcaacttgctgctttcgcttggactactggcttactaccttactcgtgaaggggctagttttggccagattatgctgatcaattgcatggtcatcttaccagcagccttgattttcattttgaaccaattgtgcctaaccttgctcttttggtttgaaggactgacggctttgggagggattgtagaagatttggttagcttagccggacggccgaaacagatttttccgcgagtcattcaacagctttttacctggatcattccacttttgctagtcagcaatttgccagtggactggctgctaggacgggggaaaagcctgctcttgtacctacttgtttttttgccgctgctttactggctctcggtcaagttttggcaacgggggataaggcattattcatcggctaattgagaaatggctatctagaaaggttgtgttgcgatatgggacgtactagaactgaattaacgaaaggcggaccaattcttgtggaaggcttaaatgatgaagaattaaacttcttcgacgctttaatgagcagtccgaaagacttatctgaccaattaaacaatgttaaaacagaagtagttaagtagagtaagaaagatcacggctaatggcatcttttaggaaagccaatattgcgtgatcttttattttatggagggggaggcttagacaagaaggaaaatttattatcgagtggtgaaagaagatccgggctttgtactcgttcagtcgttaatacctcattttgaacgtttcaatctggtttttgaaggtcaaattgtaacgcctaggctgagtagaaatggccatcagtaaacgctatcccaataatccaaaagttcacttaccaaattgcttagcccaatttcagttagagattttaaataagcattgatttcccggtcatcgccgctttcccggtaagccagcaatttttttaaaaaaacgattctgattttaaaagcggccatttgctgtggcaaatcaattgtcagcaactgattcaaaatgtggcttgcgacagagttttgtttttgttggatcaggctgaaaacaatattggtcagagccgtccaggcattcaaatacagttcataatctacctgttccaagtgactaagctgatggatgactttactgttatatgaaatgagcaggtcgcagtcaatcaaataaacagaattttcaagaaaacgcaggcttttgaaatctaagtactcgctatcaagcagtaaatctttaaaactctttaggtcagcgtctgttaaacagtttattttagtcaaactgaaatagctgttggccgcggcgactgcctttcctaaaatatctggatcttttgtttgatgaaagctgctgatttgacgtaaaaagatctgatgaagcctctggccgtctttttgctggacgagcaattgcagttcatcatagtaggagttgtctagattcccttggacttccgtatatgcgaaaaactccctgggggtgatatcaacccggtctaagagggctaaaaactttttgagccgaatatcgtcgacaccattttcccagcgtgacaaggcggggattgaagtaatatcttttgctgcttcacctagcgtcatcttcttataattccgcagtcttttaaaatattgtccgtacatttttcttccctctaatacacttttttgaaaaagcagcaatttaatgcgtacattatagcaaatagaagccgggaaaataaatataacttaaatttaggcagagctaaaaagcttccagaaaaatctggaagcttttgtgttgacttacattttttccaagcgcttgatccggtcagccgtagctgggtgggtgtcaaacaagtggcttaagctgtgccgtctgatcgggtcctcaatatacaaggacgcgctggcgctgctggccgcctgcatgggcgggctgttctcaatcttggtcaaggcgctgatcaagccgtgcgggttccgggtcagctcaactgaactggcgtcggccaggtattcccggtttctggacagggccatctgggccaggctggccgccaaaggccccaggatcagaacgaaaataaccccgatcacgccgatgatcatcccaatcgttccgccttctcggtcgtcatcatcgtcccggtcaaggccaaagccgaaccagacccagcgctgggcaaagtcggcgataaagctgatggcgctgactaaaaccagggccaccatggacaggcggatgtcatagttgcggatatgggaaatctcgtggcccaggaccccttccagctcttctctgttcatcatgtccagcaggccctgggtaacagcaatggctgacttgtccggcgacaggccggtcgcgaaagcgttggggctcttgtccggaatcaagtagacttcgggcatgggaatattggccactaaggccatgtcttccacgatatgaaaaagctggggattgtcctctttatttaaatgctgggcatggttcatgctcatgacgacattgaccggatcctggaagaccaggaaagagtaaatcaaggcaatgacgccggcggtcaatacgcccggcaggggcttgccccacatcagctggcccaggcccgcgcccaccagggcaaagatcaaaacgaaaacgaccaggactccggccgtcttccgcttgttttgggcaatttgttggtatagcatggcgatcccttagcctttaaaaggatacctttggtaccttggtttcttcttcagggatttccaggtagtcaaccttagtgaagtggtggatgttagccacgatgttggatgggaagaccaggagcatcttgttgtagacagccgcgctggagttgaagagctgccgtgagtaggcaatcttgttttccgtgttggtcagttcttcctgcaggttggcgaagttagtgttggccttcaggtctgggtagctttcagacagggcgaagatggtcttcaagctgtcagtgatttggttggacagccgcatggccccttcgtggtcgtcagctggcaactgggtcagctggtttctgagttcaaccaccttgctcagggtttccttttcgtgcttggcatagcccttgacggtttccaccaggttagggatcaagtcgttccgccgcttgagctgaacgctgatctgactccaggcctcttcagtgttaaccttggccttttgcaggccgttgtaggctgaaatgtaaaaaataacgattaatacgactaaaatagcaataatccagactgccattttttgcctccctttctaggccccagaggggcgaaatcaactttgaccagatgcttccggccgttttagtaaattatatattaaaaggcaactgagcactagtttttaagcaaaaaacgcctccaataaggagacgcgcgagagatttaatatcttactacaggttcagcttgacgatgacccagccgataagggacaggatgatcaagccggcgatctggtagcccagccacttcgggaagaacttcttcttggcatccttggaagcgtgggcgtagaaggtccgcatgaccagcatgttggccatggacccgattggtgacccgaagccgccgatgttggaaccaagggtcaaggcttcagcgtacttggagaacttgccgaccaggatggttgatggcacgttgctcatgacctggctggacaggatggatgtccagtaagtgctcatttcagtgccgaccaggccgtggatcagggccacgacaaaaggaatctgctggatgtcgctgatgaagaagaagaagagggtgaaggtcagcaaaagggagtagtcaatgtggatcaggatcttccagttgacgatcaaggcccagatgatggaggccagcatcggcatccagattggaacgaacttgaagacgccaacgaagaagaagcagaagatgaccgtggtgatcatcgtcattggccagctgacgttgatttcaacgacttcctgggtcgggatgttcttcttcgggataaagaagaagatgcagagaaagacgaccatggccacgatcaggtaaggcagggtccacttaaagaagatagcgggcgctaagtggtagttggagaccacgaagatgttgtgggggttgccccatggggtgaaggccgccccgatgttggcccccatcccgatcaaagtggccggcaggatttccggcagcttgtacttcttggcgatgttcaagtacagggggatcatggtcaagcaggtaatgtcgttacccaggaacatgcccgagaagacggacaagagagtaaagaggaggatcagcttccgggtggagtcagcgatcgccgccagtttataggcaatgatgtccagaacgtgcaggtagctgtagacctggatcaagaccagcatggtcgtgacagactcgatcgtgtgccagttcatgtcggcgttgcgcggccgggcaaagaaaagactgatgatggtgatcacgatggtgatctgcagaattcggtcgctaaaaattttctttaaggtggtcaaaaaggtggtcaaaaaattatttgaacttttgcttttggcggcttccatataaaatcctctactcagctagaatggtgtttacaaaatttacgtaaagttaacgaaaagcgaaaatgaactttactttcgtgtagttccattgtcaaccatttttccctaaatctcaatagttcaaaattaacgaacaagtgttattgaaaagatattggagaaacttggcaggtcaaaaatctgacttttttagcttgctgaaaaaatagaaaagactttagaaagcggtttatatggctagaataagggatttattccggaagacaaaaaacggactttgctaccttttttaagtgattaaaacgtgtcgactttttacacggccacaaaaaagtcaaaagcctgcttttgatttacaaaataatgtaagcgctacctgaagtgaaaaacagaagtgataaattggcaaaaatccgccttggacattttgctaaatccatttaacatttctgacggaagatatttgcccttgcttttagctaaaaagggactggaggggcaaagaaatgccgaaaaggcttgcctaacatggggaaagaggggtataatgactactgattttcgaaaatcgatgaaaggatgaagagacatgtcaagaaatatccacacgggtatcaacccacaccgtcgtccacgtaacgcttctaacgctaaggaacgcgttgctcacgccgctgctatgatcagcttcctgaaccaagcagctaaggacgaaaacaagtaatttgtttttaaacagacaataaagactctggcttttggccagggtctttttttcgcttgctttttgccttatgataggaaaaagctaagagaagagtaagaaagaaaacaaggaggcaaaaatgaagtttcagtgcagcagctgcggtttaagactggaatccctgcatttcaagctgcccggcctggtcaatgaccgcttggccagcctgtgtgacatctgccggcagcgggggctggatccggcagcttaccccaatcccgtggtcaagctgttcgcggccaacctcctctatgcctttgtgggcaaggacggggaagcaagcggggacttttctctgccggacttaaaaacccgccggtcctacgaggccctcatgcaggactatgatggaaatgtcctggccaggcagcagctgcccagagcagacttcaaccaggccgtgatcaaggctgaggatgatcccagcttctttctgccaggaaaactccctttcgcggaaaaactccaggccttaggcctcagcgttgactttcagttaaacgaggttgactatatcgaccgggagcggatccgggccaagtacaagtaccgctgccagtactgcggccggcgggggcggagcgtggaccacaaggacccggtctccgtctcgcacgataacagcctggacaatctgattttgtcctgcagcgagtgtaaccggatcaagtctaatatgccttatgaccttttcgttaagctcaacgaggaattgcagcctttaaacaaaaagctggtcaagtacgagaacgccctgggccccttggaaaaagaattccaagaccggcggaacatgctggccgccaaggttcatttaaagggcgtggtgaatgacccggaactggccgctatccgcaaggaaaacaagcgcctgcgggatgccatcgacagtttagagagtgactatgacgcggcccgccgcttgcgcgaggaccacttcaagttgggctggaagctctacctggcccagcaggacaaggaaatcatctagctttgataatttaaagcttatgcagagaacattaaaagttagaccaggaaactttttacggaaaaagtctccagaatgtacaggcttaaaaagctttaaaaagcgctacagaacaacttgcagcgctttttcgttttgtaatcagaccgatacattcctgtaacaattgaaagttatactatagattgttatcaaatcaaaccacatgttaaaggagaaaagacgttttatgaagaaaaagaacctgttgatgactgctttggcaactctgagtgcatctggcgcccttttaactactggggccagcgctttggctgacagctacactgttgttaagaacgataccctgtggggcctgtcaaagaagtacggcgtttcagtaagtgacttgaagaaggctaacggcgtttccggccacttgatctacgtgggtcagaagctgcaaatcccaactaagtcaaccaaggcaaccaagactgctaagattagcacttcaaccagtaccgttgacactacttcaacgacccacacggtcgtaaagggtgacactttgtggagtttggctaagaagtacggtgtttcagtaagtactttgatgaaggccaacaacttgtcaagcagcaccatcttgatcggccaaagtttaaacttgcgggctggcatgactacttacggggtaaacggcgtaactactggctcaagctcaactgcagcaagtactaacactgcttcatcaaccagcacgattgcttccagccaggcgccaaaggccaagaagagcactactactaacactagcagcaattccaacaccagcactagtgccaacactcaaagccagtcaactgcatctaacagcagtgcgtccactacgaccaacactaatactgcagcatcaaatgctaacactacttcaagcactaacactgcagcaagcagcagtcaagcagtcagccaggcaccaactgcttcaacctcaactgcaactacaactgcctcagccagtgccagcgcaattacttcatacgcgttgaccttcctgggcgtgccttacgtttggggcgggaccacgccaagcggctttgactgctccggcttggtacaatacgtttacagccacttcggcatcaacctgggccggactacttacagccagcaatacgccggcactaagatcagcgtggccagcgcccaagctggtgacctctacttctggggttcatacggctcagcctaccacgtagccatcgccttgggcggcggccaatacgtcatggctccagccccaggccaaaacgtgatgactggcagcgtgtcatcatatacgccaagctttgccgttcgcgttttaggctaaaaatttcccatcgatatcaaacagtttaagcagcgtcagccagccggctggcgctgtcttcttttgcctggctataattaaaggtgtactattttatttataattgcccggcttttgattttatatttgttataatattgactgattttttgaattaaaagcctctacaagtgcttttatacaagcgggataataattgttcggaaaatacaggtaaaattgcttttatatgtctatagtggttaggttataaattgataagccattagttcaaaaaagcttctttccgggcaaatatgggctataatctaaggtaaaacaggcaaaacacgcaaaacacgcaatttagggtaagccaacttttggattaggacagaggatcgcgggaaaatgacaaatacggctctgttttacgcgctgggggaattcttctgcatggcaatcatgctgatcttgaccggcgccttaaagccaattacaaattacgggaaaagggaaaaatggctggcggcatcgctggtcagcgaaaccctttattttttgggagacgccctggacaagctgcaaatgggcggggtcctgccagccagccaggcgggcctgctctttaccggtacatataagctgtggatgctggacttcgtcagtctggcggtcttcttctacattgaccagtgcggggaattcagcctggtcgacagccggcccaagcggatgctggtctgctcagttgctgtgcttaacggcgtttttgaactgctcgtgctcttgatcaatccgggctggctcttgacggaccagcttcagccgaccctgctttacaacctcctgcttttgctggtcccccttctgtattctttggccgccattggcctggccatcaacggaatccggcagagcccctctaaaaatatccggcagttttacctgaccacgaccagctggccgatgctgctggtcatcttcgggggcctggacatctacgttggcacctttcctttctacgcctacgtagcgacggcctgcctcttgttcctggctgtctaccagttcagaaccctggtcgacactgtttccctgggaagcttgagtaatatcaagggaagggaaaagttaaagtcctacctgaagagcatccagtggcggggagccagcagcgactactacctcgtcttagttgacatgaacgggctgcgatcgatcaacgacatctacggccgctcagaaggcgaccaggtcctctttgccgtcagccaggcggttggccagctggctgagaagatgcacggcttcagctgccactatggcggggatgaatttttggccgtggtcaagctggctgatgacgcggaagccaagcgggtctttgacgacttgcaggaagaagtcaagcacatggccagcatccagggcctgccagtcgtcccccagctggtaacctctgctgtccgcttggatatggcggaaggggatctaaccgcgcaattgcggatcgctgaggagaagatctaccaccagaagcgggacctggacggtgaaatgcgggaaaacaacttcttcgtcgacaaggtgacgggcctgcccaacaccaactatttccacagttttgccagctcctaccttaagtcctgcctggaaaagggggaccagccagccgttgttttgatcaatatcagcaatatgcaggcttacaacaaccgctatggctttgaaaaaggggaccagctcctctcgcggattgcccagattttgcagaagtttttcgccgacggagtcctggtccgcttcgcggaagacaactttctgttggccacggatgcccccgacctcttaaagagcctggaagaggcggcggctgaagtcaataaggtgacagacgccagcatccgggccggggtctactgctacaaggatgccagtgaaggcttgatgacggcggtcgacaaggccaagcgggctctgcgctacctcaacaacaaccgggcggtggtctgccaggtttacaaccaggaggtcaagcaggaatttgaaagacggggctatgtcctggaaaacttccagaaggccctggatgagggctggatccggccatacttccaattggaaagccgcagcttgaccgggcggatctgcggggcggaagccctggcccgctgggttgacccgaaatacggggtcttgggaccaggctttttcattgaagtgctggaagaggctcacctggttcacaagctggacttggccatcatccgccaggtctgcgccatgctggccagaagaagagaggagcagcagcctttggtgccgatctcggtcaacctttcccgggtagacttccaggtctgcaacatttatgccgagattgaaaaaatccgccgttactttaacctgccggccagcctgctgaagattgaaattctggagtcaacggtgaccagcaagtcgcaggaattgcggcaggccatcgccaacttccatgccagcggctatgaggtttggatggatgacttcggcagcggctactccaacttcaacaacctggatgagtacgactttgacctcttgaagattgatatggtcttcttgcgggactttggcagccggtccaaggctaagaccttgatttccattgtggttgacatggctaaaaaactgggcctgcacactctttgtgaaggggtggagacccaggagcaagcggatttcttgcgggaaatcggctgcgagcgccagcagggctacttattctccaagccgatttcggaagaggaatttttggtcaaactggcggcgggcaagttggaagacccggccagcaacagctactatgacaaggtcagccaggtcaacgttctctttgacccgatgatcgaccggggcagccagcagacggtaggcatcaagctgccgatctgcattctggagaaggggacggatgcatttgtccgcttcagtttcatgaatgagagctaccggcagaccctaagggacttcggctacaaggttgacggctgggaagcagagaccaaccaggaatacccattcaagcagattatcctggaattgatgggggaaagccggcaaaagcctggcccggtcagccggatttacgacttcagaggcaagcagtacctgcttgaggtgcgctacctggcccacgaccaaaagagccagcgtgacgccttcgtctacacctttgaaggcctggccaagtaagatagaaaagaagataagcaaaag

SEQ ID NO: 2223 - DNA, 6699 bp, Unknown
  gut microbiota DNA sequence
ctcgttatgaggaaagaataccccattatttagtccaagtcaaagaactggtttaaaaaattgatcaaaaaagtaaaaaatgtaatcaattttggataaaggcgatcaaggcgggctttgccgtgaaaatggcaagcactttatgtagattttcgcagaaaaattcaaaaaagtttgtaaagggggcttgcataaaatgagagacctgttagaattaagtccaacaagttaaacgaaggaagtagtacccgctcccctgactcttcaagcgagtttcgtagttgagaggaaacagagccagcgcggggaacgcagccgggaaaatgaccgagaagcggccatcgtttgattcgcgttaagaatcaagagggtccagccggatatggctgggaattaaaggtggtaccgcgagcaagtcgtccttttgcaattagcaaaagggcggcttttttgatagaaaaggtgataaaaatgaggcggactagcggagcagattaaaagcaagttagaattttacaggagagaatattaatgaacatcgacaagagtaagatcaagaaaatcgtattggcatacagcggcggcctggacacttccgtgattattccctggttgaaggaaaactacaacaacccggaaatcatcgcggtctcagccaatgtcggccagggggatgaactggaaggcctggaggaaaaggccaagaactccggggcggccaagctggtcgtagccaacttggaagaagagtatgtcaacgattacctgctgccatgtctgaaggctgatgccaagtacgaaggctacctgctggggacggccaacgcccgtcctttgatcgctaaggctctggcggaagtagctattaaggaaggggctgacgcgattgcccacggggcaaccggtaaaggcaacgaccaagtacgttttgaattagggatcaagcactttgccccggacatgccgatcattgctccttggcgggaatgggacctggtttccagagaagatgaaatcgactatgccgccgctcataatgttcctttgcggatcagcaaggagaccaactactctaaagataagaacctctggcacttaagccatgaagggctggatttggaagacccgagtcttgagccaacttatgaaaagccgggctttttggaaatgggcgtgtcaccgcttgatgccccggacaagccaacttacctgcagctggactttgaaaagggcgtgccagttgccttaaacgggcaggaaatgcctttaatggaaatgttggagaagctgaacaaggtcggcggggaaaatgggattggccttttggacttggtcgaaaaccgtttggtcgggatgaagtcaagaggggtttatgaaactccaggcggcagcattctctactttgcccacgaatacctggaaactatcaccctggacaagcaggttcagcacaagaagtctgaactggccattacttacggagaactggtttacgacgggcaatggtttactccattaagagaagccttggctgcttttgtcgacaagacccaggaatgcgtgaccgggacggtcaaattgaagctctacaagggcaacatcatcaaggccggggtgacttcgccaaacagcctttactcaactgaactggcaacttttgacgaatcagactacgaccaggcggaagccgctggctttatcaacctcttcgggctgccgatccaggtgcaaggcaagctggacgccaagaagaagtaagacgggacaagttttttagattaggtgattgtgatatgaaaaaaatgtgggccggcagaacttccggtaagactgaccagatcgcggacgacttcaactcatccatccgttttgaccaaagaatgtatccagaagacatagccggctccattgcccatgccaagatgctggtcaagcaggggattattcctgaagaagcaagtgcgaaaatcattgccggcctggagggcatcttggctgacttaaatagcggcaagctggaaatcgatccggccgctgaagacattcatatgttcattgaagagaccctgactgaccggatcggccaggacgggaagatgctgcacacggcccggtcaagaaacgaccaggtggccctggatatccgcttgtacatgcgggaagaaaacgggcagatcaagcagcttttaaaagatctggtggcggctctttgtgaccaggcagaaaagtacaaggccagcctcatgccgggttatacccacctgcagcgggcccagccggtcacttttggccaccagctgatggcttatgcttacatgttcatgcgggatctggaacgtctcgggcagatggaagagcggatgaactattcgccaatcggcagctgcgccctggccgggacgacttacccgatcgaccgggtttatgaagcggaacttttgggctttaaggctccggtagccaacagtttagacggggttagcgaccgggaccatgtggtggaagatttaagtgatttggcgctggtgatgatgcacctctcccgcttaagcgaagagctgatcttgtggtcatcttgggaatttcactttgtccgcctggcggatgcttatacgactgggtcatccatcatgccgcagaagaaaaatcctgatatggctgaactggcccgggggaagaccggccgggtctacggggacttgatggcgattttgacgactttgaagggactgcctctggcctacaataaggacatgcaggaagacaaggaagccttgtttgacgccatcgacaatgttgagctgtgcctggaaacttttattccaatgatcaagacattggaggctaatgagaaggccatgcaccaggcggcgcagaagggctttattaacgcgacggacttggcggactatttgactaagaaggggatgccatttagagatgcctaccatatttccgggcaattggtggccttgtgtatcgaccaggacatggttttagaagacttgccgcttgaaacttacaagggctacagcgacttgtttgaggaagacttgtaccaggcaattgacctgcataactgcctggccaagcggacttctttgggaggaccgacgccggagtcagtccaaaagcaggttgatgaggtcagaggcaagctggcggaagaaaattaggattaatcgctgttaagccagggcaaatttgtcctggcttttttgcaccttttgacagaattccttcctgcaggcttttaccatttggaagggcgtcagcgaatacagaaagcagatcgcggaagaagaaaattagaacagacgcaaaaggcggaccaggctgcaaggcttgatccgctttttaggtagaggaagaggaagagggcggggagatgatataatttggaggaagaaagcgcattattaggaggtaatggaatgggcgaatctaaagaagacaaaaggatgagggcaaagtgggaaagtttaagcggcgcagaaaaatcagagtttaaaaagaactatgctatgaggcgggggattacgatagattttatccgccgttgggcttggaacgaaggagatttggacaatttggaatatcacattgcggaacgtagaaaaaagtttagggagttttgaggagtaggaaggaatttctagtcgggggcgacgggcagcctctttaagttagctgaaggaatgtggtggtgttagggtgagtggggatgctctgtgattataggagttattctgtcgggattacttatgtggtttatatgacgctacattgacgtgatcatgtttattgtgatttgcggtattatctccctattttggctggcttttaaggtgattgacaagatacttaaataatggtttgacacagaattttgaggagctaaaaaagccgcttagagatcttctaagcggctttttgcatggaaaactagatgagaaatggttactttgaattatcctcgtcaagttcaatcagatcatcaagaacttggcctggtgttttgcttagggcctgtgcgattgcgctaataactttgacggtttgcccggataatggcttagtttctttaacggcgttggctaaggtcgtattagaaatcccagtttgtttagctacttggtagcgagtgacaccgttttgatcaagatattcttgcaattcgttcatttgatttagatgtcctttccatttattttctatagatgtagataatttttgggtcaaggatagaaaaaagccagtagttaaaactactggctactttagggatggcattttaaccttattaaggagagtacaggatttgaacctgcgcaccaattcaacattggttcggcggatttcgagtccgctgcattaccgctctgccaactctccagaacatttattattatactgtaaagttgagcaaagtaaaagagcaggggaagaaattcgaggaaaaactgcaatgaggttggatgtgttggataccttggatggtagatccaaagttatattttttcgacgaactaatacgatggcagctttcttttggcttatagccatagaaggctgttttcgttttattgtcaaagttgatccctcgctttctatgctatacttactttagtcctcatgtaaatgggggtgaccctgaggatactgtgtgtctagatggggatcaataatatttcctcacgtaagtggggggccttgtcacttttggcaaggcatttttattttggcttgcacaatagaatattgcgtgatagaattcaaattgtgaacagatgatttactgaatgaggaaactgtaaatttagttcactgaaatattggatgtgcaactgttaaaggctcacatatgggttaaaagttgtgtgttataaaataggaacgaggatattgcatgaagaatgatgaaagggatgcggatttgtgggaattagcaaggttgacttgttatcttcacgatctcagtaagataaggccagagtttcaattcaagaagccacttaatggcggctaacatggagaaaaaagcagttcacaaattgtggaaaattttacttgaaaagtgggcaaagcgccctcatccatgaaagcggttatatggtaaaattagttagtacaatttgaattgtgaatgaaagtttttacatgttgaaggaattgtaatgaaactaagcaaagaggccctatctttatgggggaagaaatcaaatcaagatggtgatgagtgctggctgccattagtggcacacctggtggacaccatgaatgttggacattggctctataattcctggctaagtgaaggacaaagaagcatgctgactactcggatctgcgatgctgaaatgtcaaaattagtgtcattcctgtgctatattcacgaccttggcaaggcgactccagcctttcaaaccaaggaatcatataaccatgatcatcagctggatgaagaactgatccaccgattggttagtcattcctttaagaagctaaatgatttgagtttgccaagtcgcagcaagtcaccgcatgctcgtgccggtgaggcgatacttgagagggcagggttgaatgaaacgatagctgctattgttggcgggcaccacggcaaaccacaaaacggtgaccaagaggaacagatagatgtttttacatcaaactactaccaagctgataacgatgaagaaattcagcagccttggaaagatgttcaaagggaactgattgattatgggctcgaactggctggatatgaggatatcagtgaagtgccaccggttaatcagccggaagcagttatcttggaggggttactgatcatggccgactggttagcctccagtacttgtttgaacaatgaccctgataaaccgatgtttaatctgattggattagaccaaagctttgacgatttggatatgcaggtccgctaccaaaatgccatttctacatgggcaatcaatgacgcgtggattccagaagaagcaacaaatgttgatgattattatgaacaacatttttcttttaagccgcggcaaatacaagcagctatggaagagcatgttaaggaggcagttgacccaggtctggtaatcatcgaagcagagatggggatcggtaagaccgagattgcgctcactgctgcggagcaattagcttatgcaactggcagaacaggcgtgtacattggcctgccaacccaagcaactactaatgcaatgtttgaccgggttaactcctggctgacgaaaattgctggcattgagggcatcaatccggatatcaagctgctccatggtaaagcagaatggaattccaggtatactgatctgccacgagcagaagacattgaagctgaagaattagatgcaggaactgttactgtaaactcctggttttcgggcaagaagtcaatcttagcggattttgcggttgggacgatcgacaacttgcttttgatggggcttaaacaaaagcacctcttcttacggcaccttggcttcagtaacaaggttgtcatcatcgacgaagtccatgcctacgatatgtatatgcaaagctatttgtcaaaggcgttgaagtggttaggcgcataccatgttccagtggttattctgtcggctactttaccgaaagaaaagcgaaacagtttaattcaatcttattttgaaggaaagtatgatt

SEQ ID NO: 2224 - DNA, 7007 bp, Unknown
  gut microbiota DNA sequence
tacgtcattttggctggaaaaagccaggggcaaagcatatgggttgcggtagacagatttcccattagcagctggcaatgccgttttctccaagcctggaagaggttgaccggtcagtacgtatttgacacctaataaggagtcagccccaagaactgaagtgttgacgatggtcacccgctgggcggcagaccggtagccgacactttccaaaaacttcagctgcttgggatcctggctggagacatagctggcgattggccagtagttgtaggccaggccttcgttgtatgccgcggttaaattcagacgcagcttgagtctggtagaggtctggctgacccggtatgcacctggatcatatctctttaaagcagcgatctgcttttcctgctggctgctgtaagcagcaaattcatcaactttagctactttatagtcatccttgtaggtggcccagagctttttggcattgtaggcaaactcggtcaagagcaggccggccagagccagaagagcaactttttgcatccccttcttcccggctttttcgtaaaaaatcaacagagccgccgtcagcacggttgacaggacagtatagaccacgcccttgctggtcaagtttttccagttctggatgataaaaattgtgagatacgctgccgttccgtagaaaagcggctggaccttgtctttgacctggctgaagaaattcccggccatgaagatcaaaataaagatgccgagataagagtagcgggaccagtagctgtcgaccagcttgaagagtgaaaaggtgaaattagctggctgccagtaaaagaggaggagcatccccacccctaacaaggccataattgtcttgaatctcgctgtcaattccttgctaaagaagagggcaaagactgcaatcaccacaatactgccgcaataaagggagacatagttgaagtcgctcatcacgtttagccccagcttgccgatgactgtaaaaggattattgatcaagcctggcctaagcaggtcccagtcaaaagtgcttcttgccccgcctttcaggctgacatagttcggcaaaaagataaaggcgctcaaggccaggcccaaaaatactgcagagagataaccgccaagccttttgaacaaagcctttaactcataactgccctcatagaggtacagaacttcctcgacgaccagccagatagcggaaaagatgatattgatgagacccgtataccagttaaagaccatgctgcaggcgatgctgatggttagtaagaagaagccttttctcttgtcgaccgcaactagttggtatatacccagcaagattaaaggcagcaggtacaccccgtccagccaaaggatgttgcaggactgggcgatattgtactggcagaaggcgtagctcatagccaggaagagctggaatttcccagtaatttttggaaatctctgctttaaaaagatggccatgcagctggccgataaagacagcttgagggcgagcaagatgtcataaaagataggcagctggctcttttgaaaaaagacgaccagcaagttaagcggcgacattaagtaataggcaaatgtggccacctcatccccgcctagcaaggcgctcatcgtatatgtggcagagtttttcccggctaagacgtcctttaagtaagcaaagagatcgaggtactggatattggcatccgccccggcaaccgacttgaggctaaatggcgcgtagccgaaggccgcgaagatcagcatggtgaccaggaagctggccgcaaaggcgatggctggcctggattttaggacttttttgacaagattcacgctttcttccccttcaatctggattcaagttaaaattataccatcttaaggcaaaagagcatccctgccccgcaaattcggggaggggatgctctttcgattaccgtaaatcctcatagcccggcttggttaagaccttagccgcgtaagaacaagtcgcccgcagtctggcgcccttctcccgggcagcagaagcaacggtatcaaccaacttccggcccaggccttgtccgccataggctggatctaccttagtcgtcgtgatgatccagtgatcactcttatcttcatatacgcactggccaatcagcttgccgccatcatataccgcggcccgcttttgctcttcttcaaacttgatttccatcttattcacctaaaattgcttcttccagcttttcagctgtatccacgatcacagttgccccgtgtttttgcaaaaatggcacgcttctaaagccccaatttaccgcgatttcgtccatctcagaattccgcgcggtttggatgtcgatttcagagtcgccgatgtagacgcacttgtctcttggcacgcccaagaccttgacgcactcacttgtcatgtccggagctggtttgcggcggatcccgcttctttcgcccaaggcaaagtcgaaactgccagggaaaagttcttcgaccaggacctggacggcttcatttggcttgttggaaacaacagccagcttgacgcctctttgccgaagatttttcatcaaatccaagatgcctgggaagggaccagttttaatctggcaatggtcagcgtaataaggcttgaaaacttccaggacccggttaacttctgcttgggtaacggcttcagggatccgttcatccttggtgccaaaggcgaccagactttcccggctgctgccagcttcataggccagggcccgggtgaccgccaccacgaccccgctgccaaagaagttcttgatgtcttcaacggtaaagtcatgccggtggccggtttgttcaaacgcgtagttcaatgcacttgttaagtcggcgctcgtgtctaagattgtgccgtccatgtcaaaaatcgcggctttatatttcatcagtttcacctcgctttcattataacatctggcataaaaaataggcctgcccatatagagcagacctattcccttccctgttagtgagggaaaaattgattattcatcatcgcgtttcttgcgccaaattccgcttaaggcagtaccaaccgcggccaagagcaggccaaaaagccgtatccatcaaaatgacagatgcagctaatacaaatatttaaattctgttgattttttagttaaaatttagctggagataaattttaaccagttcttgagtaataatattttaactagataactactcaatactaatcagttgtctagagaacgttgcttagaataagccggtgcagagagtacttcctgccaatcttgtgaaaaacctataaatgagaggtttactacgtcactatatttacgcaatgtcacatctatatctctcaagaaagattcccattgctcattaccatgaagcattcgtttaatcacaaggaaaactggaaatactttgttctgcttagatctatattttcgattctctttgtataaaaaaggagtttgtttcaatggcatattgtaaaggcgattatagtgagcacagatatttctgatttcaacaagagacaacatccagctttttaaatgtcccggtgtagtttcatatagtgatgaaatctctttctggtcatccggcttcattatgtcaaaaagtgacacgatatttccgaatgtcattaactcagtagcagcccaaataggaaaatgaccaccgtatttatttagatggtgcttaacaaatggtaagtttttacagcgacttacttcgccttgaaagcgcttaattaacacaccatgaacagatccgccttgccgctttattttatcattgaagttcttgacatccatatagccttctggaccgtacttcaatgcaagacagtatgaaatttgagtacgaagttgtatttctagctgttcaacaatatgaacaatatcgtttctaaattcgctatcaaaacaataaagacgaaaaatatgatccaaagtgacatcatccagaaatttctcaggatctgaatcctttttcaagccaataccataggcgctaagccgataataatttactttatgtaagatacttaaggcagaatcagaatctaaaatcataagattatgagcagtttttaagtgttctaattgttgctcataagaaagcgccggttttaaggaataatcaatcgcactcattgtttttctccataaaaaaagtcccaaccgtggtccgcagtacgtttccgcctgatgcgtggtgggctctctcacttatagtatagtcagaatagccaaaaattcaagcgaacagcccaaaaagctgtatctatcaaaatgacagatacagcttgggtagcatttatagaactgtttgaattaacttattagatgtggcttgccccacttgccgcgtcaacgtgtgcttcttgagcaacggccttccctggttcatctgctgtcaatccagcaacagattgcccagccagacggccaaaggtgtgcgcgtggctggctgccaaacctggaacgcggtcattgtagctgccccagaagaaaccaccggcatcgttacctgccgcgtacaagcctggaattgggtcatgattttcatctaaaacttccattttagtgttgattctgagcccgtcaaaagtgcaaagtatgcggccaccgagaacgcagccgtagtaaggcttcttcttgattggcgtaatccggtaggcttccttgccgaactccttgtcttggtggtcgatcaccgcttggttgttgttagcaacagcttctttcagcttgtcagctggcagattcaatttttcagctaattcttccaaaatatcagcttttacgaccagaccatccttgacatgttgttcagtgtcagcgacaaaggcttccttatccttcatataaccagggaaaccgtagcgggcgcagccaagcatgtggactttttccagagcttcagcgtagttatcgtcccaaatcatggcgtacaggtagccaggttccttagcagccgcgttgacgatgaattgtaaggaacagattcattggcgaagcgttcaccgcgcaggttaaccttaaggaatgggtatgaaccgatccagagccagtggtcgtaagtagcggtttggtagtacatgtcttcagtctttttgccaactggtaccaggccgcggtcaaaaatcgtttcagctggttcttcatcgcggattgcgccgacgttcaatgctgaagtaatccctgccccgtttgagcgaggtgaatcattgtagacgttcttcttcaaagacagcgggttccattccttaagcaggtcaacgttggctgagtagccacccgtcgtcaggataacgcccttctttgctttaatttggtagtattcgtccttcaccaggtccttcaccaaggcaccagttacccggccagcttctttgatcaagttgaccaagatagtttcaaagcggaggtctaccccatgttcttcttggtattccaggaaccagtcaccatatgaggtaatgctttggtcgtcaaaagtcggatcattttcagttgggaaagcctggtaggccttattggttaccatagcatcagcttcagctctgagatgggcaccatgtggcttgaggacgccagtccaaggttgccccgctgttgtcagcccaggtttccaaaaggcgctggtcgatattgtgctgagcaaaagcggccagactttctaccagttcttgcttgttgatggtcacgccggcggctttttgcgcccgggagccaacactggccaaacccacccgcattaggttgatagtcttttccttctcaatcaagatggttttagcgccagcttctttagcagccgcggcggcttccatccctgcattgcctgcgcccacaaccaggacgtccgtttcaacagtatatgcagcagatgcattagtgcctaagtggtcaacattgtcgtaaagcttagtcattctattttttctcctttttatcaactagagcgctttcaactattaatttatcatgcaataattgagttgagaaatatcgagttggtatcggttataccggaaatgcataaggagacaaagatggacttaaggcagttggaagtttttatcaatttggcggagagtttgaactattcaaagaccgcggaaaacctgcacctttctcaaccggccgttagccggatcattcagcggatagaagacgaagttggcgtcacacttttttaccgtaaccaccgggaagtgcagctgactaagaatgggaagctgttttacgatgacagcaagagcttgatcaacagctataataaggccctgtagcggaccagaaattctttcaaccgggagcaaagcaacttaacgattggaattacggataccccgctagagcaagcaattttgccagagatgatcaaagcttttcaccgggaatacccgaattgcaagatctttcttgagggatttgatcataaccggctcaaacaccacttgattgaccatgatagcgatgtgatttttacaacacatgatgatatcactgatctagccgaggtgaagtactatcatctttttagcggacactttgtggcaattgtaccagcggaccatcatttaagtgacagagaggagcttgaactggatgatttggcaggagaaaagattttgctgatggacaacaactggtgcccgccagaacaactgaagctccaggagacgatcagaaagaaggttgatgacttggacatcagctacgttaacgacgttgagatcgtcagcttgatggtcaaggctggcttagggatcaccgtgatgccaagttttgtggcgatcgaaaaaacagataagatcaaggcggtgaagttgaactaccctgccctgctggactatggcctggtctgccggaaagatgaagcagaccccctggtcctcgccttctgccaggtcatgcaggaacaggcggaagggatgtaattttgcttgggagcaagtaaagcaaagggattatttg

SEQ ID NO: 2225 - DNA, 236 bp, Unknown
  gut microbiota DNA sequence
tgatgaatccgctagaagccaaaagaaagacaaaggatgacctgcaccagaacaagaccgataagcttgatgccttgtatcttgccaagctgcagtctgagcacccgcaacggctggcctacgttcaaagcaaagaatatcaagaattgatggccaataaccgcatctatgagcaggcttcgcacgatctgataaccaacaagaatagactgcacaaagcagttcagctcactttc

SEQ ID NO: 2226 - DNA, 329 bp, Unknown
  gut microbiota DNA sequence
atgagcactgttctttttgaccgctgggcatgcgactttagccaaacgaataaggctttgcgttatgtcgttagcgcgctttttaccaataccagataagccttttaagaagtcgatgatatcggtttcttttgtttctagtacgatatctggatgtgggaatctgagagcaatactccagtagtttttccctctcggattagccagtaagtgttcaatctctgggaaagtgagctgaactgctttgtgcagtctattcttgttggttatcagatcgtgcgaagcctgctcatagatgcggttattggccatcaattcttgatattctt

SEQ ID NO: 2227 - DNA, 223 bp, Unknown
  gut microbiota DNA sequence
accatctggaagcttctttatctttgtcaaagcaatgtccttcaagtttaattcggacaagtcttcaatgacttcgacagtaccaaagtcggctactgttaagaaggtgtggttgtctgtatgcttgtcctcaattctgatgcctcctttagaatcttctggaagcttttgtgaggtgatggttctaaagcttgcgctgtttctcaaaaagttgatcgatccc

SEQ ID NO: 2228 - DNA, 282 bp, Unknown
  gut microbiota DNA sequence
gaagaagtcagtgctgtttttgtcgtctcattcagccgatgagtttctcaagaccgtctacaccaacttctcacagtatcgcaagcgcttggtgaaagcagacaagagcatggacgagaaggctcgctataacttcaagatgaacgtaactaaagataagtacggcaagcacaagaaccagctccacaaatcttggtaccgcaagggatcgatcaactttttgagaaacagcgcaagctttagaaccatcacctcacaaaagcttccagaagattctaaagg

SEQ ID NO: 2229 - DNA, 467 bp, Unknown
  gut microbiota DNA sequence
catgcagaacccacatatcaactggcttcgcttcactattctgctagctgagaggatcgtcaatgggcacttgaaagatctgacttctgatcaacgtgccgattgcttcgtctttgacgattcgctctactctagaactggatacaagaagactgagctggctgccaaagtattcgaccacgtttcgatgacctacaagaagggctttcgaatgatgaccatgggttggactgatggatcctcctttgtcccaatcgcttcatcactcttgtcctcaaagaacgatcagaatgtcatcgggacgaccaagaagatcgacaagcgcacaatcgcggccaagaggcggattatggcccaatcaaaggggaccgatgtagttatccagctgctcgatcaagccttgaaagcagggctcactgccaagtacgtcatgtttgacacttggttctccaatcctcatcagattg

SEQ ID NO: 2230 - DNA, 781 bp, Unknown
  gut microbiota DNA sequence
ggggaccgatgtagttatccagctgctcgatcaagccttgaaagcagggctcactgccaagtacgtcatgtttgacacttggttctccaatcctcatcagattgtccaaatcagtcaacgtggtttgaacgtaatcgccatggtgaagaaaagctccaagatcacatacgagttcgaaggaaagcgaatgaacgtcaagcagatcttcaacgcatgcaagaagcgtcgaggtcgttcaagatatctcctgtccgtccctgtaaaggttggagatcctgccaaagatggtgcccagattgatgccagaatagtctgcgtaagaaatcgttccaaccgcaaagactggatcgctcttatttgcacggacatgacaatcgatgaaaatgagatcatcagaatttacggcaaaagatgggacatcgaggtcttcgaggtcttcttcaagacctgcaagagtttcttgaagtttggcactgaataccatggcctgtcatatgatgcattgactgcccatacagttttcgtctttctgcgctacatgttcatgtcagttgagaagcgagatgatgaagatgataggacaataggcgagctcttttattgcatggtagacgagcttgcggacatcactttcaatcactccctacaaatcctggtggaagccatgttcgagagtgtgaaagagatcttccaaccgacagaagagcagatggaaaggttcaccaacgctttcatttcacgcctcccgaagtacatgcaagaggctatatcgccatcacta

SEQ ID NO: 2231 - DNA, 6923 bp, Unknown
  gut microbiota DNA sequence
tgggaacaatctggcaaataaagataaaaggttactaaagaagagattagtgattaagcggaggttgcttaatatggaatggacaagagaaaaaagatatcttccttatgagaaatgggatgtcaagactttgcttgagctgcagagccaggcagcccggtcagactaccaattgcactaccacatccggccaacttctggtttattgaacgaccctaacggcttttcctactataatggccgctggcaggtcttctaccaggcttacccatttggggcagtgcatggtttgaagtcctgggtgcacttgaccagttccgacctggttcactgggaaaacctgggcgaagctgtttatcctgacaccccgctggacagccatggggcctattccggttcagccaaggcaattggcgacaagctttttctgatgtacacgggcaatgtccgcgacgaaaactgggttcgccattcttaccaggttggggcctggatggacgaagagggaaaggtgaccaagctggagacgcctctgatcaactcgccagagcatgtgactgagcacttccgtgacccgcagattttagagcacgatggcaagtactacgctattctgggtgcccaggacaaggagaccaaggccggcaagatcagcctttacaaggcagatgctgtaacgggtccatggcaggacctgggctatgttgacctgccagacatgggctacatggttgaatgcccgaacctggtctttgttgacggcaagccggtcttcatcttctgcccgcagggtttggacaagaacgtgaccgactaccagaatgtctacccgaacatgtactgggttggggaaagctttgactttgaaaccggccacttcgagaccaagcagaaggccccgatcaacctggacgggggctttgacgtctacgctactcaggccttcaacgcgccagatggctatgcttacgccatcagctgggttggcctgccggatatggcttacccaagtgataaggaaggctgggctaactgcttgagccaggtcaagcgcttggctttaaagcacggccgcttgcttcaaaagccggtcaaggccatgaagagtctgagaggagtcgaagaagacttcacaggtgacttggcctttgatgctggcgcgcaaagcgaactgaagctgactattaagcaggggcagaagggcaagctgcttttggcggcagacagtgaaggtaagaactgcatcaagatccgcttcaagaccggcaagcacgcccgcttaacggttgaccggggtgaatgcggccaggccgtgaacccggactacgggactagccggacggtgaaattgccagccggggaagacctggacctgcggatctttgtggaccactccctctttgaaatttttgtcaatggcggcgaagaagtcattacggggagattcttccctcaaaatggacaaacttttgttaagatggatagcggtgttgactaccaggccaagacttggcggttaaaggatatgtaggagagcctaagaggggatgacgatgaggccaaaattaactgatgtagcggagaaggctggctgctcgccgacgactgtctcgcgggtgatcaacaactacggctacatcagccagaagaccagggaccgggtgtacgcggccatgcgggagctgaactaccagcccaacaccctggcccggtctttgcagggcaagcagaccaagatgattggggtgatcatgcccagcatcaccaatcccttcttcgcggaactggtcgcggcaattgaagacaagctggaagcggacggctacaagatgctgctctgcgacgccggccaggacagcgataaagagcgacgctatctgcagatgctggaggccaaccaggtcgacggcatcatcgcgggttcgcacaacctgggtattgaagaataccagcgctatggcctgccgatcgtttcctttgaccgggacctgtctgaccaggtgccgatcgtgaccagtgacaactaccagggcggctgcctggctacccaagccttggttgacgcgggatgcgggcatgtctactttgtcggcaatccggttaaaacaggcaacccgaccttccgccgctttgacggctacgcggacacggtggccgcggcgggattgacggtacacacggcccggtcagccttttacgagtctccggcggctaaggcgcgagaactccgggagcttttgaccagcgggcggaagatcgacggggtcttttgctcagacgatctgacggccatcctgctcttaaaagaagccaggaagctagggattagggtgccggaggacttgaaaatcgttggctttgacgggacccagctggtccagaactacgtgccggaattagcgacggtcgtccagccggttccagacctggccgggaccttggtcaagctgctctatgagcggatcgcggacccggaaaagaagctggcccaaaacagctacctgctcccggtcaagctgctgagaaaccagactgtttaagcatctcctgcggggggtgcttttcctgtctttgccaggataatctgtatttttcccgaaaagcgcttataataaaattaggaagcaatttttagttaaaagaaagctaaggtgacaagcatggagaagaagaaacgcgtttggctgttcattctggcttttagcctgatcggcctcctggtctacggggcggaaattgcctatgcttttatgaaggaccgcaacaagaagatggaatacagcttcgatgaagaagaggcggaagatccgcaggaaatggaagctgactacaagaatcaagaatagtgctaactgctgaataaagcagaagaaattgggcctggctttgcctggccaattttgtcctgggtcttcatggctttggtcatgctgatgtggtttatcccggaccagcgggccaaggagtggcgggaaaaaaataagaatcaagaacaggaaaaagagtaaagaaaaaatccacaagccaggcttgtggttttttgttgttataaggctaattcaagcaggtcgaccttgcagtcgccgatgtcgtcgtagtagacagtttcctggctgacaaagcgccagccgttcttttcatagaggcggcgggcaggaacgttgccatccatgctgtccaagcggatggatttacagccgagctttttggcctggtccttgataaaggtcaaaaggacagaggacaggccctgccggcggaaggatgggtggaccccgtagaggtggaggacggcgatttcgttgccttcagctggggttggccaggcaaatttgctgtaaagagggtcattacccacagtcaagatgccggctgaggcgatcttgccgtccttgatgccaaccacggcccgcttttgtgcaattgcttccgcgatgtctttttcgcttgggtagatcccccagtgccagtcggccccgaactggtcgtctttttggtgggcgcagatgtcctggtagaactggcagagggcagccaagtcagcttccgttgccaagcggcagtttaattcagtcatgctcttttctcctaaaatttttttgttttttgcttatcactctgagaatattctggcaaaaaaggctggtgaagaacaaaaaaggaactgggtaaaccagttcctttcgcttggtgcggacgagaagacttgaacttccacgaccaaaagcggtcacaagatccttagtcttgcgcgtctgccaattccgccacgcccgcaagcacatctattagtatagcaaaggcagggaaaagtgcaagtgctttttgcaaataaaaataataagttttttgccctaatcccttgctttttcttctggatcgggtatactagtagtcgtgccttgcaaaaaggctaagcaaaataaatggcccgttggtcaagtggttaagacaccgccctttcacggcggtaacatgggttcaaatcccgtacgggtcatatggaggattagctcagctgggagagcatctgccttacaagcagagggtcacaggttcgagccctgtatcctccattttttattttgaatttctttttattttcaattacatggcaaaagcagctcaggagtaaatcctcagctgcttttttctttatctattctcttttttagcaaaaatcagtccagatccagctgccgcttgacttcgtttgccatgttatcagccgggatgacgatttcccgggagctgtggcctaagaaggcctccatggcctttggggcagggccggttaggtcagtcagttccttaagggctggcaggcctttttccttaacattttgcccgctgatggcgtggtagacggtttccgggaacttgtaagggctggcagtagagaggacgacagttggtttatcgtcttcttccttaaagcgcttggcagctaaagaagcaacagccgtgtgcgggtcgatgacatagccgctctcttcgtaaacccgcttgatttcgccttcgatttcttctggagtggcgtagtcggcccagaagccggaaagcttcttttgcatgtcttctggcaattggtattcgccctttgtattcagctgctccatcaaagacttgactgtggccgggtcctggcagaggtcaaagagcaggcgctccaggttgctggagaccaggatgtccatggatggggagttggtcacgtagaagtcccgcttcttgtcatacttgcccgtcttgaaaaagtcggttaagacattgttcttgttggaagcgcagatcaggcggccgactggcaggcccagtttttgagcataatagccggccagaatgtcgccgaaattgccagttggcacggagaaattgacgggatcgccaaaggcaatggcttcttggtccagcagctgcttgtaggcagcgaagtagtagacgacctggggcaagaggcggccaacattcatggagttggcgctggagaaggtcaaatcgtggtcagccagcaaactgttcatgtccgggtcgttaaaaatctgcttgaccctggtctgggcctggtcaaagttgccctcaaccgctacagccacggtgttgtcgctgttttcgctcagcatctgcttgagctggatcggggccaccccttggtaagggtaaaagacgatgacccgggttttggctaaggactggaagccccgcatggcggcggtcccggtgtccccggaagtcgcggtcaaaatcacgatccccctgtggtcgtctgagttttccaaggctgtcttcatcaagcggggcaggcactgcaaggccacgtccttaaaggccagggttggcccgtggaagagctccaggtagtagttgccggccttcttatcagtcagtggggcgatccggtcgtcatcccattgttggccgtaggcgcctttaacaatctctgccagttgctctgcactgtagtcagtcaagaagagggccaggatctttttagccatatcctggtaaggcagggcaaaaattccctttaaggcagcggctgaaaatggagccggaaattctttaggcacgaaaaggccgccatctggggacaggccttggacgattgcctgggcagcggtaacttcctgcccctggctgcgggtactgcggtaaatcataaatcctccctaaaagtcagatgcgtgatctgtaaactagtaacaatggttgaaaaaagattttttcctttatggctaattataacggggaaatcatttttctaaaagggaaagcatgataaaatgattaaaaactagcgattgccaattattgaggtgaaatagcgtgaaaatcaaagttccagcatccagcgccaacctgggcccgggtttcgactccatcggggtggccatttccttgtacctaaccattgaagtaatcggggagagcgaccactggcaggtagaccataacttaggggacctgccaagcgggaaagacaatatgatcgtccaggcggctttaagcgtcaagccggatttaaccccccagcacctgcgggtggaatcagacatccccctggctcatggcctgggctccagttccagcgccatcgtgggcgggattgaactggccgaccaattggggcaattcaacctggctccccatgataaaatcgaaatcgcggcccaactggaagggcacccggacaatgtagccccaaccattctgggcagcctggttgtcggctgcaaggtcaacggccactttacagccgtcaaggccccggtaccaccttttgccatgatcgcctacatcccggcctataacttaaagaccagcgatgcccgggccgttttgcccaagcagctttcctttaaagaggcggttcaggccagtgccgtggccaacacggcggtagcggccctttttgcccaggattatgaaaaggccggggagttaatggaggctgacctcttccatgagcgctacagaagcaaattggtgccggaactggagatcatccgcaatgtcggccatgagcatggggcggtagcgacctacctgtcaggagccggcccgaccattatgagcctggttgacccccagcatatcagcgactttgtcgacgcgatcagagaggcgggcttaaaggatgaaatccgccggctggaagttgccccgcggggtgctttttggcagaaataaggaagaaaagggcaggctggacaggaaaaggaagtttttgagcaaaaatcttgccaaaaggcttgcattcctgttgcatttctgtataataaataaatgtcggttgacgaaagtcagccgcagcctacttgggtcgttagctcagctggcagagcaccggactcttaatccgggtgtccagggttcgatcccctgacgacccatcgcgcttcggcgctagttaaataaaccca

SEQ ID NO: 2232 - DNA, 8033 bp, Unknown
  gut microbiota DNA sequence
gttcagaaggttaccggacggtaatctttttttttacaaaaaactgaacatgtttaaaatgttatttgttacaagtcctgataggattcaccaaattggtgaagatgccttgtaaccgtgtagctagtctatagggggacacacatagatggaaaagtacttatttacgtcagaatcagtttcagaaggacacccggacaaggtcgctgaccagatctccgatgccatcctggacgcggtactcgcccaggatccgcaagcccacgtggcctgtgagacttctgtaaccaccggtttggtcttgctcttcggggaaatctcgactacggctaatgttgactaccagcaggtcgcgcgcaagacgatccgcgagatcggctacaatgacccagacctgggctttgacgccgacaactgcgccgttttagtagcgctggacaagcagtcgcctgacatcgccggcggggttgatgaagccctggaagtccggggagaagacgacagcgatgaactcgaccagatcggggctggtgaccaggggctcatgtttggtttcgccatcaacgaaacgccggaactgatgcctttgccgatttccctggcccaccgcttgatgcgcaaagtggcccagctgagaaaagaggagaccttcccctggctgcggccagatgccaaggcccaggtcacggtggaatacgatgacaccggcaagcctaagcgggtggacacggtcgttatctcaacccaaaccagccctgacgtgactaatgaagagatccgggtggccatggtccacgacgtgatcaaggaagtcattccagacaagttcttggatgacgagaccaagtacctgattaacccgtccggccgcttcgttatcggggggccgaagggggacgccggtctgactggccgcaagatcatcgtcgatacctacggcggctatgcccgccacggcggcggtgccttcagcggcaaggacgccaccaaggtcgaccgaagcgcctcatacgctgcccgctacgtggctaagaacattgtcgccgctggcctggctgaccgctgtgaagtccagctggcctacgccatcggggtagcccacccggtttccatcatgattgatactgccgggaccggcaaggtgagcgaccagcttttgactgaagctgtccgggccaattttgacttgcgcccagccgggatcatcaaaatgctggacctgcgccggccaatctacaagcagacggctgcatatggccactttggccgcactgacgtcgacctgccttgggaaaagaccgacaaggcggaagccctccaggcttttgttaatggccgcaagtaatattttctacaattgaatacacgtaagacattaacgtaacataaatttcgttggagaaaagaatgaagaaaacaaacgtgaaaatggtcacgctcgctgtctttattaccacttttatgtccgcgatcgaaggcacgattgtgtcgaccgcgatgccaaccattatcgccgatttggacgggctggcaatcatgagctgggtggtgtctgtctttctgctgatgacggcagtctcaacgccgatttatgggaaactggctgatagcgtaggacgcaagccagtttttttatttggcattggactcttcgtgatcgggtcagccctctgcggtttctcgcactcgatggtggaattgatcatcttccgggtcctgcagggacttggttcaggggctatccagacagccggggtgacggttttagcggacatgtatgatattgacaagcgggctaaaatgctgggcctgacttcgggcttctggggcctggcttcggttatcgccccgcttttgggcggttttatcgtccaaaagctgtcctggcactgggtctttatgatcaatgtgccgatcggcttgctcgcctttttgctggttgccttttacctgcatgaagattttgctaaaaataaattacagatcgacctcaagggcagctttagcctggttatcttccttttatccctaatgctgcttttgcaggggctggaaaaaggatttaactggactctgctgcttttagcagcaattatgctggtcagcctctgggcctttaccaaggtggaaaaaacagccgctgaccctatcattcctttcagcatcttaaaagacaaggaatttttggcggtcaacatcttgcagctcctggtttccggggtcgtgatcggctttgaattttacatcccgacctggctgcaggggatcaacggggtcagcgcttcaattgctggcttcgccattacgccaagctcccttttgtgggtctgcgggtcctttttagccggtgaccttatgggccggtgggggacacagaagtactttgacgcgtcacttttgctcttaatcggggcagacctggccttcatcctgattccgacctacacgccattttgggtcttctgcctgatcgccgtcttcaacgggatcggcttcggcagtattgccacggccagccaggtccgggcccagatggtggttgacaagagccaggtaggggtggcaacttcctttaacactctgatgaagtacttgggtcaaactgtcatgatggtcttctacggtatgaccttcaacgtggtcgtggccagcgggctcaaaaagcagccttccttgaccagcgagatgatgaacaagattgtctccccagtccaggctaaaagcctggatccggccgttttggcccctctgcgggagatcctgcattcatccatgcgggggatctacatcgtttctctgattgccttgcttttgtccttggtcttcaaccatatctaccggcaaaagaaggactagttaaaatatgaacgcaaacaaaaatctgctcacggcatgtgagcagattttttattaaggatttagtttattctttttgtccaaggccttgaaaaagagccagctagccaatgaactgaaggccaggccctcgcaccagccccctaagacgtcgcttggccagtggacgtgcaggtacattctggtaaagccaatcgacagggtgaagaagacgcagaagacgatcaaccaggtcttgactggcttctttttcaccaagacgacgagcagggcgatcaagaccagggccagggtcatggaaccgaccgagtggccggacgggaaggagaagccatcggcttgaaccgccttgtccatccggggcctctggcgctggatgatatttttgataattgagttgcaggcgttcgccgcgatcatggttaagctggcaaaaactgcgtggatatagtttcgctggtagaccaggaaaagaaccaggaccacggtaaagactgtgatcgtcaaggtattgcccagctgggtccagtaaaaggccagctgcctttcgaccggattgttgtttctgattgcattgtagactaccgtatcaaaagtcttgataaagggattcttgctggcaatcaggtaaacccaaaaagcaaaaaagaggctgaaggcaccgccaaaaattaaaagcggctgataattaactttattttctttcgtattcaattgtttttaatttttctcccttgaaaaattttatccatgtggtaaagtataatcgttatcgagaaaataataaagggcagggactagtagaaatttttctttcttcagagaagagccggtggctgcgaggcttgaaagaggaattttgaactcacccggacaatgccaaagtgttgtttcgctttaagaaacatttgagtgtcacgcgaaagcgtggaacttaggtggtaccgcgaaacaatacgtcctatgtctgaacatagggcgttttttgtttttaggaaaggatttatcagatgtacaaccataaagttgtcgaaaagaagtggcaaaagtactggctggaaaacaagacttttaagaccgggactgacccggaaaagccaaagtactacgttcttgacatgttcccttacccatctggcaagggcctgcacgttggtcacccggaaggctacaccgctactgacatcatggccagaatgaagcgggcccaaggctacaatgtcttgcacccaatgggctgggatgccttcggtctgccggcagaacaatacgccctgcaaactggtaacgacccggcaactttcaccgacgaaaacattgcccacttcaagaagcagctgcaagctttgggcttctcctatgactgggaccgggaaatcaagactactgacccgaactactacaagtggacccagtggatttttgaacaaatgtacaagatgggcctggcctatgaagctgaagtaccggttaactggtcaccagacctgggcacggttgtcgctaacgaagaagttatcgacggcaagactgaacggggcggctacccggtttaccggcgcaagatgcggcaatggatgctgaagatcactgcttatgctgaccgtttgctggacgacctggacgacttggactggccagaaccgatcaaggaaatgcaaagaaactggatcggccgctcagttggggctcaggtaaccttcaagatcaaggactcagacaagagctttgccgtcttcactacccggccggacaccctctttggctgctcatacacggttttggccccggaaaacgaactggttaaggaaatcaccagtccagagcaaaaggaagccgttgacgcctacatcaagtccattgaatccaagtctgacctggaaagaactgacttgaacaaggacaagaccggggtcttcactggtgcttacgctatcaacccggttaacggggaagaagtgccagtctggatttctgactacgttttggcaacttacgggaccggggcagttatggccgttccagcccatgacgaaagagactacgcttttgccactaagttcgacctgccaatcaaggaagtcgttgaaggcggcgacatcagcaaggaagcctttgccggtgacggggtccacgtcaactcaggctttttgaacggcctgcacaatgaagaagccaaggccaagatggttgactggctgactgaaaagggcgtcggcgaaaagaaggtcaactacaagatgcgggactggaacttctcccgtcagcgctactggggtgaaccaatcccggtcatccactgggaagacggggaaaccactttggtgccagaagacgaactgccgctgcgcctgcctaaggaaagcaacatcaagccgtccggcactccggaaagcccgctggccaacttgactgactgggtcaacgttgttgacgaaaacggccggaagggcaagcgggaaaccaacaccatgccgcaatgggctggttcaagctggtacttcctgcgctacattgacccgcacaacgacaaggccctggctgacccggaactcttgaagaagtggatgccagttgacctttacatcggcggggcagaacacgcgaccctgcacctgctttacgctagattctggcacaaggttctttacgacttgggcgtcgttccaaccaaggaaccgctccaaaagctctacaaccagggcttgatcttgaagaaccatgaaaagatgtccaagtcccggggcaacgtggttaacccagacgacgtcgttgacgagtacggtgccgacagcctgcggacttacgaaatgttcatggggcctttgaacgcgtctattgactgggatgacaacggtccttccggtgttaagaagttccttgaccgggtatggcggacttttgtcaatgacttagacctggatccgatcccatctgaaaagatcactgacaaaaacgacggcaagctggacaagatctacaatgaaacggtcaagactgttacggaacactttgaagaactgcgcttcaacacggctatttcccaaatgatggtcttcatgaacgcctgccaaaaggtcgacaagattccgcgggaatacgctgaaggcttcgtgaagctgatggctccggttgctccgcacatgatggaagaaatctggcatgtcttcggccacgacgaaagcgtgcagtttgctgcctggccaacttacgacgcaagcaagctggttgaaagcacggttgaaatggcggttacggtcaacggcaagaagcggggcaacttccaaatcgccaaggacgcaagcagagaagaagcccaagctgccgcaactgctctgccgcacgtaaaggaatttttggaaggcaaggagatcaagaaggtcattgtcgtgccaaacaagatcgtgaacattgttgccaaataaatctaaaattttcctaaaaaatcaatttatggtatatttcaaactggatcaggaatatgatagtaggttgaagtataaagattaggaaagttttatggcaaagaacaaatcacagaccaactcccaggcccagttgttaaagggctcggcctggatgactattggctcgatcctgtcgcggattctcggggcgatctatatcatcccttggtatgcctggatgggaaagtatggcaacttggccaactctctgacggcgaagagctacaacatctatagcctgttcattatcatctccaccgcgggcattccaggggcgatcgccaagcagatcgccaagtacaatgccctgaatgagtacggggtcggccgcaagctcttcaggcacggcctggccttaatgggggtcttcgggattatctcaacggcctgcatgtactttttggcattgccgctgtctggctttaacccccaggaagtaccggtgatccggagcctggctttggccgttttgatcattccgatcttgagcatcctgcggggctatttccagggcttcaacgacatgatgcccagtgccatgtcccagttcgtggaacagctggcccgggtgatctggatgcttttgacggcttatgtgatcatgcgggtccagcacggcaactatgtcgacgcggtaacccagtccaacctggccgccgcgatcggggccgtgttcggtattggcctgctggtaattttttaccttaggcagaagcggacggttgatcctttgattgcccagtccaacaaccaggtgcaggtttcaaccaacagcctgctctttgaaatcatccagcagtcgatccccttcatcatcattgactccgggatcaacatctttcagttggtggaccagtataccttccacccgatgatcgccagcttcatgcacgtgccttatgacacggtcgaaatctggtatgctttgttcggtttgaacgccaacaagctgatcatgatcgtggtctccctgtcaacggccatggcggttacggctattccgctcttgtcaggggcccacgccagaagggactatcgggatatttcccggcagatcggcaataccttggaacttttcttgttcgtcttattgccggcttcgctggggatggccgcgatctcagaccccttgtacaccattttctacggctatgaccggctgggggcccatgtcttgtacctgtcctcctttacggccatcagcttggggatgtttacggtcctcatggccatcttgcagggtctggacgagaacatgtatgccatccgctacttgatctttggtttggtcatcaaagcgatcgttcagtatccgatgatccgccttttcaaggtctatggtccgcttttggcgaccaaccttggccttttggcggtcatcgccatgtccctcaagcaccttagcgtgaaatatcgctggggggctgaccggatcatgcggcgctttatcgggattgccagcttctccatagtgatgttcgcggcggtctttgctgccgttaagctgggcggcctcttcctcagcccttaccggcgcttgtcagccatgctactcagcggcttggcggtagctgtcggcgtgcttgtttacggggccttgagtcttaagaccggcctggctgaaaacattttgggcagccgggtgacccggatcatgcaaaagttcagataatagaatagagccagttaaggatcctccatttggaggat

SEQ ID NO: 2233 - DNA, 251 bp, Unknown
  gut microbiota DNA sequence
tggtgcaggtcatcctttgtctttcttttggcttctagcggattcatcatgacatagcgcaattcgtgcatgtccaagaacgcctggagtcttctggaatagacaccagttgcttcaaagataatctgcggtttagtaacctgcttgaggtcacccagcagctgattgaagcctaccatatcgttggagatggcatagtcattaactttttggccattgaccataatgcatacgttagacttccggctgct

SEQ ID NO: 2234 - DNA, 274 bp, Unknown
  gut microbiota DNA sequence
caacactttttcttttactatgtaaagtggagatgaagccaatgccgtagactctttggacacacgatgtcgtataaaaaactggcagcttcaccattcaattgagaatctcgtctaagtatgttgactgttaaagtcctgttgagaaaattagatctgattgaattggatgaaggcagctcatctccaagtaaagcggaggtttattcttatggatttattgaaaactgttttcggtattgatgttagcagccggaagtctaacgtatgcatt

SEQ ID NO: 2235 - DNA, 209 bp, Unknown
  gut microbiota DNA sequence
gagctcgtgaattctattgatttcacgagcttttctggtattcttatgattatgaatcaaggagggacaacgaccatggctgacaaagaaactttagctttaatcgaaacgctcaaagcaaataacgaagaattgctcaagcaggttgcccttcttactgaacaagttgcttatttgactaataagctttacggcaagtcttccgaaaa

SEQ ID NO: 2236 - DNA, 1896 bp, Unknown
  gut microbiota DNA sequence
ctgatctgcatgatggcgaatggccgccggcttctcagccagaggtgacggtggtccaaaaggaagtcgatcccgtgttccttgttggtgatcgggtagccttcgttgtttgagacgacttccaggtcgctgatctggatttcgtagccgaagtgggaccgggcgtcttcatggatggtcccggtgaggtagaagcttgcttcctggcgcaggcccttggctgcttcaaaaacttcctcactgacatcgttcttgcggacaacgccttggaagaaggccgtaccgtctcttaattgcaggaagacgatcttcccgctggaccgcttgtcggtcagccagacgtgcattctgacttcttcatctacgtgcttgcttgattctctgattgaaatcaattctgtcatgtttatctctttacctcgatattttattgtctatcttgctcttatattcttcctgtttttgcttaactagctttcttacagaagctggatcttggctgcttggcacttttctacgatctcgtcaggccagatgctggcttggacttcaccgatgtgggccttgcccaaaagcagcatgcaaagtcttgactggccgatcccgccgccgatggagtaagggaggtcaccatttaagagggcttggtggaaaggcaggtctaaccggtcttcagcaccggcaagcttcagctgctcttgcaagaggtcttcatcgacccggatgcccatgctggagacttcaaaggcccgctggaggggttcgtaccagaagaggaggtcaccgttcaaagtccagtcatcgtagtctggtgcccggaggtcatgcggtttcttggaaagcgggagcgcgccgccgatgtgttccaagaagactgcgcccttttcttggcagatcttgtcttcgcgttcgcttggggtcagggatggccagcgggcttccagttcttcactggttacaaagctgatttcttctggcaggtggtaggcggcttgcgggtagagggcacggacgtggtattccatccccttgatggtttcaaagatccgctggacagtttggcggagggttgcttccgtccgttcgctcttgtcgatgaccttttcccaatcccattggtcaacgtaaacggagtggaggttgtccaaaacttcttcgtcttttctgatggcgttcatgttggtgaagaggccttcaccgtggccgaagccgtagtgcttgagagcccagcgcttccacttggccagggagtggacgatttgcaattcgccttcatccccgtcgtgcagggtaaaggaaaccggcttttcccagccagagaggttgtcgtttaagccggaagacttcttaacaaacataggagcggaaattctttccagattcatcgcggtcccgaattcagtctggaaggtttcccggatgtagcggattgccttttccgtttcgcggatggtcattttcggatcgtaatcacttggaataactaatttagccatatctcttgcctctgcaaaaaatctaatacttgccaaaagggcataaaaagagcctctcatccccaaaaactacagggacgaaaggcttctttccgcggtaccacccaccttgttctaaacgaaccacttcgagcaccaacatgctctagcagggtaacgtcctgcaggcggcacggcttactgtgacttcagccggcgatctggaaaaagtgttattcagaaagccagggtctgttgccttttcaccagctggcaactctctgcaagattgtgctttcctactcgtctttctcatcttttgacttatttgattaagtaaaattctaatacggatttaatttttgtcaagatcaaaggcgaaaaaattattttttaaagatcaagcccttcttcttgagca

SEQ ID NO: 2237 - DNA, 2253 bp, Unknown
  gut microbiota DNA sequence
tgcggctgcgatggcgcagaaggcgattaacacgatcaagctaaggccttcaaattcctggaccacttgctggtaggcattgccggcaaagcggccggcgtagatcaagaccgtgttccagattgccgtgcccaggatggtgtagaagctgaaccgggctaaagagaagcgactcatcccggctggcagggagattaagctgcggacgactggaataaagcggccaaagaaggtggctgcccggccgtggctgttaaagtagttttccgtcttggtgattttctccggggagaggccgaagcggcggccgaccttgctggcggcgaagcgggaaaggcggtcttggtcaaagaaggtgccgacccaatagagagttaccgcgccaatgaaggcaccgatcgtggaggcgatgatggctcccgggacagacaggttggctgacagggtcaggaaaccggtaaaggtcaggatcagttcggaagggattgggggaaaaatattttcagctgcaatcaacaaggcaacggcgacatagccatagttttgaatcagctgcgtgattgtctcgttcatgacctgtatattacctctaatctattctgttttctgttgaatttgtgactgtttagtacaagggagcttgtcctgcttgtacttttgcctatttaggataacagaataaagagcggaaaagggggctctgccaaggattttaagagataatttggaattactttacaagcatttaactttattttttaaagcactaagctaaatgaagtggtttttggctataacgaaattaaaataagcaaaaaaagactgaaaatattttttatgcacatttttaggaaagagtctgttataatcgtttcaacgcattaaggaaatgcttgatggaaacaaagagaagatgcttacaagcttttttctcgagccagaggcgaatcttgatgccgggaaaattgaatatcattcgtactatactaagtcattaaatttattcaaggagaggtaaatatgactaacgtaactatcgaacaagcagttaagggctatcttgtattctcagctaaggaaggcaagcttttccgtgaaggccgcagctacctggcaggcaagacctaccacaaccgctacctggctatctacgaaaagctggaagacgctgttgtcaacgccagccaatacccaagtgaagaaggcatcaccatttacgaagtaagtggctggggccaggtaactgactttggcaagtgcaaggtcactgaatggctgaagctggaccaaatcgtagctaagaaggaatgggttgctctcttgggcaagcaaactaactcaaactacgcaagtctgcggatcctggcagctaagctgagcgaagacgcagctgccttgaagatgctggcccaagacaagaaccagcaagttcgcagcgctgtagctgagaatgctaacactccagccttggttttagctaagctgggcgtgactgctggagttaacgcgatggctatctaacagacaattttaaaaagaataaaacgaggcgcgttctctggattgacagaggcgtgctttttgcattcaaggagaagagcatgctgaaatttgaccaggcaagagcggaagatttagacaggatcgtggaaattgaaagagctggtttcaatgaggcagaagcaggcagtccggctcagtataaagagagaattcagaaatttaccgggagctttttggtcgccagaaatttggaagaagagatcgtgggctttattaccgggccggtcgttaacagcaagtatgactacatcgaggactggatgtatgaaaaagagacagaaagtctggcgggccctggcggcaaccaaatggtcttgaccatcgcggttcatccggattaccgggggcaggggatcggcagccagcttttagatagattcgctgagaccgctaaggaaatgaagcgggggcggatcgccttgacctgtctggaagaccgggtgccattttacgaaaagaatggctacgtcaaccatgggcaagctgagtcagagcatgccggggaaatctggtacaacatgatcaaaatgatagaagactagagagcggtcagcaggtgctggctgctttttcttttgctttataagtgaagcattttaatgtaaatctaacttaaaaagctatagctaaaatttgtcaatattcttttcttaaatgaaaaagctgatagaactatgtttaaatagggac

SEQ ID NO: 2238 - DNA, 9301 bp, Unknown
  gut microbiota DNA sequence
gtattgctgaaataatgtactctttgttttttgacgttcggaaattactttttcactgtttgatttaaaattctgctaaaaaatacttaactttaatttaaactatggtatgattatgaaatgttagtgagccaaagctgtgtgatgaaaggtttgctaataaaaatatttatttgtctaaaggagttacggaaacagatgcagaagaaaaaatccgcacgccatttgaacaaagtggctgaactagcggcagcactgctcctatcagcgagtccactggcgggaactttccagtcagccacttttgtccaagctgccagtcaagaaacggttagtccacggtcggctagccgggcagcattgactaagtacttgcagcaagagcagcgctataacgctaagaagagttacagcaagttccaagaggctgctaaagagcaaagacaggcttttggccaagctgtcagcaagaagaatgagtcctcggtccgggtgattgtcagtctgaacaagtcagcggcatttgatcacaccagtaagccgactggatcagctgcctcagtgaaaaagattgagcaggcaagtgaccaagtcaaggatggtcaagaaaaggtaatcaagcaggtagaagaaatcaccggcaacaaggtccgccggcagttcggctacttggtcaatgctttttcaatcgatatgaatttagacgatatcgacaaggttaaggatctgcctcaggttaagaacgttacgcctgtcaaggtttactacccaaccgatgagagtgctgatcaaatggcccaagtgcaggacgtttggcaagaacaaaagctcaagggtgaaggtatggtcatttcgatcattgataccgggatcgactacagccaccaggacttgaagttggacagtggcgtcagcaccgcgttgagtaagagtgaggttgaaagcgacgagagcaagctaggtcatgggaagtattacacggagaaggttccttacggctataactacgctgataagaacgaccaaatcgtggacaatgggtctggcgaaatgcacggccagcacgtggccgggattgccggggccaatggccaagtcaaaggtgttgctcctgatgcccagcttttggcaatgaaggtcttctccaacaatgccaagaattctggagcctatgatgacgacgtcatttccgcgatcgaagattcagttaagctgggggccaacgttatcaacatgagtttgggctcagtttcatcagatgtcgatccaagtgatccagagcaacaagccatagcaaaggcatcggaggctggcgtcattaatgttatctctgctgggaactccggtgttgccgggtcgaccggagatggcaatccagtcaataataccgggacaagtgaactcagtactgttggcgctccaggggttacgccagatgctctgacggttgcctctgctgaaaacagcaaggtgaccaccgacacagttaaagacgaactcggtgaggtcacctttagctcaaaagagggtgttgcaccagtaacaacccagctggaaagcaactattccgttttaaccaagaagcttaagcttgttgacatgggcttgggcggtgcaaatgactatactgctgaaaagaaggctgaggttaagggacaacttgcagttgttgaacggggatcttacaccttctcagagaaagctgccaatgccaaggcagctggcgcggcagggatcgtcatttacaataacaaggatgacggcttaatttcaatgtcactggacgacaagaccttcccaaccttggggatgagtaaggctgatggggaagttctggctaatgcagcaaaagcaggtaagagcatcaagctgaaattcggtactgctttaatcgataaccccagcgcgggaaagatgagcgactttactagctggggaccaacgccggaactcgacttcaagccagaaattactgctccaggcgggaagatctactcgctggccaacgacaacaagtaccagcaaatgagtgggacttcaatggcttcaccatttgtcgcaggttcagaagcattaattttgcaaggtatcaagaaacaaggtttgaacttgtccggggaaaaattagtacaatttgctaagaattcagccatgaacacttcgcaccccgtctatgacactgagcataccaaggaaattatttctccccgccggcaagggagtggcgaaatcaatgttaaagatgccatcaacaatacggttgaggttaaggcagccgacggcaacggggcagcagccttgaaagaaattggccggcagacgacctttaaggttaccttgaccaattatggcaagaaggcccagacttatgcagttgataattatggcggtccatacacccaggcaaccgaagcgaagagtggcgaaatctatgacacaaagattgttaagggacagctgacgacggagacgccaaaggtaactgtccagcctggcgaaagcgtggatgtaagctttaccttgaccttgccatacagtttccagcggcaaaattttgttgaaggctatgttggctttgaagcagaagaccaggcaacaccaaacctggttcttccatacatgggctttttcggcagctacagtcaagcgagtgtcagcgcaccaatgctttatgaaggtggcaattcaaatctaatcaacacgattcagtccctggttggcgtcatggcttctaacaacaatgatattctcggttacactggctatgagggtgatgattacagcaagtatactgatcctgatctgatcgcgatttcaccaaatggcgatggtagccgggactacgcatatcctgttctcttctttgaccggaactacaaggaatacacggaaacgattactgatgctcaaggaaacaaagttaagagcttgggctttaacaaagggggaactaaagattactacaattcttcaagcggcaagtggacaacccactcactggataagtgggatggcactgacgctgacggccaagtcgtcaaggatgggcaatacatctacaaggttgaatttaccccagcaactggcggcagcaagcaggaattgaacatccctgtcaaggttgatacccaagcgccagaagtgagtgacttgcaggttaccaaagatggcaagctccgtttgaaggctaaggattccggcagcggtcttgacatgacaatgtttgttgcggcagtaaacggtgaaaagcagacgctggcgctggctccggttaagggagaaagtgatgtttacgagtcaacgactgccttgactggacttaaggacggcaagaaccaagtagaaactgttttggctgactatgccggcaatgttggctatgctgcaactttctccagtcaaaatgacgatgctgataacaagcttcttctctttaacttagccgacggtcaaaagatcactagtcaaagcacggcttacgatcaagagaaagaaacttacactgtaactggtacttacaagaagaatgccaagcttaagtttaatgatgtcgaggcagagagcgatgaagatggctactttgaagttaagctgccagtcaaggatggacaaaaccagcttttgatcaagaatggggaccaaacccttgaagcagtcaacttcactgttaaggctgaaggaccgaaagtcagcgttgacgaagaaagctcaggccgcattttggctaaggatgattcctatactttatccgggacggtatctggtcttggcgaaagcggcaaactggaactgacaaacttgtctgacaagagtaagactgagttaacggttgaccagaacggcaagttctcacaaaaggttgacttgaactacggtgacaatccttttgaactaacggcaactgatgcggatggcaatgttacaaagaaggacgtaacgattttcaccgctagaagttacacttacaacaaggatatgctgacttttgacaatatcgccagcgatctgacggttattggcaagatgacgccgggttacgctgagaagaaccacagcttcacaataacgggtaaactcgcgtacccagtcgcccgcttccagttaaacggggatgacgttaagtacgacccagatactttgaagttcagctacacgatcaaagacttaaagaacggcaacaattcattgactgctctggtgcaagatccacggcttaatgacggcaagccagtcgtcgaatggggctacaagctctgggttgacttaacagcgccaagcctgcaattggaagggatgtccttaggtgaggatggccagttggctgtctacaccaacaaggatgtttacgatcttaaggcaacgatcaatgacaacttgagcggatatagcctgcaagttggcagcgatacagcctaccaagacaagacttacgatgtgtttaacgaagacttctttaagaatagggatgcagtcaaggtcagctacccgatcaaggctgagaaagacggatcccggaaggtcaaggtcactttgactgatatcagtggcaacgaaactgaacaagactttaccctgtacaaccaccaggcagatcttgaggcaccggaggtttccgcttcagaaagcaagaagactaaccaagctgttcagctgaaggtcgaaaatctgtccgatgtacaaaagtctgctggcaagtttaaggcggctgatctctactactcagttgacggcaagacttggaccaagctggacaaggatactgttcaggtagccgaaaacggaaaggttgagttcaagtaccaagacgtttacggcaatgagtcaaaggttacgacttatgaagtcaagaatatcgtcaaggaagtcgctgcccagccggaattgaagctgactccggatggggaaggcaaggtcaaggctgagcttgcttttgacaagaaggatgttgacaaggacttcaaccacatcaagtacagccttgatggtggcaagacctggactgactacaaggatgcctttacgctgactcacaacggaactgtggaattcaagagctatgacgacgctggcaatgagagccaagtctacaccagcgtggtcaaggtagaacggaagctgcccgctccagatttgactggcacggttgaagctgataagagtgttgaggttaaggctggcaacgttgaacaggctgaaaaggatgctgacggaaaagtaactttgctttactcaactgatggcaaggattggtcaaaggttgacggcgaagttaagctgactgacagcgaccgggctatgttcaagtaccgcgacggggacgacaacgaatctgctgttgtcgtttacgaagtcaagaaggttgttgaagaaaagactgccgagtctaagccggaaaacaaggacgatagcaagtcagacagtaacactgacactaagagcgatactaagtcagacagcaagagtgattccaagtctgataacaaggcagaaaccaagagtgatgtcaaatcggacggcaatggcgaagctaagtccgataacaagtcatctgccaaggatgataagaagactgacagcaagacgacttcaaagagtagcgcaaagaagactaatactaagaagaacaagaaggcttctaagaagacaagcaagaagacagttaagaagactaagacttacaagaaggtcaagtttactaagctgacaaaagtctacaataagaagggcaaggtagttggcaagcttaagaagaagactagcgtcaagctattaagcaagaagcaaaagcttcatggcaagtactactaccgggttggcaagaacagatatattctggcaagcagcctgccgaaaaagactaagaaggttaagcaagttcgcgcaaggaagaatgccaaggtctataacaagaaagggaaggtagttggccatctgaaaaagaagcagaaggttaagcttttaagcaagaaacagaagcttcatggcaagtactactaccgaattggcaagaacagatatgttaaggcaaatgtgctgtaattagagggagacaggttccgaaaggaacctgtttttctcgttataagcaaggagagagaacgagttgttagcttgatgatataattattttgaaatctggagataaggcgaggagcctactatgttacacgtaaaagttttaagttcattctacatacctcaactggatgagactttgctttctttacaagggccagagaacttaagtatttatgacggtaaattttccaaaatgtgaagatgcttaccttgtagataaaatagatagcgaaaaaagataattgattattgaggtaacaaaaatggcagaaaagcaatatgactttacacatgtgccaaagcggcagggcaattccatcaagtggggcggcttaaaggaaaaagagctaccgatgtggattgctgagatggactttaagatcgtgccggaaattatggtcagcatgggagaaaagctcaaagtagctgcctttggctatgaaagcgtgccagctgaatactacaaagctgtagctgactgggaagaagctgagcaccgcgcccggcctaaagaagactggtgcgtatttgcctcaggcgtcgtgccagcgatttctaccatggtccggcagttcaccagccctggcgaccaaattttggtccaggagcccgtctacaacatgttttactctgtcattgagggcaatggccgccgggtaatttccagcgacttgatctatgaaaatagcaagtactcggtcaactgggctgatttggaagaaaaattggcgactccgtctgtccggatgatggtcttctgcaaccctcacaacccaatcggttacgcctggagcgaggaagaagtcaagcggatcgcggaactttgcgccaagcacaaggtcctcttgatctctgacgaaattcacggggacctggttttgacggatgaagacattacccctgcatttacggtagattgggatgccaaaaactgggtagtttctttgatctcaccaagcaagactttcaacttggcggcgttgcacgcggcttgcgcgattatccctaacccggatttgcgcgcccgggctgaggagagctttttcctggccggtatcggggaaccaaacttgttggccatcccggcagcaattgccgcttatgaagaaggccatgactggctccgtgaactcaagcaagtgttgcgggacaactttgcttatgcccgggaatttttggcaaaagaagtgccggaagtgaaggtacttgactcaaatgccagctacctggcctgggtcgacatcagcgctcttgggatgaacgcggaggacttctgcgagtacctgagggagaagacgggcttgatcatctctgccgggaacggctaccggggcaatggacatgaatttgtccggattaacctggcctgcccgaaagaattggtaattgacgggatgcaaaggctgaagcagggtgtaaaaggactgaacaagtaatagatcacaaataggatgcaactcacatgagccaatgtcattaagttaagggattgacatctaaaaaagaaccgtattatccaaaatttgggtagtacggttcttttgacttttgtaggattcagaataaaaataaacgtggaagtgtcattagcactcccacgtttttcgtaaacagtagaaatatattgaaagctgtgtaaactatgaaatctcaatctctacctgtaaatattttagctctacttgactccattatcaatgaagcggtatccaaaatttctgaatttaccaccaagccaactgcctttagcagacaccgtgtgattgacgtttctaagctaataatgctgatcatcaatatgcagtccgagagcattcagaaggagctgttcaagaacatatcgctttccggttgtagtattacagcttctgcttttgtacaagccaaagctaagctcaagcccgacatattcagatacatttttgaccagcttaatatgaatctcgccagtctgaagctgtacaatgatgaatacagattgtttgccattgacggctcagactttaatcaagtatggaatcctaaatctgaaaatatggtctgttttgaagactctaatcgtaaaccctactgccaggttcatcttaacgcactgtacgatcttgaaaataagatctatcaagattgtgtgatccaacctaagaacaagatggatgaacgaaaggcagccgttgagatgctttctaggcttgagtgcggaaaatatatcgtcttggtggatcgaggatatctatccttcaatatgattcagcactgcaacgtaaacaaagactgctattacgtgataaggtcaaaaacgggtttcactgcgatcaaggaaatcagccagctgcccgatgaagaatatgacggtatccttgaccgctgggtaactacatctaaccatttctatacccaaaacaaagatcatctcaatatacatctggtaaaccatgtaaatcatcagtacaagaagttcaaatccaagaacagtaaggacaacagctgggattttaaacagttctgtcatgtaagattccgcgtatgcaaattcagaatcaaccctgatgatgctccgaataaggagcagtgggaagtcctagtgactaatcttgacgcagataagtttccgctcgagagaatgaaggaactatacaatttgcgctggggaattgagaagtctttcaagatgcttaagtatgatgactgcggtatccagttccattccaagaaagacgaatttgtaaagatggagctgtatgcccatctaattgcctacaatgtgataatgagcatggtgaaccaggcatatgccccgcatcctaagtcaaaatctaacagcgaataccagataaacctttccatggcgttctttatagtgcatttttctaggtactggatcgccgaagaaggattatgagacgatgctgtatatgatttcgaggtttgctggaataattaggcctaaccgaaattaccagcgaaaaatgcatccaagaagtgcagtagttttcaattaccgactataattctgcaacattttcacagttttcaagtcctacataggactattttgtcatgcgtagaaacaaaaaaacttgttcaaggatcataccaaatggtgtgatattgaacaagtttttatttagaaccactctacggtcaatgtcaatcccttaacttaatgacattgtataatatctattggatcaatttttatgacaaaagtctttggttatgtttg

SEQ ID NO: 2239 - DNA, 2858 bp, Unknown
  gut microbiota DNA sequence
gacccgcttgatcccctcttctgaatgctcatttaacaaaacctgctggtagatcttgggcaggtagtcgtcaaattccggcagatggtgaaaaaggcgcaagaaaggatgggcctggttgaagcggtccccttcagcgtaaaggccaatattcacaaaacggacccccggccagagcaggtcggggtaggaccgctgctcccggctggaccgcaggtcacagtccaccgtaatacgcaggttggccagcttgacccggtccctggctgacatctcgtttaaagccgccgaccggtagatcttccgccacttaacccggcggccgtccaagccttgataaccgcccaggtcacggaagttgaccggcatgtccagttcaattaccctttgcatctccatccggcatccctcttttccaaaaattcgcgaaaaattcttctcccttccattttagttttcccgtaattttttggcaaaaaaatcgccccagcttaagccggagcgaaaatcttattctaaaaacttgtccctaagcctgtccaagtctccttggccaaagcccaggctggcaaaatagcggtcaaagccgccccaggtctgccggatcgtttccgtaatcccgtaaaaagccgtttggctgacctgggtctggttcatcttggcaatctgctggcccaagcggtcgttttcatccgcctcatcccagtcccggctgtattcccggctgagcaggtagtcccgtaggatttcccggtcttccaggcccaaagccatcaaaacgatcaccgacaccatccccgtccggtccttgcccatggagcagtggtagatcaaggcttcatcatcttccagggtcagcatttccttaaaaatcttccgcatcaccaggcccgttctgggggcgacaaggttctgctggtagaccatggccaggtaagacaatttaggcagcttgcccgaatacttctcccaggctgcctcagcttcttcctcttcatccccgctctcactgtaaaagtgggcgtcgaccagtttagcccccggccagagcttgtccgggaagttgtcctgttcatgccgggagcgcagatcacagtccaccacaatcttccgccgggccagttccgcctggtctgccttggtcaaatggctgagtgaccccgaccggtaaagccgaccccacttgacagtccggccgtcctggctgacatagccgcccaaatcccggcaattgtagccggcctctaactttacgatccgctttggcattttttatcccttcatcctgttaaacgttaaaaactaaaaatctttcccgtgggcaaagacccgggtggccagaaccgcccgctgccagcccgcgtagagccggtctctttccgcctcttccatctttggtgcaaaggcggccccggtcttggcaatttccttcaagctatccaggtcttgccagtagccgacggctaaacctgccagaaaggcggcccccaggccagtggtttccaaatccgctgcccgctcgatcttcttgcctaataggtctgcctggaactggaggaggtagttgttgtttgaagccccgccgtcgactctgaggaccggaatctcaatgcccgagtccttctgcatggtgtcgaccacatcccgggtctggtaggccaaggactgcagggttgccttgatcaagtccttgtcactgctgcctctggtcaagccaaaaatcgccccccgggcttcactgtcccagtatggtgcccccaaaccagtaaaggcgggaaccacatagacttcattatcgtctttagattccagggccgcctgctctgattccggagctgagttcagcagcttgaccgagtctctcagccactggatggctgacccggccacaaagactgacccttccaaagcatagtttacttgattgcccagcttgtagccaatagtcgtcagcaaattattcttggattcgatcggttcctcccccgtgttcatcacgatgaaagacccggtcccgtaggtgttcttgaccatgcctggcttgacggccaattggccaaacaaggctgcctgctggtccccggccatcccggcgatcggcaccctgccgccgaagaactggtaagggtcagtttccccgtagacttcagaatttgatttaacctccggcagcatggcccgcggaatcttcagcaggtccatgatctcctggtcccaggtcaaatcatgaatgttaaagagcatggtccggctggcatttgtgcagtcagttacatggatcttgcccctggtcagcttccagaccagccaggtgtcgatcgtgccaaaaagcagctcccctttttccgccctttcctgggccccttccacatggtccaaaatccagcggatcttcgtggcggagaagtaagggtcgatcaccaggcccgtcttttgccggatcatctcgctgtagccgtccttaaccagcttttccgcgatatcgctagtttgccgggactgccaaacgatagccgggtagattggccggcccgtctccttgtcccagaccaccgtggtttctctttggttggtaatcccgatggccgccagttggtccggccggatggcggagttgatcagggccgttgacgtcgtgatctggaccgcgttccagatttcctcagcatggtgctctacccagccgggcttggggaagtactgggtgaattctcgggccacgctggccacctgctggccggcatggttgaaaatgattgccctggttgaggtagtcccctcatcgattgccaaaatgtattgttcactcatatgtgatcctttaaacttatccttttcttactttacttacttgcttt

SEQ ID NO: 2240 - DNA, 209 bp, Unknown
  gut microbiota DNA sequence
gcgaccgccccagtcaaactgcccgtcaaacactgtcctcggcctggatcacaggcctgagttagagcatccgtcaagcaagggtagtatcccaacagcgcctctgataagactggcgtcctatcttctccggctcctacctatcctgtacatgcttgacagatacccaatattaaactgcagtaaagctccatggggtctttccgtcc

SEQ ID NO: 2241 - DNA, 3634 bp, Unknown
  gut microbiota DNA sequence
cgcacactgcgaaactttgttcagttttcaaagtaccaacttgcgtcttagtgacgcaacgttttatatcttactcgcttgttgacttcttgtcaacaagttttcgatattttctttttgcctccgcaagacttgcttgtctcacgcggcaacaaatattagtatactagctttttttgattcgtcaaatttgctttttcattcgttttatgtccggttcaccagggaccgttgtaataaaagcaaacttgcttactctttcttttgttttttctttccgcaggaattattttttaaagaatcgatagttcggattatctctatttctgctggcaaaaaagataaaactttttctattttctttttcaaaataaaaacagaccctatggtctgttaacagattggctgctatttgcctaatatagatagacgcttacttcagttcactaacgattttctctaagcattccttggcttcttctggcagcggcgtctttggatgctcaccgttgtacatgttcagccagtccagccggtcctgcatccgggctctgagattctgcttgtattcagcggaatccaggttaaccggatagtcagcaagcggcatgtagctgactccggcaaaatcgccaaaggcctgccactggtcagtatcatccaccagcttttcaatgatctctaaagtcagttccttaggaatgtttttcccgcagaaggcatccgtgtttaaaacgtagcattccgctccccgcttggtaaaaagttcctcgaagtcgccatagtcgcccccaactgggtaagctctgaagggatcagcaaatggttcgatgaccaaagtgttcatgtcaaaaccctttggcaggttctcagctgacgtccgcttggtggctaaagtcaagcccagggttgtagccaaaaccggatctgtcaccttcaataccggtggcaaagagttgtccttcatgatccagaagagggctgtgatcggattttcttccacatcaacccggttggctgaagtataccggctcttgatcacccgcccattattgttccggaggtcttccgtaaccaaaactttccgccctgcttcatccagggtaaccgcgcagttcatcacagtcgtgtagtacttggtctcgtggtgaccggctggatagtcgtgagtcttgtcaaagtaggccggctccaaggctaccgagctgccgtcttctcttgaaataataaaggcgtcgtcgtgcaaaacagtaatatcatacttgccgccatggtcagcgtgggtcaaggttgacttccctgagcccgacaagccgtaaaaggcaaataccttgtctttcttgtcttcaaagtggaaggcttgctcgcccccgtggcaggctgcatagccgtgccggtgggccagggcccaggccaaggtcaaggttcccttcttcagctcaccaaagtagcgcaggccaaacaccgcggcgcagttgtgcggagcgtcaaaaattgccagtccgtttggataagccggatctgtcacgttcgggtcaaagtagaagtacaagtccccttcatcataaagcttggatttcccgtacatctcagccgccttttcatcaaaaaagcggaagttgagcatgtagctgagcaggttgaaggcctggtcctccggtagcatcaagtgggcctttaagctaaaggacgggtccagcccaaccagtactgtcgtcttcaaatacttctgcttatggtcggcataaatgtcttcatacaacctgttggttaaagcagccgcgtcttcctctgaatcatcgacaaagtgccgggctgatgccgtccggcccaaaatcttgccgtggttgtaaaccaattgcctggccccgaccggcagacccaagtcactggtatgcaggatcggcaggtcagtctcaattactccaggctggcgcttggccagttcatatgcttccgctacactcttgacttcatggacattgttgccgtaaaaagctgattcaatagtcgcccggatccggctgaacttgctgttcgccttgaccagttcactctgctgatagcgttcccgtgtactcatgatctcttcctttcaccatcacatcaattatcataaagcggtttcaatcgttttcctttatgatagcacaggcatgtgaaagagtgaactttaatttgctaatttttggtaaaaaaagacagcagcctgagagctgctgcctaaaatagtattcttttgtaacttgttcttttcagcttagttttcgccgcgcacgaacttgcttgcttgaataccagcttgccggccaaagactacagtttcagcaactgagttaccgccgatccggttgttgccgtgcaggcccccggaaacttcaccagcggcgtagaggccttcaatcaccttgtcgtccttgcccaaaacctgggtttcaaggttgatgtgcagaccacccatcgtgtagtggatggctgggtgaatgtggatagcaaagtacggcgcaactgaaatgtcgcggtccatcccggtagtccggccaaaggcttggtcgtcttggtccttgactgcttcgttccagctggcaacagttgcttcaagaccagcagcgtcaacgccgatcttgccagccagttcttccaaagtagccccatgttctaccaggccgatgtggtcgtaaaattcaactgccttaacgtggtcacggacgccttggtcaaagatgaggtaggcaccgtcttcattcaagccagtgatggctgctgaaacaaccttccgggtgtccagttcgttgatgaaacgctggccggccttgttgaccaaaatagcgccttcgccccggacagcttccccgatcaagaaggtcttttcaccatcagtttgcgcggttgggtgaacttggatgaagtccatttgcaccaattctgccccggcttcttcacccaggatcaggccgtcaccagtagcgccggcttggttggtcgtcttgtagccttccaggtctggccggtacttcttgatgatttccttagaagcgccgaaaccaccagttgccaggataacagccttggccataactttccggcggccgtctgggccaacgatgtcgatgccagttaccttgcccttttcgtcttgcaaaagcttaacaaccttggtcttgttgaagactggaatccgggctgcttcaatgctcttcaaaaggccagtgatcaaataaccgccaactggcgccatagatgctggccggtgggcccgcttcttgctcatccccccggtaatcgtcaagtcatccagctcaacgccatattgcttcagccagtcgattgccaaagcagcgtggtcaacgaagtagctcagcattgcttcatcgttcaagttgccgccgcccttaagggtttcctggtaaaagtcggccttgttgtcgatgatgccgtgcttgaattgaaccagggattcagccgcgttcatccctgatgaagccttgctggtgttcccgcccaaaacttcgttcttttcaaaaacagccacgctggcgccgagttcatgtgcctgcaaggcagcagacaaaccggtaccaccggccccgataactaccaagtcgtagcttgggttgactaaatcgattggact

SEQ ID NO: 2242 - DNA, 6190 bp, Unknown
  gut microbiota DNA sequence
aatctttgccttctcagactggaccttccacgctgcccgggtagaagaaatctacttgaaccttaagtccggctccttcttcacctttatcgcggccagaactttccacaacaccggggctgcttctttcctcttttacccatatattttcttttatccatgggccttcctgcgttttattctttccccggtcaacgccttttacgcctggtacgccctggtaacctttgccacggctacaatcagttacttctccatgaaggcatactcaaagaagtctctggccagctttattttctccctggtctatacatttgccccttaccggctttacctgggcggggcagtctttggcgaatacctggctgtaaccttcctgcccctgcttttcctgggcatctatgaagtcctgtggggcgacaagaaaaaatggtacctcctggctatcagcggggcactggttgcttatgcccacatcctctctgtctttttgagtctggaatttgccataatcctctttatcatcaagctgatcaccagccgcggcatcagcaaggatcggattaagtctctgcttttgtctgcggtgtctgtgtcttcctggttttgccagtaatcgtgccttttttcactgactttatcggccaagggctctccagtgccaagcctagcatcagctacaccatggggccacgctacctgctcctcaactccttctctgcccaaaaaggctggaagctgagcttcatgctgatgttaacaatccttactgcctgggcctttattaagagccggcggaactggatcatctacggcttaggcctctttgcctgcttcttgaccacccgctatttcccttggaagctcactgctggcacgccttttgaaatggttcagctgactgcccgctatctttcctacgcttcacttttcttaaccatcctttttgccctgggcagcagcagcgtgcttgaagagcatgtgaccggccggaaaaagctggctctcagctgcagcttagccgtcttcatggccctcttctcccttagttccctgtcagtttaccgggataccttaaagcatgttcaagacatgccgaaaaccagtgccaacagcacacagccagcaccattcaagcgcctgcgcgactataactattacaaccagttcaactacaagattctctttggcgcctttgactatatgccgaaaagctcactgaccagcgtgcaaaagcaaaattctcttttaatgcaccaagcctacttgaatggcaagactttaaccctgagtcctttaatcaaagccaatcaaatttcttaccaggtcaagagtgaaaaagcagctgatgttgacttgccagtaattgcctacaagcacaccactgtcagcgtcaatgggcaaaagcatgccttccgccgcggcaaccgggggacggttgtagtcggcctcaagcgcgggcaaaacaccgtcacggtaggctacaaggccagtcctgtcttctacttgagcatagtcatcagcatcctcagctggctcgccctgcttatctacttggtcaagttcaaggccaaatatgcacaatagaaaaacacagaaaaaaagagtacgtggaaaatcacgtactctttttgaatatagccgattagttatcatgattgtaccgttgtttgaaccaccagttgattctctagccacggttgaaactggaacccaggcaatagcgccgtagtcgtaggcgtttctgtggctggaaccactgccagcactgtagtagcatgggtcgtaaaccaggaagcggccattcttataaccagcaataaccttagcatgatgcttatcacggaagtaagtttcgtagctagagaatccatagtagagaaccgggtgtccactcttaacgacagactgaatctctgccatgctgcggccagtaatgttggtgaaaccaccgtcaaacttcttcatatagttggttaagcttgatactgacagcaaaccgcggaagttggcggttgagtaaacaccaccgtattgtggcaggttgttgtaagcatatctcatgttgaagaaccgactcttgatgctcaagagagttgaggaagacgcaaccgcgcagccttctggcgttttatcatctaaagccatatttgcaataacaatatctcaatttatctattttttattccttttatctttttacgtaacttaactcccagcttttcaatgctaaagtaaaacttgtccaagaatacgctggcaaaaactgtaatagcaagtagagttaagtatgccacgatcgggtttcttgaccaaaaaataactatcgcgaatggataaaagtaatagcaaaagaatgtatgagtcagccacatgtttgtgcttagtcccccgaagaattgcataaccttgcacagtggtttacacaaatcaagcaagagaatacaccctgtcataaaaacaggggtgataattaacatcatatcgctaagattactgaaaactttttcttgaaaataaaaggctgaaacaattagcatcaaaccgattaaagccctattgatagaactatagctactaaagaggctgcgaatacttgcgaagatatcatattttccaaagacgattccaaacaaatatgcacaaacaaaggtatctggcataaacagctgtgtccacaggtaactagaagccaagctgctaaatgtatccaatttgatcaaagctggcaaaaacttgactgtaatcactgaaataaacaaaaccagaccagtctccacataaacaatgtgaatcttctctgtcaaataatagtaaatggtgccgagtagaatcgcagcaatgaatgcgcgaataaaccaccactcaccattataagttgctgcgtaacctgttaggttctggatgaacttatcaaaggaaaatctggcaaaacgattccacataaacgcttgtgtatatttcggttgccggctaaaaaagagaaaaccaagtggaacgaatataaaaaaaacacgccaatagactctatacagcccccaaacctttttgagaaaatgaaacttattggcttgaatctgtttagccagacctaaaccaccaagaaacatgaatattgctacgcatatcttaccaaagctgccgaccagaattagatgctttaatcctgaagaggaaacggcaaattcgtatttttggggaatccgatctggaaaggccatactatggtgcatcaacataagtaaaatggctacacctttcaatgctttggtgtcctgccgtgaaaattgccacttgtttacattcaatattcttacctcatttatatattttagagtgtcatccctactatatcaaagaattaactaacattaagttctaatctcaataaacagtcgatacaatgcgtacgctgttccatacctcttccatggctggtttgcttaaagtaattatgatatactattacgttagtattagctacattactcttatttgttactcaatttactagtcttattatttatgcgatttcttagcaatgcatctacacaagaatgcgaggaaatatagttgaacaatttctacagtatggctgacactacgctcactttaaaagagctggccaaactgatctggaagaatctgctgctgatcgttatcgtcacagccttgtttggcggcctggcttacgggaccgccaactacttgcttccagccagatacaccgccagcatggatttcgtggccaagggcaaaatcacgcaaggcggctttaccaagtggcaggccagaagccaaaacgagcaggcagctaacgtttttcaaaatattgccatcagccctggcgtcatcgatcataccaccaatgaaattgacaacgtttcgccagaggctctgcgcgagaacattaccgtctgctccacgccccgatccaacacttataccttgactgtcactagttcttcgcctgaaaaggccaaaaagaagcttaaggttgtagccaaaaacttcaagaaagaattcaaacttgaatacaaacagggccgcaaggctatgccaaccaaaaagaagaggcgcatgtacttaaagccaatcctgccaactgtcctggtcaagtccatcaagttcaaagataagaccagagtagtgaagagctacccgaatgtcaaatttgcagcagcaatcggcacagcaactggctttttgctagcaacttggggatcaatttactggcgcctgcgcagaagttaccgataaggaggttagcgtgaagtctatcaaatcagccggtgaccgcttcttcgcggtcatggcctatatcatcgtcattctgtcaatcatgtctacaacagtcatgtggaactatttaaagggagcttttatccccatcgggacttaccgctacttattactagcaattagccttcttttggttttggtaactaactcttataacttcaaggatctgtcctttatcaccttgataatctgttacttgttagttttcatcttcttctcacaaatcaatcctttcaagtacttctcaaatctctgcatgccattaacggcatcgcttttgattgtcttcgtctactaccagcatggcaagggaaatctgctgttagctagctatgccaatatcgtcttaatcgtagctggcgtatcactcttcttctacttctttggcagcattctgggcctgcggatcggagcaattgataccaactattactgggctgacaacccccacttcacgactagctactgctacctttacttccaccagccacttcaagaccaaatatacttgggccatcacgtaatcagaaatacagggatctttactgaagctccgggctacaccctcttccttttgaatggcttgatcatcgagctttttgttaaaaagtccaagaccttctggcggattggccttatcctggttactttactgacaaccttatccgcaaccgcaatcctgctcggggctttggcagtcttgatctccttcttgcaatacttgcaagcgcaaggaaagctcaacttgaagatcgtcattcccgtgttcctgctcttgctggtcttaggagttatcgttatccgaatcagaaaatccggtggttcgtcttactcagtcagagttgatgacctgcgcatcggcttgactctctggagccaaaatccggtcttcggggtaggctttggcaatgaaggggccttgatcaagatgtttgccttccaccgggccaacaacggtctgagcatgggactgaccaccttgatggctaccggcgggctctacctggctctttacttcctggtgccattctttaccactctctttgctccaagtcgccgctaccttctaccggtcagcattttattattgttggaaatcattatttccaacatctccaccaacccggtctacttaatggccatggctcttctctggtatgctactttaaacgaccttagagagcagagagttttcgccaggactaactataccagcctttgcttttaaggctgaaagagcatttttagacattaaaagagcattccgctgggaatgctcttttactttgctgatttactttttagcatggtccggatcagtgtccaaatcttcatgagataacttgctttcttcagttacctcgttagcgtcatacaggtcatgcttgatcttggatgagctgatctccggggttcttggcaggtaaacgacgttgacgccctcttcttttaaaaagtcgaacttgcccttccaatcatcccccatgacaaaagtgtcaatgtggtattcatgcatgtcactgcgcttttggtcccagtctttttctgggataaccaagtcaacgtagcggatggcctccagcagctgcttgcgctgctcatatgagaagtaggtcttcttgcgcttggaattccagttgaactcatcagtagacaaggcaacgatcaaatagtcgccctgggccttggcccttctcagcaggttgatatgtccgtagtgcagcaggtcaaatgttccataagtaattacgcgtttcataattgctccttgtcccctatttcaggtattccttgtaagacttgtctgggtcaaaaatgactgagccatggatagacccacctctgacaaagacattccacttgccgtactgcttggtcagcaaaggat

SEQ ID NO: 2243 - DNA, 296 bp, Unknown
  gut microbiota DNA sequence
ctctcacttgtacgttgaaaactgaatatcttaattccaagaaaaaaccgagaatcattgagatcaatgaaaacattgcaaagcgaccgagagagttcgaaagaacaaacttgcaaggtcaagtgaagaagggcgcacggtgaatgccttggcactggaagccgatgaaggacgcgactaaccgcgaaagtcttcggggagccgtaagtaggctttgatccggaggtctccgaatgggggaacccagcatgtgcagacatgctatccttaagtgaatacatagcttaaggaaggaa

SEQ ID NO: 2244 - DNA, 1087 bp, Unknown
  gut microbiota DNA sequence
ggaggaaaaaaatgaccgaatctatcaaaacgccaacagttgctgaaaccatcaatgacgaatacctgtagccgttaggccttagcgctgctgacttggcgcaagccatacatgtgccggctacaagaatcaaggatatcttgcacgacagccaggaaatcactgctgacatttcactcagattagccaagttcttcggcgtgtcagatgcttacttccttaatctgcaaagtgacattgacttgcgggatgccaagaagcatcttagccgtgacttgtcagcaattaagccttttagagaggtacaggccaaaaataagtaatctcttaactaatttcttgatccagatcaaggccccgcgcatctatccaagctacaataaccttatctaaatagatgaggtgaccaagatgaacaaaaaagaagatttgaaagaccggctgacgccaatgcagtacgccgtgacccaaaacgcggcaactgaaccgccttatacaggtgagtacgacaacttcttcgaaaaagggatctatgtcgacgtggtcagtggggaagccctcttttcctctttggacaagtacgattccggttgcggctggccagccttcaccaagcctctagttaagctgacccagcgccgggaccagtcctttggcatggaaagaaccgaagtccgcagccgccaggctgattcccacctgggccacgtcttcaccgacggtcctttggacaagggcggcctgcgctactgcatcaactctgctgccctcaagttcatcccttacgaccagctggaagaagcgggttacggcgaataccggcagcttttcgaataaacgaaaaaactgacgacttccttgctttggaaatcgccagtttttttgttttctaacctaaaattgccttgtcgctggcgaattcctcgccagatacgacttcaaactggtggagcaatttctccactgtcagtttcttcttttcctcacccttgatgtccaaaacgaccttgccgtcgttcatcataatcaagcggttgccgtgggcaatggcatccctcatgttgtgagtcaccataatcgtggtcag

SEQ ID NO: 2245 - DNA, 10833 bp, Unknown
  gut microbiota DNA sequence
ataataaaaaggaggatgtgggatttgaacccacgcacgagtcgccccgtctaacggttttcaaaaccgtccccttaagccacttgggtaatcctccatttgatggatagaaaaatattcaattcttgccttccgacaatgacccgtacgggatttgaacccatgttaccgccgtgaaagggcggtgtcttaaccacttgaccaacgggccgcgtaagcactcttaagatgatactcgcttaaactcatcttgtcaagcggctttctcaatcttttcaaaggccacttgcgccgacgctcgcgcgtcaacaaatactagaatacagaaaaatcctctctttggcaagtcttttttagaaaaaagagctacttttttgccttttctcctgcttctgccctctctccttcttacttttagagttaagcagctttaaggcacaaaaaaagagctgcggaacagctctttatcaggcggagtaagagagattcgaactctcgcgccagtttcccggcctacacccttagcaagggcgcctcttcagccacttgagtattactccaatgggcctgaatggacttgaaccatcgacctcacgcttatcaagcgtgcgctctaaccagctgagctacaggcccataagcgggtaacgagaatcgaactcgcgacaacagcttggaaggctgtggttttaccactaaactatacccgcaaatattcaatttatggcgcgggacggaatcgaaccgccgacacatggagcttcaatccattgctctaccaactgagctaccgagccagcttattaaaaagcaattgcgggagctggatttgaaccaacgaccttcgggttatgagcccgacgagctaccagactgctccatcccgcgataataaaaaatggaccttgtaggactcgaacctacgacaggacggttatgagccgtctgctctaaccgactgagctaaaggtccaagtttacaaaatagcggcgggggggatcgaaccctcgacctcccgggtatgaaccggacgctctagccagctgagctacaccgccatactgtaaccaatatggaaaatattaaattacaaatcgggaagacaggatttgaacctgcgaccccctggtcccaaaccaggtgctctaccaaactgagccacttcccggatttatgcacccagtaggacttgaacctacaaccttctgattcgtagtcagacactctatccagttgcgctatgggtgcatgcatgccgaagaccggggtcgaaccggtacggttgaaaccaaccgcaggattttaagtcctgtgcgtctgccaattccgccactccggcatatatattataaaaagcggaagacgggattcgaacccgcgacccccaccatggcaaggtgatgttctaccactgaactacttccgcacaatgccgattatacgacttgaacgtacgaccccctgtttacaagacaggtgctctaccaactgagctaaatcggcatgatataaaatacgggtggcgggacttgaacccgcacgtccgaaaacactagaacctaaatctagcgcgtctgccaattccgccacacccgcagatcggggccatgagtcgtgagggacttgaaccctcgaccctctgattaaaagtcagatgctctaccgactgagctaacgactcgatggaggatacagggctcgaacctgtgaccctctgcttgtaaggcagatgctctcccagctgagctaatcctccatatgactagtttacggcataggccgtaagcacaaatattagtatatcgtattcagccaggaatgcaagtcttttttgcattttttattttaaaaaagcagggcaaaacacaaaaaaacagcggaaaaccgctgttttgggaaagattttaaaaccgattacataatgtcgatcgtcttgttggcaatcagaacaatggacagaacacagagaattgcgataacgataaaggtgatcttttcgttcttgttgagctttctgccttgttcacgcacgccttggtaataaacgatcaagcctgggatgtaactcaaggaaacaaccaggacgtattgccagccggccaaaatcatgcacatgaattggaagagggctgccaataagccgtagatccattgagtccattccttgcgttcacggctgaacttcatttggtacaagccgacaaacatgtatgagaacaagatggcacttgaggccaaagtgtaacagaattcgtaagccttgtcagtgaagagcaaggagaagaggaagatggtctgcaagatagcagtagtgaacagggcgttagttggcgccttcttgctgttcagcttgccccagaacttaggaacagcaccgtcttcagcgatcaaaagcatggtttctgctggcagcatagtccatgacaaccaggaaacgatagtggaaatgatcaaaccaatgttaatgatcatcatgccccagtcgccgacgatcatcttcaagtcgctacccaaagctggttgtgcagcgctggccaattgggcccgggtaagtaagccgtatggcaggattgaaatcatcatgtagaagaccaaaagcaggacgaaaccaagcatggttgcttgttgcgcttccttcaggctcttggcacgtgagcccatgactgaggccccttcaacaccgataaatacccagatcagggtcatcaaagtccccttcatctgtggccaaaggccgccagtagtggtccccttggacaggttgttggcaactctgccccagaagtcagcggtgaacatcccgcccttgaaggaaacgatgcagataataacgaacatgatcaatggcacaaccttgcagaaagtaccgatcgtgttaacgaatgaggcactttcaacaccgttgttaaccaagaaagtcaaggcccagcagaagatgatagccacgatgattgaaggcaggtttgaaccacccttgaagaccggaataaaggtcccgatcgcgctcatcagcatagtcgcaaaggccaggttgcccagccaggcactcagccagtaggcccagccggaaatgaattcacccagagggccatagccggccccggcgtaagcgaagataccacctttaaggtcggatctcttctcagtcaaattgttcaatgacagaacaagcatcaagaaaccaaagccaaccagcagccaggacaaaatcgcgggccctggagcagcagatccggcaatggaactggtaataccgaagatcccagtcccgatggaggaactgacgatcaaagcggttaggccgacaaggcctatcccgtttttgtttactttctcttccatgatttttacctcccaaattactctttccacctaaaaaggcggagatagtctaagcccttgagcgatagaccagctccgcgattttaggatcttaaaaccaattagatgtcttcacgaacaattgggcaagacatgcaacgtggaccaccacggcctcttgacaattcgcttgagcgaacttcgtgaacgagaatcccgtgttctctcagcaaagcgttggagacgtagtttctgttgtaagttacaacttcacctggagcgattgccaaagtgtttgaaccgtcgttccattgttcacgcggagctacgattgggtcaccgttaccagttgggatcaagtcgatttctgacttgcccagtgccttcttcagcacttccttgatgtcagtgtggtgttcgaaggttacttcgccatccttgcctgggtgcagtacccagttgtcaaccttgccatcttcagtcaagatatccgggtgaacagtgaattggtcgtagttgatcatggtgaacaccgtgtcaaggtgcatcatcgcgtggttgtgcggaattgagatggcaattacagtgtcgtagtcagagtttgcgaacaagctcttagcgatgtcttgaattgcgtcagcagtagtccgttgtgaaataccgattgctactacgtggtcgctcaataccagttcgtcaccaccttcgatgtggcttgcgtggtttctgtcacgccataccttaaccttgcctgcaaagcgagcgttgtacttcaagatgtattcagtgatcattgattcacgctgacgagctgggaaagtcatcttgttgactgacatcccgtcgccgattgaagcttgcgggtcacgggtgaagtaagcgtttggaagtggatccatcaagaatggccattcagtgttttcggacactgcagccaagtcaagggtagtcaattccaggtcgtctttgcggataccttcgtagattctggttaccagttcagctggagtcagagccttcaaatattcaaccaaagcgtcatgggttacgccggcaacaaagccagcttcaacaacttgtctttcaatgaattcgtttctgacagcttcgtctgccaaagcttcagcagccaggtcttcggtgtagataacttcggcaccattgtcgcgcagagtttgtgcgaagaagtcgtgttcttcctgggcgattggcaggtatggaatgtcgtcaaacaagagacgttccattgaatccggcgtgatgttttcgatttcgcgccctggcctgtgcagcataactgtcttcaacttaccaatttctgaagttacatgaataggacttgtcatgatctttacactcctataattgttaatttacctaatttcctaatgatttgtgtggttataaatcgtcaagtcaacctactaacgacttaactaactagttgttcgtaatttttaaagagagatttttacactaaaatttaaaccagtcgatgagctgacgtgcttatgcgtggataacagtccccaactgtccagcaagagcagcgtctaagcctgacagagaagtaatgatggcttctctttccgggtggccttcaacgaatgacatgcaggcttgaaccttaggaagcatgctaccggccgcgaattgaccttcgtcaatgtacttcttggcttcttcaacagagatgtcttccaggttcttttggtctggcttgttgaagttgatggctacgtagtcaacagcggtcaaaatgatcagcttgtccgcgccaacattgtctgccaacaatgcgctggagcggtccttgtcgataacggctggcacgcccttgagcccttcttcggtctcaactacaggcaccccgccgccaccaccggcgataacgagttcatttgcttcaatcaaggtcttgatgctgttcaattcaacgattctctttggagtcggtgaaggaacaacctgccgccagccgcggccagcgtcttccttgaagatgtagcccttgtcttcggcgattgagtcggcttcttccttagtgtagaaggccccaatcggcttagttgggttttggaaggcggtgtcagccgggtcaacaacgatctgcgttacgatggttgccacatccttggtcatgccgcgcttgcggagttcgttttgcaggctttgctgcaggtggtagccaatgtagccctggctcattgccccgcattccgggaatgggaaggccacgctttggccatgttcagccgcgtagctcatgcccaggttgatttggccaacttgtgggccattgccgtggctgataactacttcgttgccggcgctgatcaaaccgatcagtgaggaagctgtgttcttaaccaattccaattgttcggctggtgacttgccgagggcgttaccgcccaatgctacaacaacttttgacataagagcacctcttcttgattagtcgcccaaggtagcaaccatgacagccttgatagtgtgcattctgttttcagcttcacggaagacaactgagtgcttgctttcgaagacttcgtcagttacttcaagttccttcaagccaaacttttcgtaaacttcacggccaacttcagtttccaggttgtggaaggctggcaggcagtgttcgaagataacgttagagttttcagtagccttaagaacgtccatggtgatttggtatggtgaaagcaattcgatccgcttcttccacttgtcgtcggattcacccattgatacccaaacgtcgccgtagattacgtccatgcccttaacgccttccttaatgtcgtttgaaacaacgatcttggcgccagtgtccttagcgattgcgttagcctttgccaaagtttcttcacttgggttcagttctggaggagttaccacgtggtattccatacccataactgcggcacccagcatcaaagcgttggatacgttgtcgtgaccgtcaccaacaaaggcaaacttgatgtccttgtattccttcttcaaaacttccttagcagtcaagaagtcggccagaacttgagttgggtggtcagcgtccgtcaaaccgttccaaactgggacaccggagtacttagccaaagtttcagctgcttcttgtgagaagccacggaattcgataccatcgaacatgccgcccaatacgcgagcagtgtccttaactgattccttgtggccgaagtgtgagccgcttggcccaaggtaagttacgtgagcgccttggtcgtgagcaccaacttcgaatgaacaacgggttctggttgagtccttttcgaagatcaaagcaatgttcttgcccttcaagcgaggttgttcaacgccagcgtacttatccttcttcagttgttctgccaagtcaagcaggtattccatttcacgagtgttaaagtctgcgagagttaaataactgcggttgcgtaaattaaaagccatgatagcttcctcctgttttctattgtgtttgtgtttttcacttgtttacgattatcattatagaaagcgttttcagataacaacggcaaaaaccaagaagatttaccaaaaaaatcagcaatcaattaattagtttttctaaactgtataatcgaattttttaagtgaatagaaggccgcttatacggccttttgggtacttttcccttgtttatacacttttttatattaagctgcctttgtgttaaaatagaagcattgactcagctaacttcaatttacttcaaaaatgaggagaaaatgcaaaaatgcacttttatatcacaaacaaaagcaccaagaacttacaactaattagtgacgccctggagcggaacttcgaaaacatcgtcgtcggccggtcaactgacgcccaaaggaccttcgacgacctccgccagctcagagttgacgtattggtggtcgactatgacctggcaccttttgacggcttaactctcttaaggcggctcaagcaggccaacatcctgccccgggtaatcatgacggccaacaccccgtcagaatccctgatcacggctgcctaccagaacggctgcgactttttcatccaccaccagctcaattctgaagagattgcccatatctccaagattatcagcacgaccctgcagcttttaagcaacatgcgggtgatcagcgaactttccggcagtttaaacaatccatatggccgccagcaaaccacccaccgccagcagatcgaccatgttaccgacaccctgcgctttttgggcattgcatcagaaaaaggctatgatgacatcatgaaaattatccgcttgatggtcgacaaggatatgagctttgaccagattgacctggaagaaagcttcggcatcagcagccgggagaaaaaggtcatctaccagcgcatccgccggaccctgcacatcggaatcgtcaacctggccaccatgtgcatcgactacccggacaacgaaatgctgctggactatgccaacaacctctttgaataccagaacatccacgtggaaatgcagcaccaaaacggcaaggagctggagcgggggcagatttccctgcagcacttttttgacggcctgcttcaggaaagctaccgggtcaagcgggacagcaacaatgagctctggtaagaagctttctgcttgtagtacaattggatagtaaggaaagaacttatctcttttatatagaaagaaagacacaacatgttagaaaaagttaccgttgacccaagtttttgggaactcttccctgacgcgcaagtaaacatcatgctcgtcagcggtatcgacaaccacgacactgatgacaatttggcccgccggcgcaagctgctcagagaaggcagcgacaaggcggaagacttcctgggtgctgcagcttttgccaagaacccagttgttgctgaatggcggcaagcctaccagcaattcaaaaagaaaaaaggcgtccgggcttccatcgaagcgctcttgaagcggatcgacaagggcgaggacttgcacccgatttcaccattggttgacgtctacaattcagtttccctggctcatggtgtcccaatcggcatcgaagaccaagataaattggccggcaccatgcacctgggccaagtccacgaaggcctgcccttccagccagtcggcgctgacaaggacgaaccgacccttgaaggggaagttgcctggtatgacgaccaaggtgccgtttgccgctgcctcaactggcgggatgcccaaagaaccatgctggatgaagattcaactaagggcgtaatcgtaattgaatcagtcaacgctgaccaggcccagcgagctaacgaagccatgagcgacttggaagagcttttggaagaatttttcggcatcaagccggacaagtctgtggtcttgaccaaggacgcgccaagcgtggacgttgactaaaaaactatcaataagttttccacaagaaaaagtcttacccgtcataggtaagacttttttcgattgactaaaatattttacttcttttcctggctccagaccttttccccgccaatccaagtcgatgccggcttgaccttggctaagtcctctgccttttgactgaagatgtctctgtccaagatgacaaagtcggcgtccttgcccggggtcaaggtcccgttattgacgaagccgcccatctcggccgcgtctctggtataagccaggatggcccgggctactgggataccttcatcttcattaataaaaccgcctgctgccgtgtgccgggtcactgccgcgtagattccgtaaaaaggactgtccggttccgcccatggggtgcatggagcatcagaactgaggctgaaaagaatattttctttgtctaagctcttgatccggtaggccattttcagctggtccgctgacaaaaactgccggtaggaatcttcttcagcgaagaagaagatcggttgggtcgaaacagccaggccaacttttgcccccttcagctccttgagcatggagtcggataaaagtgaagcgtgctcgattctgactgacggctgaccttcaagccaaggatccagatcctggcaaatgtcgatcacccgctgaatagccgcgtcgcccatggcgtgaaccgcgacctgcagcttatgttctcgggcataagcaataatttcccgtaaacggtcctcactggttaatgccacgccctttttgccagatgggaaggcatccttcatcaaggccgtttcaccggaaatgctgccgtccatgaagaccttgagcccggccacccgcaggcgatcactcttttcgatttccaaaggaccagcaacttcatcagccacgtaatagatagctgacttaggcttaaagccctgcttataggcatcttggtacaaggaaagcgtggcgtaagggtgcagccgccccatcatttccccgatggccaccaagccgttttccaggtagtggctggatgacttgaccaggttggccacgtcattttcataagacaaggcagatttagcccggatcaacagctggctgaccgcgacttcccgcatgaagccagttggccggccggaagcgtctttttcaatcttcccacccgccgggtccggcgtatgctcatcaattcctgccaattccagagcccgggagttgcccacagaagagtggcagtcagaccggtacaagaagatcggctgggtagttgacacctggtccaggtcatctctggtcgggctccggtgttcagccagcttgctttcgtcaaagccccagccctcaatccagacgtcaggcccctggccatattccggagtatggcggagggcttcctgcatttcactaatactgttaaccaaaggcggagtgcaggctgccccatgcaaggcgtcagcaatatacttggggtgggtgtggttgtcgatcaaacctggcaggacggtttgtccctgaagatcaatgatttcaccccggcctttttccccaatagccacgatcttgccgtcttcaaccgtgattgaatcagtaaaggccgtctcgttttccccggtaaaaattttcccgtttacaaaagttcggcagttcatctttttctcctgttttcctattaatcctaattctatatctattaagcgtttacaattttattctactcagaaagccgacaaataacagtacaaattaggcaaatagaaaataaaacaagaaaacaaaaagagccagacttccgtctgactcttgattcgcgcggcagcttcctatcctcgcaggcagtttcccaccaactactttcggcgttaagaagcttaactactgtgttcggcatgggaacaggtgtatccttcttgccattgccaccgcactcttgcttgagcttgcacgctcaaaactgaatatcttttaccaagttaaaacctcattgctttgctcttttggtcaagtcctcgactgattagtaccggtccgctccaagcctcacggctcttccactcccggcctatctacctcatcgtc

SEQ ID NO: 2246 - DNA, 221 bp, Unknown
  gut microbiota DNA sequence
agttgaaggctctagcatgtaagagcagtcagctttaacgaactcagttcggggtattaaaatcgcggcttgactgcttcgagatgcatcacgatatgcttgcctgctttttgcgggcaagatgcctttccgactgccaggctaaaagtttccagtggggcagataaaaagctattggataatgccatttggcgttatttgacagccaaccgtactcactg

SEQ ID NO: 2247 - DNA, 382 bp, Unknown
  gut microbiota DNA sequence
caaaaactattcaaggctttgactggaacatggctggcaatgaggctttttgctcatcagacggcaagcggatcaaggtatcagacgccgcaatcaagcgagctgacgaatatgagcagaagatcaatgcaattaagtcagcgcgtgatctggaaggaaatgcccacgggcaaagcaagctgtatcgcaagcttgaccgcagacagcagaagctgaatgcaaagcgctcgaacatgcttaccaacgaataccgccatctggtacacgaagtagtcgatgactgcgacacgatcgtcgttgagaaattggatgcctatgagatgcgcaagcgtgggaaaggctctgctcaaagaaaaggcatcaatcgcagactggcggtcct

SEQ ID NO: 2248 - DNA, 6615 bp, Unknown
  gut microbiota DNA sequence
tcaagcccgccttgttggcaaaggtttgcccgtgccggataaagtagaatgtggtcatgctggtcctccattgtttctagactttctttttctcttttctttgctaagaaatattataccaaaattaaaattgtgttgacatttctaattttgcacttataataaaattaatcacacgaaaggagcgaaaaaatgtttactttacagacaattcaaatgcaaaacaaacttttttcctcctcccagtcttcttccacttaagaaggctgcgatttgtgatggccttcagcacagtttaaaacagtgaggccgaaacaacaactccaacataacatctcatggcaaagggcactcacgcaaggcgggtgccctttgttttttcggaaaggaattctttacttatgacatgctacaacttcgcggctggtccagccatgctgccggtcgaagtcattgcccaaatcaaacaagacttgccagattatgcccacagcggcatgagcgtcatggaaatctcccaccggtcagccctttacaaggagctctacgcggaaaccaaggccaacctcttggaacttatgaagctggaccaggcagaatacgacgtcctcttcttgaccggcggggcaacccagcaattcaccacaattcctttgaacctggcccgcaagtaccaccggatcgcggtcgtggacagtggtcactgggcccaaagagcagcagaagacgcggctaaagtaccaggcctaaccgttgacatcgtcgctagcgccaaggacaacaattacactgctgttccggaaatcctgactgaatttgatcaagactacgactacctccacatcacgaccaacaacactattatggggacggcctacagagacggccaaattcctaagaccgacatccctctggtagctgacatgtcctccaatttcctgggccaggaatacgactacagcaaattcgctgttatctacgccggagcgcagaagaacctggcccctgccggcttgaccgttttggtcatcagaaaggacctgttggtcaagcatgatgacctgcctggcctctttgactttgctactgaagccaagaaggaatcagccttgaacaccccgccagtcttccaggtttacgtggctggcctggcccttaagtggcttaaggaaaaaggcggcgtggccggtattgaagccatcaaccaagaaaaggccaagctcctttatgactgcctggctgaatccaagaattttgagagcaaggttgatccagacagccggtcaattatgaacgtgccttttgtcagcggcgacccggacctggacgcggagtttgtcaaagaggcaaccgcccaccagctgcttaatttgaagggccaccgcctggttggcgggatgcgggcaagcatctacaacgccatgtcgctggaaggggttcaggccctctgtgactttattaaggattttgacgccaagcactaatttttgaaaggattctccatgtaccaaattaaaacttacaataccattgctaaagaaggcttagccgaattcggcgacaactaccggattaaccaaactgacaatccagatgcctacctgatcagatcagttgacctccatgaccatgaatttcccaagaatttgaaggccatcgcccgctgcggggccggctacaacaacgtgcctttggacaaggccctggaaaatgggactgtggtcttcaacactccaggcggcaacgccaacgccgttaaggaattggtactggcttctatgatcatcgccagccggaacatcgtggctgccgccaactggtcagctaacgccaagccgggcgcggacatcaccctgcggacggaaaaggaaaagaccagcttcaacgggactgaattgctgggcaagacggtggccgtgattggtttaggccacatcggctcactggtagccaatgcctgccttgatttggggatgaaggttgtcggctatgacccatacttgacggttgaagccgcatggcgcttgtcagaccatatcaagcgagccaccagcatcgctgacgccgttaaggacgcggactttgtgaccgtccacgtgccaaagaacgaggagacgaccggtttgattgctgacgccaagatcgcgcagatgaagccaaacactatcttgctcaattttgcccgcctggggatcgttgacaacaaggctgtcgttgaagccttggcagaacaccgtttgggcaagtactacaccgacttcagtgatgccacgattttgcacaacgataacatcgtcatcatgccccacatcggcggatcaacgattgaagcggaaatcaactgtgcccggatggcggcaaagcaaaccatcgaatttttggaaactgggaacattatcaactcggtcaacctaccgaacgtgtcagcaccgtttgaaagcgaccaccggatcactttgattcacaagaacattccaaacatgatcgggcagatcacaacctacctggctggccgtggcatcaacattgaaaacttggtcaacaaggccaaggacaagtacgcctacaccatgatcgacatcgatgagatcgaccaggcgacccaagacgaggtggtgctcaacctggaacagatcccggctgttacccgcgtcagaatcttgactcacaagaaatagctgatttcttaaactttgactctctatccttaccattgaaacaaaccctggaagttgttgattgcgacttccagggtattttttgactttgttgaagagtcctgccagcagtgtggtaaaatggacaaggttgttttctgaaaatatgcgaataatgatgaaatctatatctagagagaaagaaagttagaaagaaaagatgaaatcaaacagcaagtgggccggcctggcagctgccgcctgcatcctatggggtatttctggcctctttgccaagggcctctttaacttggacccccgcatcacgccgatttgggttacgcaaatgcggcaggtttgctcaggcttgatcctgttaattgtggcccagctgacgggcaagcatccctggcaggtatggaaagacaagaagagcgcggttcagcttctggcatatgcagttatcggtgttctgcccttccagtactgcttctttttggtagtagcccaggctaacgcggcaatcgcgacggtcattcagtttatcggtcccttctttgttttggcctatctgactttgaccaatcaagaggctctgcggccgtttgatgtcgcggccagcctgcttgcttttggcggagtctttctcctgtcaacgcatggcaatatccatgaccttaggatcgcgcctcttacccttctttttggcattatgtcagcggttggggcagcggccaacagcttgcttccccaagccctggtgaccaggcagtccactatttcagttactggctggggcctgcttatctccggtttgattttgacggcaattcatccagtctggcccagcctgccgagttcaccgaccgtctatctcaacctgtcagtcgtcatcgttatgggcacgatcatcccgacgctttggcaaaaccatgctttaggccatatttcggggatgaccgtggcctttatggatgcctttgaaccgctggcctccatgattggctccatcatcgtctttcactttcatccgcaaatgatggattacgcggcatctgtgatgattatttttgccgtactcgccctcaattggaccccgcggagcaaaatcaaagcccgggttgaaaaataatcgaaaaaaacagcgtcagcagattttcctgctggcgctgttttgctttagttttcggttatatttaattactcatcatcacgatagtgcagatcatcaaaatgctggtcctgcatcttttcagccattgcctggctgcggtaggcaattccatcgacccaaggacgggcaccactagcacaaaccaatatttgcacattattgccagcgatattttcagtatgaacggcaaaagatgtaccacttccggcagtttggtaccaacccatgacattcatgtagtttaaaccgtcctgctggtacaggtgtcccaagccccagccttttacctgatccatttgtttttcggttggcggtaacggcattttgaaatcactcgacctagtgtacagggtagttgtggttccctttgtatcgtacttgtcgtcttgaataaaaattgtactttggccaaagacgtacttagaatgcgttgtctcaccatcatagttgcttgcagaataccaggttccctgcatttccgcggggatggtaaagtagccgctccgcccttcagacaggcgctgagtttgtccagatttatccatgatctcgaccttcttggccagttgcttgaattcagccagctggccttttttaacgatatagtcagccatttcctgcttagttgcctggcccaaaaagctgccactgcctgctacttttactccttggtagaagtaaaaagtgcttccgctaagagtataataggtcgtccctgtttgtccggacgccgcggcttcataagcatagccgctgcccggctgcttaaattcgtagtcgctggtcttgtgcagggtaatagtcaaagagccattctgccctgcttgaagcaaattagaccattctccgccaaagcggttagcacagtagagcgtaatcaagctgccgctttcctgcggcgtcagttttgccacatcaagttttattgctttagctgaacttgacaaagctttgctggtctttttaacgctagacttgctgctctgactgcttttatttgaactattgcttgcctcttttgaagcggtctgcttgctgcaacccgtcaaaaaaataccgcaaaaaagggccataacggcccactttttgattctcattttccaaatttctttcttcttttactgaacacagcaaattctgaattctaaaaaactagaattccatctgttcaacgtcaatcatccaagtgatgccgattgacttttcgcccaggtaagtcgcgataaccgggctaaattcgtccatttcaaagacagcctttggcacttcagccttgaggtagttcatgacttcttcagcttgcgcggcgtcatttgactgaatgatcaagatccgcagcttgtcttctgggatgtccaatgacttgatcttttccagggattcttgttcgatcttcttaactgcccgcctcattgaccgcaccttgtcgtaagccacgatcttagcttcatcgttgaaagtcagcaaaggcttgatgttcaagagtgacccgataaaggcgctggcattgctcaaacggccgccccggcacaagttgttcaagtcatcaacgataaagagttcgtcgacagttgaccggatttcagccagcttggcgatgatctcttccggactgtagctatccttttcgatcatcttagctgctgccagaacttggtaaccctgcaggcgaacagtaatttgtgagtcaaacgggtacaggtggtagtccgggttgttttgcgcgatccccatcaaggtgctgtaggaacctgaaatcccgctggagaggcaaatgtagatgatcgcctcgtaaccctcatccttgaagttgtcaaaagtcgtgatgaggtcccccatcttcggctgggaagtagtcgggaagctggagccactccgctgcgattcaaaaagctcttcagaagtgatgttgattccttccaggtattccttgtcatcgatgtaaatcggaataggaatgaccttgatattatacttttcaatttcggctgcggacaaattggccgtactgtcggtaactaatgcgatcttcatattaaaccttccgtatttaacgttttaacatgaaaattatagcatacttgccccagctaaactagaagaatcttgatcatgcctgtttgcgtatagaataattatctgcatccctatattgaacctcctacgactaaagtcgcaggaatctgggggccacccaacacattacacgtaagatcgacaactcttagaagtactcagagtgtttaggttagtttcacaactgcccaatgtcatctcgtcttcgttttgactcgctcagaagattacgcagataacacagtctagtgctaaggacgattgttccgtttcgcccgggctgtttttagtgctttaatcttagacttccgtcaccagtgacgaagggctaagatttttcccttcttcggccgctttcttcagctttgcgtgatgctctggatgaatcccccaatctaatatgtttcttgcagcgtttaaatccctgtctaccgtcttcttgcagcttggacactgccattctttctgaccaactttgagatctttgttgatgtatccgcagtcgtggcatgccttgcttgtccaaaatgaatccactttgacaagcctcttgttctgcttctttacaagcgactctaaaatagtcatcagctcatatggcttaaggaccgccagtctgcgattgatgccttttctttgagcagagcctttcccacgcttgcgcatctcataggcatccaatttctcaacgacgatcgtgtcgcagtc

SEQ ID NO: 2249 - DNA, 209 bp, Unknown
  gut microbiota DNA sequence
tctcgttgtactgcccattgtagcacgtgtgtagcccaggtcataaggggcatgatgacttgacgtcatccccaccttcctccggtttgtcaccggcagtctctttagagtgcccaacttaatgatggcaactaaagacaagggttgcgctcgttgcgggacttaacccaacatctcacgacacgagctgacgacagccatgcaccacc

SEQ ID NO: 2250 - DNA, 2685 bp, Unknown
  gut microbiota DNA sequence
ggctaacaagattaaggtagatgctcaggacgtaatgcaaaagaccgcacaggcggccgaaatggccgaggaaaagccacaggcggttaaggtggtaagaccccgggcaaaaaggaaaaagcccgctgaggtcaaaagcgagcatataaacatggtaatcagtaaggaaacacgtgctaagcttgaggcgtacaaagcgatcacgggcaagaccacaaccgaactctttcaagaatatttagacaagctgtgggtaacagatcgggacgttacggatagcgagctctttcgtgacctgtatattaacaacatgaagaaatacggtttatagaaagcgtagtaaagtaacaatggttaagagtgatttgccagaaaaagaattaagggcaatcgatgcggcgcttgaccgagacaatgcaacgcttgaccgccttgttactgacccggacgaaaacgctagaatctgggtagcaaaggccgctagaccgcaagaccttgaccgattagttactgacccatccccgctagtaagggcggctgtggcacggtatggacgaccgattgaccgccaaaagctacaagttgatccatccccactagtgtgggcacaggcacggcggaactaagtaacaaaggtaacgacataaaaagaggctgaccagtaatggtcaacctttttcttttgcactaaagccaagcaagcagccccctgtggctttatctcgaaattaccgaatcttatgccatgccgctgcaccctcagccgggaaaatgtgcgccatttgccacatctgatcgcgactcagatggtagacaatcgccggcaataacgtgttgatcgcatcttcggcctgagcactgtactccgtggcgccgacaagatgatgttcctgatcgaacaccaaaaggctatcacccaccgtttcctgatcggtttgatgataccagtcatccggaatgtggttgtgcacgactttgttagtatcatccttgaccgcttccggtgccacacctactttggcaattcttggcgaggtgtaaaccgttgacggaatcgctggataatcaatcggcgcagttgtttggccgctcagtaacttgtaaaggtaataggactcaaacgtggctgttggcgtcaatttgggttgtagcttgtctaaaacatcgcccgatgcataaatattggccacattggttcgcagatagtcgtccacaagaatcccgtgctggttaaacttgacaccgatgttttctaatcccagttgctcaacattcgggattcggccggttgcgtccagcacccaatcgacaactaactgttccttgtcaccataatgaatcacaatgccatcagtggtcttctcaagcgccgtcaccgccgcgttcggcgtgaattgaatgccccgtttcgtcatgtcggccatcacatcttcgacaaacggctggtggaattcccgcaaagcacgatcatgatgcatcaacacatggacatcggcgcctgccgcattggcaatcgtcgcaaattccatactgatatagccagatcccaaaataccgattcgcttcggcaagacgtccaagtccatgaaggcccgactgtcatgggctaaatcggtccccggaacatcgatgcgatgcgggcgctggccggtcgcaatgacaattttgtcagcggtataagtcttttcacccacaacaaccgtgtgcgcgtcctgaaattttccatagccatggatgatcgtcacgccgttttgggttaatcccgtaccgatagcattcggtaacggcttaatcacggcttgtttatgggccactaatgccgaccagttgatcttgatattgccagacacaacaccctgcatccgttctgccaaccgctgcaaaaccaccggcgtatcaagcgtgattttcgcgttacacccataattcgggcaggtgccgccgatcatgtcaccttcaaccaccgcaactttttttcccgaagctgccaatgggccggccccgtcaaacgcgccatgcccactacctaagtacaagacatcaaaatcatatggattcttcaaaacatcgacctccttatacactgtctactaacaatgaagaagttaagcataacagatgtcatacaaattagccacggataatgcttagaggcagaaagattttttgcaaaagaatccgcttaatagcaaaaaaattccggtaagggcgattgttttggcaatcacttaccggaactcattaatgcgcatttgcggaactaaagatcgcggctcacttgcggctttttaatctgaaaccgcaccgacaatttgctgcaaggtattcagcaaggcactgccgtctgcactttcggcgcccgtttaattccaagaacgctcattgtcagtgttctgttcttcggggtgtttggccgcatattctctagccgcttgtttattccaccaaatgcctaataagttctgcatggtgccatacaagtctgtggctttatctcagagcccccagcaaggggagcgggcgacaggctatagcacgctttaaattcgtttttcgaaccggacaaaaccagacattttcgcaatcccccgggcgggctttatatgattgctcagtatatgataggtcagcatataatcactctaattcattaaattagagttatcggaattagaaacagtgagg

SEQ ID NO: 2251 - DNA, 4435 bp, Unknown
  gut microbiota DNA sequence
cttgggattcgcctcaggctttaaatcttaaccagatacattaggtctaaaactgacttttttaataatctagtagaaccaatagtatatcaattgattaagatgacctttgctgtcacgttacgacagaattcttcaagctgctcaagctctgaagctttcaaatatgaagttaaatcacaaaacaccatgatcttttctgggtgaagcattcggcctaatcgtatcatcaaacttattttatcatacgctgaatcacatttgtatccatcaatacctacttggaaatctctcaaaatattttttaccccaaattcttgtctaatcgttgttggaaaattaaacgtaaacaataccttttggagagactcctgtaattctgcccacttctgttctatctcatctatttgataaggacacaaatttttggcaatatatgttcttaagtcagtttcaaacgatccaaaaggattaatctgagtaagagggttaccaaaatacatgatgtatttttctgaatcaagttggttatagccctcatcatatattgatatttcatcttcgttgcagctcatcactgctgccaacattgttagtaaagtatctttgtcttgttccgagagtattgtcagtttccctatctcagaatctcctaagtcaattgcacaatctttaatcgaaaatttgactatcataaaatcaccaatctttctgatagattgcgaacatcacgcgatggagtacctgttagaaaatgcatccctgcatattgtttttcggtaattaccaaagtttgaactataccacctttatggatataaggggttattttttgttcgacttcttttgtactggcaaaactagtgcaaactttaacatagattgagtactgaattctaacaaatcccagattttctaatcttttgacaaattgacgataattgcgctgatcttgctttgtcgtaactggaaggtcaaacattacgagcattctcatgatttggttcctcaacttgttccacctcaaattcaaacttagtcgtatccccatcaagataccgaagacaattctctacatatacgtttaaggcattagaaacaatttgccgcttaccattaaacttgatctcatgatttagcctatccacaattctagctttattgagaggcgtcatttcaacatcctccattgataaaacgtaattgtcaattacaaatcgccaaggttcgattaagtcggaacttaaattgtatctattcaacacactgtgatgatgtatacccgattgtgacaagattccatgctttgaaagttctgtagtaattcgatttaacaaaacggtatatccataatttagagctccattaatatcaaacgcattgttatcacgtgtgaaattctgactaaatacttgcgaaaaataaagactagcaacaactgcttcttgatttgtttcgtcgttatattcgagacaagagagatgcttttctaaaggtctactgtctgctccaaacattctgacagtctgaatttgattgattatcttttgacctacaattttagtccacaatttctcttttcgttcttgaggccaatttatttgggtctgtattcttttgggagaaaaagcttttccaaaggaatcatttaccatagctgatggaagcatcttctcgtcgttaaacataatacaaacatgctttttggacagttccactaacgcgcgcgacgtaatgacagcttccggtgtatcaatgacgatagtgttcagttcatccaagtttaggtaattgctgtcttcgaaagtttgaacaactatactattgttggtatacgttatcctacacggattagtgacaaatacatatctccatgacatagtagtacactcctttcaatattgtgttataattagagatgcggaggaggcatccttcgtgctttatatcttaaccaggtacattagaagttaaaaaaagactcattttttgagaatcgaaagtacttagaatatattttctattttaggtttgaatgcctaaaaaagaccacctcacggtggccttttttctttgcgctatatttgcaagtccttaaaagctattttcctttcaaatagccctgtagcagacctaaagactaataccgtgtcatccatcaaatgagacttaattcctctattaaatctgcccaaggttccttttagccctttcacagaattcaaactagataattctagtctggaagtatctgaaactgctagcaagatggattcaatatcttgtagtttcttagagagatcactactataatcatgaaaagcctttatagcctttgctgaactcaagctctcaaacggtttatgcccttgactaatcaatggcagttctaatttacatttgagcaggatctcatcaaaaatttgattgagtgcatcgttggcatctttatagccacgatactcgttctgcatttctatcagcttcttagcaataactttatcactctcatttgaattaaaggtttgaaggaaactcattgcattatctgacaaagtaaagccattaaaattatggtactcttcatcactagataggagaatcctttcagtagttagcttctgatgttgatgtccctcgccatcttcccacgtaactggaacctttctctcaaacaatgtatttatcggcagggttatcaccttgtctagcgtcgttttactattcaaccttgcgtcaactagcttagaaatggcgttttcttcatcactctttgataagtttgtcaatttatctaaactatattgattagatttgccatctttagtttgctttacagttttgataagtacaatcttgcttgtcactgttcctgaatagaaaccatatacttccggagacatattcttctttcttggaacagccttcttcggattcttagaatgatgattgatcgtagaattaaacaatccaccttctgcctttgtaggcattttgacaatcctaatattatctggatttcttaaattagttagcctcttgataagtttagatttcctaccaacgatctcgccgtcagaattgacaatcatatcaccatgaacaagatggtgattttcatccgttaacgccaaaaatgcaaatttctgtaaatctacatctttaagcgctgcactatctaatttttgataatcgttgtaatcaatgagcggccgcaattttggatataatttccataaaaactgagcttcaaaagctgccaagtatgcgtctacggcatgatggaaatcatttacatttctcactttaaaaaggttaaaggtagatcttaatctgtgagacaatgaggcattaatcgcaacaatttttgtattcggatacagcatggtcagaatttgggctgttactttgataattgagctcgactgaacaagagaacgtttaagcattcgaatcttgaattgattcgttgcattatcaatccagtctctatttaaattgttatatttatcctctgaaataaagccgttatccttgagcttagtccaataacttgaaacagctttattcgagaaaaccttaaccgcaggaagatttcccttcttctggttgtttttagattgagtcagcaccaaattatctaatgaatcatctttgccattaattgatcgaggatagatgtgatctatttcatagcggtcaagttcgtcgagattaatagtgtgactaggatcataaatatctttgcaattttggctaaaatacagatactccttaatgccaaaatcttttggtgttttgaatctcttgaactcattttgtagagtatctttccattcagatgtcgttatctgctcttctatgagtttcttgattctagaatattttggtgcattattgaccttatgtgatcccctagcaaattccaaggcaataagcttaggctcgcggccattaaagcgtactaagtcctcaataatattaatacatacacgtatactacgttcattttcaggagaaattcttgacagctttaaaacactgttgatcttttgattctttgaaggtaaatcattatatttctgattataattagaaatctgtttttgacattcttcttttgtgataatttgctggaaattagactttgttctccaaagcaagtccataatagactctttacgcgatctattcccaatgtagattccattgagcaataaactagacagtcgtccccacccatctaaactcaacgacgcaatttctttaacggggaaattctcaacttgagccaatttaagtttcttgatgcgggcttcttttctaactacatcattcttttcaaaaatcgtcaaatactttgttaatttatcccagtcacttgcatacttcttactagtgagtaaagaatcatcaatccctttgatcttcttca

SEQ ID NO: 2252 - DNA, 4735 bp, Unknown
  gut microbiota DNA sequence
acaccattacttggccccgtaatatcactagttttgacacttcgattgaatctacacctaaggacattggcaacttgctcagttgttaccgccttttgtttcataaaaagatcattgaaaatagcctgtttttcttctaccgaaagcggtcgtttcgagattcgagtattgttcaattcattaagaacttcatatttttgataagtcaaactcttagccggtaaaactggttcccccaaaagataggtatctgtcgccgtcattctagtaatgaagttctcaatcgtcttatcataatctatctgcttttcaaaattccaaaccgttaatgtttcccgtttcacattttcgttgtagaccagccaagcaaatctagaatgttcgttagttgttaacgggccaacaaagtagggaattcgaaaatcaataaatctctctaaattgtatttctcatcacgctttggactaatgaggtcattatctgctagccattcgaagccgggaatttgagactgtgtggcaataatacgccgaagttccaactgatgaacttgatgaggtatcgtaccatttttgtaatttcgttgtggaagcaacaaaagttcattatcagctagaaacaccagtttctgaatatctggatcatcttggtatttttccttttgctttttcttatctttatccttagacttaggctcaagagtatctattactgccttttgaaaatccgcagcagaactttttttagaccctcgatgcttaaagtttaaatagtcatcaagcttctcctccagttttatcttatcttcactatcgagcctcttcattacagcttttaagagaaccaattgcttatggaatttatcgtatgactcaaccattgcctcagaatagcttttccccaaaggaattaagtcatgcagagtcacttgattataaattgttttaagctcatccaaaatttcttttccagaactactaagcagttctgtcaacttagagatattatctaagttaccatcctttttgggattcaaactaaaacttgatacaggattcccttttgaattaagtattgaactagcatcaacaccaaaaactttttcaatttttactctcttaacttcatcacccaccaaaaatgtagcaattacctccacaacagccttgtcagaatctgttgtttctaaacattttgtcaatttttgttttctatttgatctagtgtactctttacttaataaaatccccctaatttcggtactattttctgtattaatagtgtacgtagctgactcatcacttgtttttatgtttttcagcaatagattaatacgcgttaacgacgaatcaatatctaactcacctaaatctagatcatcaaccttctctttccgcaaaaaattccctctatacttgaccatagggtgaatgacctcatagatcaattttaagcgtttctttgggtctgtagggacttgtgagtcattatttatcaatgccagggctgcgtgataacgggttggaaattctttgatttcggaattaaagtttttccttctcccttttcgtaagtcatcatcgtttgaaacccaagagtctttgaagcccttaaaatattcttcagtctcttcttctcccatcaaatcaataaagtgaggcataaaatagtccttcaactgctttaaacgccatttttgatgccgatatctccgtcttgatccacgtgaaattcgagtactttccgcagtctgtgcctttttaaactccgttacaccgatttcatgccgatgtccatgcttgatgatattaaaatcgtcatcaatagccacaaaaccgttgtttgcaacaccaatatctaatccaacagtgtattctttatccaattttttattcattatctttcttttccttaaatttccaaaattaccatttttaacctatgataacactttcattactacggcggaatatattttttctctattggccaaagctttttgacataaatgttttaactagcaaaaaagcaccccgcgagggagtgcttttagtggacccgcttgaaagtaaccgtgaagttcatcacgccatccgaccagctggcattgattttgccgccaaaagcagcgaccaggtcctgggccatagacaagccaatcccaaaaccattcttttgcttttgatcataatggtgggattcatcttcccggtaaaaacgttcaaagaagcggttggtatcgatcccggacccattcttatatgaattagtgaccgtcaaaaccgcgttctgattaagccggctcttggccaggacaaccatgacttcgccttcgggatcacaatacttctgggcgttgtcgatcaagatgttgaccagttccaacaggctgcgctgttcggcgttgatgtagagatccggatcgatgctgaccacatactttttattatccttagccagaacagatttgaaggaatccgcagattccttggtaatttctgagaaattgacctttgacaagaccagttcttccggctcgctcatccgggtcaaagtgatcagctggttgatcaaaccggtcatccgcaccacctgctctttggtgctttcattccattcatcatcattacccagcagctcttccatttcagcgttagcgctgattacggccagaggtgtcttcagctcgtgaccggcattggtgataaaacgccgctgtttgtcgtaggcatccctgattggctggattgccttgtcagcaagcagggccataatgatgacaaaaaccaaaatcccaccgaaggtgaaaatcaaggcatatctcaccagcaaaagcgctgactgcatcaaaggactcaagtcaataaagcagatatagtacttgttggcggaaatctttttagccaagtagcggaagcggactccatcagagtggatcgtccccctcaactggccagctgacaggcgcatggagatctgttttttccggctggaaaccgagttgatcgaatagccgatgatgtggtccgcgtcaattacggtcaaagtctgttttttcgtattgatgttggccgtgaagtagcggtacttgaagatcccttccttattatactgatcgcctagccgctttttggcttgaacctcgtccagtcggccgttatttttaacaataatggataggacttggtcagcttcatggctggattcaaaaaggctgataccgatcaagctggagaaagagaaaaacatgaccaaaaaaagcgatagcgtcgccagccagataaagcgccgcctgatttttttaatcatgatcaggccctctcaaggcagaactcgccgcccttctcgccggaaatctggacatttgccccgattgaggccaacttggaccgaaggaaggagatgtatacccaaaccacgtcttcgctttcatcttcattcttccaaacatggttgaatagttcttccgtgctgatggccttgccaggattgagcaagaagtagcgcatcaagccggtttcctgcttggacagcctgatggagttgttgctggacagctcttgggagttgaggtccagcttaaggttgtcgtagttcagttcttgagtgctgttgtaatcctcgcttcggcgctcttttgaccgtaggcgggccagcagttcctttaaggagaacggcttagtcaagtagtcgtcagcaccaacatctaagcctgttaccttgtcgtcgatttcagacttggccgtcaacatcataatgtaagttttgtctccagtagcgcggatttccttgaccgcgtccaggccatttttgacgggcatcattatgtccatgatgatgacgtcgtagggatgctttttgacagcatcaacggcttcttgtccgttaaaaactgagtcgacatcgtagccgcttttttgcatggcgaccgtcaaaactctgttcaattgtgcttcgtcttcagctaaaagaattttcatagttacccttccttgatcagttggcgaattgtttgcatacttacatcgcaagatgccagttcgtcagcaacccgcttgagttccttgctgatacgttcaggattcttgatgtcatgcttgtacttcatttcgtgttcaagactggcccaagtgtccatggcaattgtccgcagctggatttcaacgtagtagatgccaggcttgttgccatggacgtcttcaaagggagtgactacttccatgatcaagtggtatgaccggtagccgtttggcttggcatcggtaatgtagtctttttcattaatgatcttgaagttgtcctgcttcttcaacaagtcaatgcaagtgtagatatcgtcaataaagttgcagacgattctgaggccgatcgcatcccggttttcgatcaatgcagactctggcgtcagcggtagaccttttctttcgcacttttgcgtcatgctttcttcgcctttgacgcgaccttccaggtgcccatatagcttttgcccgtgttttgcactatactcctgaccgatgccttggatttgctgcaaaacagaatccaggatctgtggaagataatcggcgtacttaccgtaaatgctcatgtttgttcctcactccttctctattacttctactctaccaaagatccttgaaatttgcttgtgctttaactgaaacttatgatcatccccgcatatgtgggagaatacacagtacgaaaaacacaatagcataaagaacggat

SEQ ID NO: 2253 - DNA, 1519 bp, Unknown
  gut microbiota DNA sequence
ccatatcgttggagatggcatagtcattaactttttggccattgaccataatgcatacgttagacttccggctgctaacatcaataccgaaaacagttttcaatgaattcataataataaacctccactttacttggagatgagctgcctccacctaattcaatcagatctaattttctcaaccggactttaacagccaacatacttagacgagattctcaattgaatggtgaagctgccagtttttggtaagacatctagtgtccaagaactccacggcattggcttcatttccactttaaatagtaaaagaaaaagtgttgaacgattactccgtcgagtaatcattcaacactagattagtatgtttttggtgtgggaagtttaagtagtcaaaaaacgccgccctggctggggcggcgtcttgagagtagtaattcttcgcgattttgagatatgttaactttgtacttaacgttttcgagttgtggagagtttagagcagctggtagcgactcgcatcccgctttttaacttgctcttttttaatcaatttggcaaacatccgggagatagtttctggcgttgtgcccaggtaggcagccaggtccttcaaggccagcggcagggtgatcgtgtcgctaccttcagctagggccaggtcgcttaagtagctgtacaagcggtcttccgtccggctgagggagaggtaagccacagatcgatgctgctaaggaaaatgtaaatagcagtcaagcagcttatgatgaagctactgccaaggtggcgaaggtcaagaaggtcaaccagcaattgtccaaagcttaccaggcttatcagaaatctctgaaatcttcgcgcaagaagaaataatagtgttgtgatgatttaggtaaatttagattatgctattaaagtatgattccgatattagattggagttatgctttttggtatcgtcttaagttgtgcgccactcttgggatgaagcggtcgcaatacatggatgatttatttgcgaaaaagtaatttgacaaacaggactgttggatcaaaaataaggggtgtctaattatcaaataatgcgtgaaaggaaagaatcatgggtaataaactgaaagccatcagcaagatttctgttgccttggctcttttgggggctgctgtacctgcagtagaagccgcaccaactgccatggccgcgaaaaaggccaccaagaaggctaagaaatctacaaagaaagttgtcaagaagagtactaaaaaggcgaaaaaagccaaaaagactactaagaagaaggctactaagaaagtagtcaagaaaactgctgccaagaagccagcaaagaagtcagttaagaagacgactaaaaagtcggtgaagaaggtgaccaagaagcctgttgccaaaaagtcggtgaagaaggcagtcaagaagcctgttgccaaaaagccggtgaagaaggcagtcaagaagcctgctgctaagaagccggtgaagaaggtagtcaagaaggct

SEQ ID NO: 2254 - DNA, 289 bp, Unknown
  gut microbiota DNA sequence
aggtttgtcaaagtggattcattttggacaagcaaggcatgccacgactgcggatacatcaacaaagatctcaaagttggtcagaaagaatggcagtgtccaagttgcaagaagacggtagacagggatttaaacgcagcaagaaacatattagattgggggattcatccagagcatcacgcaaagctgaagaaaacggccgaagaaggaaaaaatcttagcccttcgtcactggtgacggaagtctaagattaaagcactaaaaacagcccgggcgaaacggaacaat

SEQ ID NO: 2255 - DNA, 2028 bp, Unknown
  gut microbiota DNA sequence
cctcttcaatctcgtttaatagtgcttttgcatcctcggttacctttgcccctttggcagcatactcaagcaggctctgtttggcgttttgcgcctctctcacggccgttgcatcccttagggtagatcgataaaccttagtattaaattgctctgctacctcatttaaagcctctgtgatcgccttgcttaggttagtgcgggggttatatctgtttagcacaatgccacagattgaaaggcggggattagagcgccgctgtattgccttgacacgctgggcaagggttgccatgcctttaaagctgtaaatgtccgcctgcacggggatgatgagcttatccgccgccgtcaatgcattgctgacaatgacgtttaagcttggcggggtgtcaatgactatcaaatcataatcatctttgaccgcctctagcttgtcagacaagataaactgagcatctagcacgcccgctagctctacctcgacacgctctaaagtgagggatgccgggactagatcaagattcaagtatccactaacgggtgtagccacagccgggacttgcacgctctcgctggtcaataactcatagctcgttttgctgggatcgtaatcgctgaccaaactataagatgcatccccttgctggtcaagatccactagtagcaccctctcgcctcttagagcctcgcctgtcgctagtaacagggcaagggtagttttacccgccccgcctttttgagtggttacagttactatttttgctattttagacaccttatataaagactaatcaaatattgccttgctaatatcggccgttgctgagttgcccagcttgccaatctggtgcaagtaaatgtttgtcgtgtcgccgctcgcatgtctgagcattagttgggtatctctttggctgtgccccagctctaaggacaagatcccggctgtgtgtctcgtgctgtgtgccgtccattttgggtcattaaacccggctttgataaatctagtcttacagatcttgctaatggatcgggtactgagggtctgaccctttgaacggttgctagtgcttgtaaaaagcggctctgtgcatgctgggatatcctttgcatcgatgccacgggtggttaaatagtcggtcaagacagtgtaaacgtgatccggcaacggtacatagtcgctcgcatcggccttccccttgccttgcactaaaagcacccgggatgcccctaaaatggttatatccttgaccttagcccgggatgcctcaatcgtccgtaagccacaggtaaagagcaaaactaacagcgcataatcccgcttcccggcctgtgtggtctggtcgatctggtctagtatctctttgacctgagccgcctcaaaatagcctttagggctcttacggttgaccttgcccgacttgacgtactgggcaatgttgggatatttgccgatgctctcaagccatttaaaccattgcttgatcgctaccatgtaaaggtgcactgtattaggtttataacctcgcttggtcagatcctctttatagcgtctaatagtgttcgttgtcggttgctgggcgtccggttggtctttaagccacagcttaaagcgcttgatacagcttttataggtcttagccgtgttcggcatgtcttcaagatacagtaaaaagctatcaagggttgccccgtctaaggtttgggcgagcgtgatgtcattggtcatttttgcacccctcttaactatgattactaatcatataatcatatattgactctttacagctattacagcaccttttccgcctatgtgtttatggaattagaacttttttcaattagttcgggatctgctccccctgattttcaaatttctatcccacacgaataaaaccatgggcactgcccaaacccgcaagctgtgtcagcttgaccccataaatgagcgggagctcccgctcaaattcaccccgcactcgccgtgaggcaggcaaaacatactaacctagtgttggatgattactc

SEQ ID NO: 2256 - DNA, 8958 bp, Unknown
  gut microbiota DNA sequence
tccacatcataatcattaaattattgtttgctttttatcatatttgccgccatttcctggaaagagaccacaaaaaaagcatttgccgcggatctttctttggcaaatgctaattaaatattagttgttttcatttcgttttcaatgcactttagccttggtggctcttgatgtaagctaccgcgtcagcgactgtgataatcttagcagcgtcttcatcaggaatttcagcgccgaattcgtcttccagctgcatgatgaattctaccaagtcgatggagtcagcgtccagatccttggtaaagttagtgtccatagtgattttgtccttgtccagctggaagttgtcagcgatcaaagtggcaatcttgtcaaaaatttctgcttcagtcattattctttctcctataatttctaactgcccgcttgcttgggctattttctttttattatccttacttgctgaattcttgcttaaaggtatttgttaagtcttcagtcaaaatcttgtcgatctgcttaaccgcgtagtagacggcccgggcgtctgaccggccatgctgcttgacgactggtgagtttaagccgagcaaaaccgccccgccatacttggccgtgtcaaagcggctggctacagacttcaaggcgtctttagccagcagggcccccagcttggccttaacaccattgttcaaaaggccatctttcagcatgtggatgatgacgctggctgttccttcgatgctctttaagaccgcgttgccggtaaaaccatctgtgaccacaacgtcggccttcccttgcaagagttcgtgcccttcaatgttgccggtgaagttcagggagctgtcctgcaagagctggtagacttccttgtgcaggtcgtcgcccttgtcaaattcagccccattgtttaaaagagctactcttggcttggaaacgccacggaccttttccgcatagtaggaggccatttccgcccattgcagcaggtattccggcttgctagtagcattagcgccaacgtcaatgatgttgaagccgtcatctgaagattcaactggcatggtcggcatgaggcctggccgggccacgcccttgatccggccgacaatgaagatcccgcaggttaacagggccccggtattgcctagtgacagcaaagcgtctgccttgccttccttgacccagttagctgccacgaccatggaagaatccttcttggtccgcatggccttgactggctcatcttcatcaagaataacttccgtggtggccacgatttcgatctggtcatcgcctgctggcagcagctctttcagcttgccttcatcgccgaagaagataaacttgtcttccggcagttcaggcttggcctttaaaactgcttctacaatcgcctcaggagcgttttccccgcccatggcgtcaatcgcgatttttctcatcaataatctctttttctatattggactaatctctcgcttgtacgattttcttatattttatcacagcttgcaggtctgccaacttttctgctttcaggtccggatcagcctgaacgatccgcttggcctcatccctggctaccaccatgacctggtagtcgctgacaacgctgcccgtcctaaattccggcaggcctgactgagccttgccaaagaggtcaccctcgccccgcatcttgaggtcttcttcggcgagcttaaagccgtcgttagtttcagccacgatcttcattcgctgcttgccggcttctgtcttcgggtcagctaaaaagacgcagtagctttgcgtctgcccccggccgatccggccacgcagctggtggagctggcttaagccaaagcggtcagcgtcaaagatgaccatcaagttggcattggccacgtcaacgccaacttcaatcacgctggtagtaaccagaatatcgacctcccctgccgcaaagcggtccatgatctgctctttgtcagctgccgccattttcccatgcaaaaggacaacttcctggtctggaaattcgccggccagcctgtcgtgcagggcttcagcattttccaggtcaatcgtttccgactcactgatcaagggcgtaaccgcataaatctggaagccttccgccagttgctggcgcatcaatgaatacacctcatctagctggctgctggtcttccagtaggatttaatcggcttacggccggctggcaggtgtctgatttctgacaaggcggtgtcgccataaacagtcaaggccaatgaacggggaatcggggtcgccgtcatggccaggatatccggccggtcccccttgttgatcaaggccaggcgctggacaacgccaaaacggtgctgctcgtcgataataaccaggcccagctttttaaaggccacttgctcttggatcaaggcatgggtgccgatcaccacattgatgctgccatcagccagctccttgtagatttcccgccgctccatggttttagttgatcccgttaagagggccacccggacgccgaaatcttccagcatggcgaaaattttgtgatagtgctggttggccagaatttcagttggcaccatcaaggcggcctggtagccagctgtcactgccccgtaaatggcaaacacggccactacggttttcccggacccaacgtccccctgaagaaggcgctgcatctgctggtcaacaaacatatcggcaaaaatctcattaatcacctttttctggtcaggagacagggcaaaaggcagagacttggtcagcttgccgatttcttccaggtcgtaatgcttggcataaccactgtggctcttattttggctggacatcaaggccagctgcatttgaaagaggaagaattcccgaaaaacagcgcttcggcgggcctccttagcctcagccaggtctttagggtggtgcatggcgatgaccaggtcctggtcagccatgagccggtagtgcttccgcaagtcctctggcacagcattgcctatctcatccatgctttcggcaatcgccaggtcgatcatggtctgcagcttcttttgcttgatctgccggttgaccgaataaatcggcgccatcccgtcatcactatttttattggctaagagcttataagctgacaggctctgctttctcaggtcatatttgccatagacgacgatttcctggcccacgctcagctgcttggtcagccatggctggttaaaaaaattgaccatgataatatcatgatcaattcgcagtttgaagctgacccggctcttgtggtagccaaagtaattctggtaggggttggtggccacgatccccttcagcatgaccttctgtccgtcctccagctggtccagcggtaggttctccagttcgtcatagcggtaagggaagtagaagagcaagtcgtagatgctgtaaatgcccagcgactgcaaagcttctgccgtcttggcccccacgcccttcaaggccgtcaccggtctgaaaatagcttcgtttaaagtcattattctacagaaatcaagaagttgtaaactggctggccaccgtcgtgaatttcgaattcgcagtcatcatcttcgtgagctgcttccaggcggtcaacaactgcctgagcttcttcttcagtagcatcgctgccgtacatcacggtcacgatttcagagtcttcatccagcatcttttctgtcatagcgacagttgcgacaattgggtcaacgtcgtcaaccacaatagtgccatcaacgataccaatgaagttgcccttgtggatttcaacgccgttgatttcagtgtcacgggttgcccgggttacttcaccggacttgacagagccaagttcatcagtcatggcttcaacgttcgcatcaacactggcttccgggttgaaggccagcatagcagttaaaccttgctggatagtcttggaaggcacgatgccgactgggatttcagcaacttcagcagcctgcttggcggacatgatgatgttgccgttgtttggcaggatgatcgcctgcttggcgccagacttggtgatggcgtctatgatgtcttgagttgaagggttcatggtttgcccgccggagatgatccggttgaccccttcgctttcaaagagcttgcggacaccgctgccggaagccactgcgatcactgcaaagtcaacgctttcttgttgttcttgctcgttgtcaacgatcgtttcgtgctgaatccgcatgttgtcgatcttgatcttgcccaattggccgaattgtgacccataaaggaagaccttgcctgggtattcagtgtgaacgtgaaccttggcgatttcgccgtcagaaactgctaagagggagtcacccagttctgacaggtagcttctgaattcttccaggtcgaatggcttcttgtttggcacgtcagccttgaggtcaaccatgatttcagtacagtagccgttggcaatgtcggaagttgccagttgcccttgcactgcctggtggtgggtagcgttgatcaaggagttcatgtcgtcagcatctggcacgtacttgtcatcgaagttttcacccaaaaggccttccaggaagccttcatagataaagaccagaccttggccgccggagtcaaccacgccgacttgcttaagaactggcagcaggtcaggagtgctcttcaaagcttccttggcgccttcaacgatcgcctgcattacttcttctacatcatcggtttcatttgccttgttagcacctgcttgagcgccgacccgggccacagtcaagatggtcccctcaaccggcttcatcacagccttgtaggcagtagctacaccattgctaaaggcatttgccaattcctgggcgttcaaagtggtcttgccttgagttgccttgtagaagccgcggaagagctgggaggtgataaccccactgttaccgcgcgcgcccatcagcatccccttagccaggctttcggtcaagtcgccgacactgctgcttgcgttttcggaaacggccttagccccgctttccatcgtgagattcatattcgtgccagtgtcgccgtcaggaactgggaaaacatttagatcattgacgaattgcacgttcttgctcatccggtgagaggcaatccgcaccatgtctctaaattctttactgctaatttcacttaaaaccaatattgaatcctccacttatctagtcgtcgagaacctttacaccttgaacaacgacgttgaccgccttggtgtcgatccccagctggcttcttaagttatatttgacactgtcttgtacattacgacttacttcagaaattttcaagccgtagccaacaataatatagacatcaacagttacttgattttcgtcagacttaacaacgacgccgcgcttgtagtttgcccggctcaaaatgctgtcgactccgtctctgatggcattcttggatgccataccgacaacgccatagttagacgtagctgcaccaccaacaacagttgcaattacaccgtttgaaatatcaatcaaaccatactttgtcttgattttaacagccatgtttatcctccgtcttatttccaatatacacccttattttatcataacgagatcaaaagctaacagttccaactttattttctggaaaatacttttcaaaataataattgaaaaaggtcaaactttatggtaaagtctaatagtatgacatgacatgtaaagggggtttagcagcatggcaaaagatttcgtaaccggtaagaagaccacttttggtaacacgcgttcacacgctttgaactcatcaagtcgttcttggaagccaaaccttcaaaaagttcgcattcttgtaaacggcaagcctaagcgcgtttgggtttcaaccaagactttgaagtctggtaaagttacccgtgtctagtgacgaaacgagcccggtagatcaatgatctgccgggttttatttttgacaaaaattcatcagcaacaaaaacaggcggctcattgagctgcctgttttgttacttctcggctaaattgaccacccggtcaaacatagctatttcttcatctgaaatcttgtgagctacttcgattacggtgccagggaaattctgtagaattgtctggtgaatttgcttggacaagcggggatccagggctgaggtcgcttcatcagccaataacaccggccgcttggccagcagagctctggcgatttccagccgctgcccctgaccgccggacaagtttttgccttcttttccgacttggtagtccagacctttttcctcaatcaagctggttaaaccggctttttgacaaactgccagcaggttttcccggctgacttccctgcctaaagagatattatattcgattgtatcgtcaagaatataaggcttctgctggacaaaggagaagtactcgtggtccttgctccagtcaccattggcgtcttcaccgttgatctcgtaatctccatctgccagcttgatccggccaaccaagacgttaagcaaggttgtcttgccccagccagacggtgcttccagcaagactttttcaccatttttaacagtcaaatcgagattgtttaaaagcttccggtcccctctttgcacacttgcatcgtctaaagagagttccttaaattcatcccggtccgcagcactttcttttgctgtaaaatctgccacgacagtaaacttttcccagatcggattgctggttttaatgtcattgaccgaagaaaagataccgacaatcggattgataaagttgttggccagctgggagatcatcatgaaggtccccaaagtgatctgcccttgagtcacaaagtagatccccaggctgaaaggaatgatcatgctgcagacgtaggcaaaagaagtgatgacttctgtcgtcaccatttccgcctttttcatcttggccagggccgtttccattctctggctgtagtggagcattctactgtaaatactgtcttcagcgtcatagagtctggcaaaagcggcaaaattgatggtgtccgtcattgcctcagtatatttgctgttctccccttcccaggcagaagaagcagcttcaatttttggcccgaaaatattctgcaaaaggccgggagccagggaggcgaccaggaagatcaaggataaagcccaggaagacagcatggctgccgcaaatgccgcgataaactgcaggccattgaaaataatgtccagttcagcttccacccggtgactttccacctgcttcaagtcattagtcataaaggacaggtcaaatttgggattagaattatctgaatacaacaaatattttgttgccagctccttgatcttcaagttgacgtccttaataatattcgcctgcataatttggtagaataaagccaggaaggcaaaaaggacaatacccacaactgctttaatagttaattgtaataaactccccttaggatttccggcaaaattaatgaattcctggaagacataagcgataaaaactgcctgcagtgccttggcggcggcgaagacggcaaagaccagcaacttccacttggtagcatattttaacgtcatttctttcctcctcgttaaataataaagcatttccaaatatgcttaaaataatactactgaaaaattaaaatgtaaatatactattctaattttttaaaaaagctgtatacaaaaagcggctctgaaatagagtcgcttttccaatacttttattgtttatacaattacttttcgttcttcttacgccggccaaaggcgaagagacttgcactggccagcagtgccacaatccctgccaaaaaggcggacttattctggctttcgccggtttgcggcaaagttgcgcttgcttttgccggatccttaacagcagaggttgctggagcagtcttttgaacagggctggctggagcggcttgctttttgccagttgccttggtttcactcttgccagctggaattacgatagtttcggttcccccggagtcagccggactttcacttggttcgtcttcgcttggagtagtcggagtttcgctcggcttgttgtcgcttggagtagtcggagtttcactcggctcgtttgcttcttccaaagcttccaaaatagccaggtgcttcttagcttcagtaagtgccaaatccgctgcttccttggccttagccgcggcagctgaatcagcctgcttgcttgccaagttggcttgcacctcagcttgaacagcctacaagtcagcaagcttcttttctacagcagcctgcttgctttgtgcggtttgtacggcagcgcaggccttctctgcggcttgagcagcttcttctgcggcagcatcaagttctgccaacttagccttttcactggtagcagtcttttctgcttcagccaaaatagcagccttttccgctgcttccttgtttacgctggccagtttgctttgtgctgccttgtctgcggcagaagcttcttctgcagctttttgggcatcagcagtcttttcctgcttagccgcagcaagagtttcatttgccgtagtcaaagctgcttgcttagcagacaggttgctttcggcgcttgcgagttcttgtttggcttgagcaagcttagcgtcagctgccttgagcgcgtcagccttttcatcagccgtcttttgagcggcagaagttgcttcttgcgccttagtcaatttttccttttcaaggcatcattggccactaccttaggtaaagcctggtattcctgctcagcttggcttaccttgccttcttggtcagccaaagctgcttgagcttcatcattagccgtcttggcttcttgcgccttctggctgagtctgccgtcgtttcagctgcacttgcttcatctttttttcgctttattttccatatgactcacctctataaacacacaatagttcgagataatatc

SEQ ID NO: 2257 - DNA, 209 bp, Unknown
  gut microbiota DNA sequence
ccgcacatagctacccagcgatgcctttggcaagacaactggtacaccagcggtgcgtccatcccggtcctctcgtactaaggacagctcctctcaaatttcctacgcccacgacggatagggaccgaactgtctcacgacgttctgaacccagctcgcgtgccgctttaatgggcgaacagcccaacccttgggaccgacttcagccc

SEQ ID NO: 2258 - DNA, 308 bp, Unknown
  gut microbiota DNA sequence
cgcccacgacggatagggaccgaactgtctcacgacgttctgaacccagctcgcgtgccgctttaatgggcgaacagcccaacccttgggaccgacttcagccccaggatgcgacgagccgacatcgaggtgccaaacctccccgtcgatgtgaactcttgggggagataagcctgttatccccagggtagcttttatccgttgagtgatggcccttccatgcggtaccaccagatcactaagccctactttcgtacctgctcgagttgtctctctcgcagtcaagctcccttttacctttacactct

SEQ ID NO: 2259 - DNA, 7583 bp, Unknown
  gut microbiota DNA sequence
tatgataattttggaccaaaagtagaacctagagaactacaggttagctacattaacgatgagccgacagaagtcttagcaaaggttaacgataaaattaaagatggcggtatcgctggaattatcgttaacacggtaaagagggcacaagaatttgccggcttagttgggcaagattgccagtgcttggttttacattcggcttttctggcaactgaccggtctaggctggaaaaagagttgcagagcttgatcggcaagaaaggaaagcggtcagataaactaatcgtaatcggtactcaagtccttgaacaatcattggatattgactttgatgtcatgtttaccgatattgctccgattgacctgcttttgcaaagagccggccggctgcaccggcataaaatttcccgtcctaaaggattgaaaaaacggcagttgtatgtaatgaagcccgactcggatgattatggaccagccaatgaagctgtttatgagaagtattatctgcaaaagaccgaacactttttgccgcaaaaaattcagcttcctgatgatatttctcgcttggttcaattggtttacgatgaagatactgacgaccaagtcgaaaatttggatgaggcacgtgacaaattgaatgtggaccgtaatcgcgagaagagcaaggcagaaagcttccagatcaacgatcctgtttaccccgcagccaagaacgatctttacgatgatacgtgggttgaagagctaactattcatcgctggttggaccgtgataaaggaaatctcgacgataatcaagcttccgcggctgttcgtgatattcgggaaagcattgaagttatcttacttaaagaaatttcgggcgaatattacctaatgaatggcgataaggtttctgaaatggtggataaggatttagctaaagaattgattcgtttgcctaacgcggtaactccaaatattgaacaggcaatcaatattttggaagaaaatactgcccgggcatttccagattggcagggcagtccatggctgaaggggtccttggcagttgtgcttgatgagcatgcaaagggaagctttaacggctataagctaaggtattcgactgagactggcttgagttatgaaaaggaggttgataattaaccatggaaagctataacttaataactgaaccttggattaaggtattggatggtaagaccaactctgagcatatggtttccatcaaagaacttttgcaaaatgcaagtgattaccggcaattagctggtgaaatgcatgcacaggatttagcaattttgcgcttgctggaagcaatcttgacaactgtttataccagggttgatcaaaatgatgaagaatatgagtgggtgacgcttgacgagcagatgcacgttcagtcctatgacgatgaaatcgaaggctcaacgttattacaggttcttacgaagacatggaatgcgctttataaggaaggcagtttttctgaagctgtgtttgattatttagacaagaacaaaggacttttcgacttctttggtgaccggccattttatcaagtgactgctgaacaatacgacagttttgttccggataataaaaaaattgctaaaggatccgggacggttgatttaatgcagatcaatcgcttgatttctcaaagtggtaactccgtggcaatttttgcaccaaaaagcgcaaatcggaagaataagctcactttggatgaactggttcgctgggtaattacttatcagaactttactggcgtaactgacaagaccaaagtcaaggcaaaggaaaaaatgtctaattcccggggctggctgtatactcttaatcctgtttatgcacaagggaagaatctgtttgagactttgatgttgaatctgttgctgtttaacccaaataagccagcctacactcaacaacggcccgtatgggaagaagatttgggtgaatacgtcaagagacgtttgtcgcaagttaagccggacaactttgctgaaacttatactgtttggtcaagattgctgcatatcgaatggcaggatggtacaccaacaattttcggtgctggcttgcctgcttttgatagcgccaatgcgtacgatattgaaccaatgagtacctggcggatgaataaaaaagatgagaattattatccagcaaccaggcagttaagcagtatcggcattgccatgtggcggaatttcggccaatatgttgatatcgaaggccataccgaatctagagagccactgactgtagcttggctgaattacttgaaaaccaagaataaactcttgaatcagcaaatgatcaacctgcatacttctggaattatcagtaatggtggggcgacttcgctaatgccggcggctgaattcgatgacaatttacggattgaagccgatgttttgttcgatgaaactgaggaccgtaaaaatgcctggccgcagagaatcgaagaaatggttgacttaaaccaggaagttggccggaagtattacggctttttgatggaagtcggcagaattcgctttggcccacaaggtgctgctgattttgctggcagaaagagtcaaactttctacgataatttgaacgagccttttgaaaattggctggccaacttgtctggtggggatgaccgtgataagcagcaggagctttggaagaagcaactgaagcaaattgccttaaggactctggatgacttcttggaaattatcgctccgcgcgatatttccgggattaaggccgataagagccaaagtggaacaaagagtactgaaagtaacatctttattgcggctaacaagtatcgggccggaattaacaaagcattgaacaagaacgagaaatagaagggaaaggtgatcgtgatggcatttgagattgagaaggctaccgaacggatcatccgccagctgtacaataatggcaatactgacaaggcgtcattggcagctttgcggtcagctgcaacaattgacggctaccgggcccaaaaagtctggccagtctttttgagcaatcttgatgagcagtggttaagcaaaaatggtaaagcgactagagaggaagcagcaattttcgcggcggtaagaatgtatgccctgcatcagcaagcttcagactcttgcgtttttggccggagaaactattctgataagaaggatgaggagacaaacagccgtgaattgtttgaagccttgaatcggctcaagcaagggactgattctcatgaagccctggaccggcgggtacaggctttgctggggacgaataattacaatgcagtaattgatcagttggtccacttaatgcaaatcattaagagtaaaaagaccggaattaagattgactacgcccgtttagctggtgacttgtacaagttccagtttggttaccgtcaggcaaacgaagtccgcttgcgttggggtgagcagtactatcgtgcttttaaaaagtcagacactaatcagcaataatttaaggagaaaaaatcatgactaagaatttatacgtcgacatcaacgttttgcaaactgttccatcttcaaacatcaaccgtgacgacactggtgcaccaaagactgccttttacggcggcgttacccgggcccgggtgtcatcccagtcctggaagcgggcagcaagaaaggctttagctgaagatggagcaagcattggcacccggaccaagcgggtaccgcaaatgctggctgctaagctgcaagatctcgatgcaagtcttgatgaggatgctgctatgagcaaggcaattgatgctttgaaggaaggcggaatcaagacaaacaaggacaatgaaactggtgctttgttgatggtcagcccgggtcaagttgccaagcttgccagctacgttttagagaatgaaacgcttgacaagaaagaagttaagaagatcttgatggaaggcaattcacttgacctggcattgtttggccggatggttgccgacaacccggaacttaatgttgacgcgtctgcacaagtagcccacgcaatctccactcatgaaatcattccagagtatgactacttcactgccttggacgacctgcaagaaaaggagaagagcggcgctgctttgattcagaccacccaatatgactcagcaactctgtaccgttacgccaacatcaatatggctgagctgagctacaacttgggtgatgaagacgcaatcgaaggtgctttgacctttgttaaggactttgccctgtccatgccaactggcaagcaaaattcttttgccaacaagactttgcctaactatttgatggtaactgtccgtgacgacactccagttaacttagtttctgcttttgaaagtccagtagttgccaaggcaggcgaaggttacgtggagaattctgtcaagaagctggaaaatgaatacaaagacgcactgcagtttgttgaccaaccgctggcaaccgtagctgttggcaagtacgaaacgactgtcggagaacaagccggaaacttgcaagatttgctggataagctgcaggacgtcttaaagaaggcggttgaaaatgaagactttaacaattaagctgacggcaccactgcaggcttatgggaatgaagcgagctttgagcggcggaccagctggcctgcaccatcaaaaagcgcggtagttgggatgattgctgctgctttagggatgcggcgtgaagatgaacggatcaagtctctgaatggcttggcatacgcggttagagttgaccagattggcaagacaatgacggaattccagactgtcgagtggaagccgggaacccgcaagctgacttaccgtgaccattatcaagacgcagtttacgtggcagcggtcggcagtgaagatgaagagctgatcgggaaaatcgagtatgccttgaaacaccctcgcttccagctttatcttggccgccgggcttgtccgccggccggcgttttgcggattgaaagttttgcggatacggatccagttaatgtgctaaaaaatatgccttggcaggcagaaaagtggtatcaaaataaacacaagcggaaggcagagtttatggctgaaattattgctgacgcgaatttattgccagatgctgcttttacacaaaccgtaaaagaccgggtggagagctttgatccgcaaaaccggtgcttcggctttcgtttgacggctaaggaaagaattaatttgaaaaatccgtgttacgagcagaaatctcaagacattatggactatctgtaaaggaggaacgggatgtatttatcaagagttgagatcgatactgacaatcggcagaaaatcaaagacttgtcccatctcggagcttaccataactgggttgagcggtcttttccagcagaaattgccgaaggtgaacggcagcggcacttgtggcggcttgatacgttaaatagcagaaattacctgcttctgttgagtccggaaaagccagacttgcatgagtttgaaagatatggcaagccaggcacggccatcagcaaagactatgaaccgtttttgagcagattgagtgaggggcagctgctgcagttcaaattgacagctaatcctgtccgccgcggcggcaagagcagttcccatccgggaagcttgattccctgctttgctgttgatgaacagatgaagtggctgcaaggcaaagcagagaaaaacggttttgagcttgtagcagcagaagtggtcgggcatgaccggccacttctgcgcaaaaagacccatgtggcattgaacagaactgtttttgaaggccggctgaaaatcagtaacttagatcaattcaaagcaatgctgacttctggcattggccgggaaaaggcttttggcatgggcttgatgactgtcattccggttgactaaaaatgaaagtagaagcaagctacaagaagcctgatttgacagaattaggccggactgaggacagaatcacatttctatacatagaacatgccaagctttaccgcaaagatggtgcagtagaagttagagatgaagaaggcattgtttatgttcccgcggctatcatcagcgtcttattgctagggcctggtgttgatgtgacacaccgggcgatggaactgatgggagattctggcatggcggtggtctgggttggtgagcagggagtaaggcaatatgctcatggccgggcacttaaccggtcgtcaaggctcttggaagcacaagctaaattggtgtccaatgtccgttcacgggttgcagtagctagaaaaatgtatcaactgcgatttcctgatggagacgtcactaagctgacaatggaagagatgcgcgggaaagaaggcgctagagttcgccgcgtttatcgtgaacaagccaagaagaccggggtaaagtggtcaaagagagaatacaaagtagatgattttgaatcggaaactccgattaacaaagcattgactgctgcccaccaagctttatacggcttgagctatagtgtaatcgttgctttgggtgcctctccaggattgggatttattcatacggggcacgacttggcctttgtctatgactttgcggatttgtacaaagctgacatttctattccgattgcttttgaaacggtagcgaagtacggagatgatgacatcgccagccggactaggcatgcaatgcgggacaagtttcgggagaccaagctgatcaagcagatggttgtggatctgaagcacttactgttaggggatgctgaccaagatcaagacatagatgtcatgaatctttgggatgataaattagggctgcaaaaatttggtgtgcagtaccatgagcaacaaagtgatgaagaatgatagtcataaccttaactaaaactcctcccgctcttaggggggatttgaccagatggtgccaggaaattcagactggagtctatgttggcgatgtcagtgccaggattagagacaaattgtgggagagagttcaaaccaacatcggtaatggtgaagcaactctcgtatataacaccaataacgagcaggggtatgcttttaagacaacccgcaagtccaaggaggtagttgacttggacgggatgctttttgtcaagcatgttgtcaaccaggaaactgtagaatatggatttagcaatgcggcaaagtttcataaggcgcataaagctgagagaatgagagcttcggtcgctgctacaaagcaaaaagactttgttgcggtcgatattgaaacgacaggactgaatacggaaagtgatcagattttgtctattggcgcggtgaaacacgatggtacagaattctaccgactgatcaagcaagatgttgatgtgccaaaacagatagtggagctgaccgggataactccagcaatgctggataaggaaggcgttccactgaaagaggttttgggagaactaactgactttgttggggatgtgccaattgttgggtataattttagattcgattctgcatttttgaatagggaatatcggaaatgcgggatgcaagaattgaaaaatgagatcaaggatttgctgccagttgt

SEQ ID NO: 2260 - DNA, 3257 bp, Unknown
  gut microbiota DNA sequence
aagtgctccacgccttaggccagccgcagtagaaagccagctgagtaacaatctccactgcttcttccttggtgatcccatgctttttgcctagctccaagtggctcttcaattgcgggtacaagcctgcggaaaacagcgccgcaatagtaatcatgctccggtctctagccgacaatttgtcttctcttgcccaaacttccccgaataaaacgtcatcgttcagctccgcgaacttcggtgccaacttgcccaagtaatcgcggcctgcagtttgtttttctgccatttttatcacccaatgcctttttttaaaaaattacttgtctgccacgaccagcaatgacttaattgcttgacgttgatccatcgcttcatatgcgtcttgcagatgatcaaggtcaaaactcttagtgaagaccttacctgggtggatttcgcccttcaaaacagcgtccagcaagacttcctggtcgtaagtagtgacgttagcgatcccgccgcgccagccgacattcttccagaagaacttgttggtttcaggttccttttgcggaacccctacccggccgacaatcgcgccagcacgggcgatctgaccagcctgatcgatagagctacttgccccaacgcattccaaaacagcatcagcaccgtagccgtcagtcagttccaaaaccttctttaccgcgtcttcaccacgttcactgacgatgtcagttgcaccgaattccttgcccaaggctgcccggtcttcgtggtggctaagcagaatgatcttttcagcaccgagcagcttagccgcgataaccccgcacaaaccaactgcgccgtcaccaataactgctactgcatcccccggcttaacttccgcgctagccgcagcatggtagccagttgccataacgtctgacaaagtcaacaggtcattcagttgctcttcagtgtagtcgcttggctggccagggatttttaccaaggcgctggcattcttaaaacgcagcttttcagattggtaacccttgttgccgccaacttccacgtttggacagttgccgtcaaaaccagccttgcagatcttgcacttcatgcagccgtgggtgaacggagcgataacgaaatcgccgaccttgacattgtcaaccttgtcaccgactgcttctacgatcccgatggcttcgtggccaactgtgccttccggccggtcagaaatgcctctgaaccaccacaggtctgatccgcagacgcaagctctaattacgcggataaccgcgtcggtgtcttgttcaattgttgcgtcttcaacttcccgggcttcaaccaggccctttttaacgaaatatgctgctttcatttttctcgctttctgtgtaaaaatccgctaacgttctttaataattattgtagcctttagctataattttggcgaatacttagcttgtatattggtatacgtgagatctatagtcccttagatcgcaaaaccgcatcccatgaacgggatgcggtttgttagtatggagtttgattaaactacagattagttgctttccttggttccgatgacaatgaccttatcaaccggatttttaacctcgagttcagcacctgcttggacatatcccgttttttcatctaaatagtaaggcatgatacttttagttgagccattttccccgcctgtaactatcgtagtcccctttggcagattaggatcatacttctgaatcgttttataaggcgtaactttgtattcttagtaccaacagaaactacttgatcaatctttctttggagctcatctaccgtgagaccgtaggtaggtctgatagtggaattcgagaatatgcaccgctgttcttatcttccgggtgaggttctaacccaataattgttatggacttcttgtccggcccatagacacaatacattcgcattgctccactagtttttagttcgagtcctatacaaatcatctagaaaactaaagaaagtttgatgatccatgggtataatttagctactgtgtagctgaattgatataatattgaataatatcaaaagaataccgaaaggaacacatcatgaagatcgcagtaatgggttacagtggctctggaaagtcaactctatcccgcaagttaggtgaattgtaccaagttcccgtttttcacttggatagcgtccaatttttgccaaactggaaaacgagatcaacggaagaacaaggcaagatcgtccaaacttttcttaacgataatcctagcggctgggtcatcgatggaaactacaacaagctcagctatgaacgcagaatcattgaagcggacatcatcatccaactcttattcagtagaaaagactgcctgcttcgctgcatcaaccgctatcgtacctacaaaggaaagacccggcctgatatggcagtaggctgcgatgaaaaattggattttgacttcatcaagtggattctttgggatggccgatcaaaaaatatccaagaccgatatgtccgagtccagaacgaatatcccagcaaagtggtcgttctctgtaatcagcagcaacttaacggatatctacaaaatctaaaagactagcaacaaatcgacttattcagcatccagtcctaatgcggcttctgcttgatccttattgagattcatggacagcatcagatactcaactgcatgcttattttgctctgcctttgctttggcaattctttttgctgtatgttgggtaaatacttcattcatgcttgtgctgctatttggttcttcattagagagttcttcaatggcttcttgcaagtcatcccctccgcccatggtcatgattgaatccagaacagaaaccatttcttcgttgctcaacttattatcgctaaatttatcgtctgtttcctttaattgccctaaatcagcaattacctgtttgcatctttctagcgaagctggcgtgtatcctaatgccttcattgcttcttcttcagacaaattcctcgattccatcaaagcctggagcaaatgtagcttattccttgctcgagcaacgtcaacccgtactttagtaaagtcgttgaccagctcatcttctttagtcgtcttgccaacaatctcatacagttcatccagactatccatcaaaatcatcatttttccttcttcctacccaagcagttgttcgatcacttccagagtctcttgatacagatcgttgtaactcaaaatcccgctctgcagcatatctgccaa

SEQ ID NO: 2261 - DNA, 342 bp, Unknown
  gut microbiota DNA sequence
ttgccttccggcaatgacccgtacgggatttgaacccatgttaccgccgtgaaagggcggtgtcttaaccacttgaccaacgggccagatggaggatacagggctcgaacctgtgaccctctgcttgtaaggcagatgctctcccagctgagctaatcctccaatgcacccagtaggacttgaacctacaaccttctgattcgtagtcagacactctatccagttgcgctatgggtgcatctgttcaattaagcatcgcttgatgctaagcggaagacgggattcgaacccgcgacccccaccatggcaaggtgatgttctaccactgaactacttccgcat

SEQ ID NO: 2262 - DNA, 1351 bp, Unknown
  gut microbiota DNA sequence
tgaatagcttgttcaagctcatttaagtccttgtatttatgttcttggccgtagaacatctcccgcttaagaatgccgaagaagccctccattaagccgtcatcaagagaattacccaacctggacatactctgatcgatccctctgttagccagaacggcttgatatgcttggtgctgatattgccagccacggtctgagtggaaaataagcccgttaagagccgggtgcttctcaaatgcgtcatctagcatggtcatcacttgcttaaggtctgggtacctagaaatgttgtaggagatgatttcttgggtacaaccatcgataattggagaaaggtagagcttttgatctttaagatggaattcagtcacgtcggtaaaccattgtctgttgggaataattgcgtagaaattgcgcttgattaagtctggcttgattttgccttgaacgccgtaatagctgctgtatttacgtctcttgcggattgagatgccgaataaacccatcttttgcgtgagcctctgcaccttcttatgattgatctcatagccttcacggcgaagctgtccatagattcgctggtacccatagcgctggctgtgttcatgatagatctctttgattctatccatcagcttctggttaccagaatccttatctggcttatgggtctgatagtaatagttacttcttgagatatgaggcaatccaggattggcattgataacgtcgataatgtacttaacgctaagccgcaattcttgccttaattcagtgattgcacgagctaattcttcttttcttggctcttccgttcttgaattaaggcctccaattttttatgtatgcaagctcgactgtaagcctctttacctgctcttccaattctttgatccgctgtttgtccttgcttttgggcattcttgcgtggtctacctttcttcttggtaatgacagtatacccgttttctttgaaagagcgaagccaatttgcaagaattccatgattcgtgagtcctaagtctagagaaacctgtctaagtgcttcaccgcctagcagaactctatcaatggcagcaagcttgaaatcagcagtatatttctgctgagggcgatccaagataccttctccatgcctttgaagtaaggccaccatatatgcaatttctcctggcctcatcccatatttccggctaaggtaggcacctcttctgtcatcgtctacccattcgtggtagatagcaagtttgatttctttagtgtatttagtcatgaaaataacccccgaaattagtgtcctaattttaggggtcatatcaaaattttagaagtggttaatgattacttt

SEQ ID NO: 2263 - DNA, 16009 bp, Unknown
  gut microbiota DNA sequence
cttctgagcgagtcaaaacgaagacgagatgacattgggcagttgtgaaactaacctaaacactctgagtacttctaagagttgtcgatcttacgtgtaatgtgctgggtggcccccagattcctgcgactttagtcgtaggaggttcaaatttggaaaaaatgtcacaagtctgataaatttctcaaaaagtcagccgaagcgctttcgaaaagccaaattcttctttataataggactagcaaaaagagaacattgaagaaatgaggcaataactttgaagaaatatgcatttggtgttgacattggtggtaccactgtaaagattggtttgtttgaaaccaacggtgaattgtcccaaaagtgggaaatcccaaccagaaaagaaggcaacggggctaagatcctgcctgacatcgcagcttctctgaacgacaagctgaaggaactggacattcctaaggaagaagtagccgggatcggcatcgacgtgccaggtccaatcctggacgacgaaatcgttaaccgctgcgtcaacctgggttggggcgtcttcaacgtggctgaaaaggtccgcaagctgactggcctggacgaagtcaaggtagccaacgacgccaacgctgctgctttgggtgaaatgtggcaaggtggtggtgaaagccaccaaaacgttgtcatggttaccctgggtaccggtgtcggcggcgggatcatctctgaaggaaagatcgtcgctggtgcctttggggctgccggggaaatcggccacatgctggtcaacaaggatgaaacccagctctgcggctgtggtaagaagggccacctggaacaatacgcttccgctactggcattgcccgcaaggccgaggaacttctggctgaaagcagtgaagaatcaagcctgcgcggggtaggccagcttgacgccaaggcagtctttgacgcggctaaggaaggcgacaagctggctttggaaatcgtggactttgtcggcgaaactttgggcactgccctggcttccatctcctgcgtctttgacccagaagtctacgttatcggcggcggggtctccaaggctggccaaatcttgcttgacactgtgcaaaagcacttcgttgacgcggccttccacgcttctgaaggtactgaattcgccctggcccaactgggcaacgatgccggtatgtacggtgccgttaagatggttctgtaattgtgaatatagaaaaagcaccagacttttaaagtctggtgcttattttgtttattctaaagagtccagggttgccttcatcgtcgcggctgaggcctgcatcttggccaattcgctgtcatttaacggcaattccagcacgtggctgattccttgcccgttgatgatggccagggtgcccagatagatctcatccttgatcccgtattcgccgtgcaatggcgcggaaagaggcagggccaggtcgttgttttccaaaatggccgccacgatcttggccagcatcatggccacgccatagtaggtcgcgccctttttgccgatgatctcgccgcccttttcccggacgtgggcttcaatctcatccaaggctgcttctgtcatgcccggatagtcaagcaagggcttgccgttgaccacggcacttgagaagttctcaaagctgctgtcgccatgttcacccagaacccaggcgttgactgattcaattggcacttgcagccgcttggccagttctacccgcaaacgagctgagtccagggaagtcccggtcccgatgacccgcttctttgggaagccggacagcttctgggtcaaagtggtcaagatgtcaaccgggttggcggaaacgacgaagatgccgctgaagccggaagctacgactggatcaacgatgctccgcaagatggcttcattcttcttgatcaagtcaagccggctttcacctggcttgcggggcacgccagccgtgataactaccacgtcggcgtcagccgcgtcgctgtagtcaccagctctcagcttggtctggcccgtaaagtaggtcaggtcttccaggtccaggcagtcgcccgcggcccggtctttattcaagtcgcagatgaccagttcatccacccgcgttgtttgcaataaatcgttggcaaagttggaaccgacagcaccgtcgccaaccagcaggacttttctactcattatttaatcctccttcaaggaaattagctaaccatattataactgaattagctggaaaatttcccggaaaataaaaaacgcggcccagaggactgcgtttcttagaaatgtgatgtgatgtgataaaacttaagcttgctacgacaaagtagtttgcttggcggcgcctgttagtgataggagtagaggcgccgcatgtgatgagtaaggaaaaaataagtttgtctgtctgtaagagacaggaaccgaaaaatgttgaaatacatatctgagttcagagccggcccttgcctataaaaaaacaagtaacataatagaaaagcaaaagcatggcaactgggctgctcatgaacctgttaagagctacaccaaccggtggcatgctcggatcgccacctgtcagtagtaccgaaaattataacgactgaaggagaaaaaatgagaaaaataactagccgcataactttcgaagaatatagtactacggtttatgctaataatcaaaaaaatagcttacttttttgattattaaaaaagtgagctatttgtaagcggttggaggaaaatgaaaactgcaaaaaattaagcttgtgacttggtcaactttcagaaaaaacagctagctaaagaaaaacggctccagcagagctgaagccgtgacatggtaaatatttaaatcttgtttttttagtttgcttgttttcttgcttttgtctttccagccttaagctgcccgcttcttggcctggatttccctaaggcctggcaggctgatcatgaccaggaagctgatgatgtagagggtggacaagaagcccataaccacgtacaggttgtagtggtccatcaaggcgccgatgatgacggaagagaagcccccgatggcccggccggtgttcatgatcaagttgttagccgtggaccggatttcagtcgggtagagctggctgattaccgccccgtagccgccaaacatcccgttggagaagaagccggtcaaggctccggctaaaagcatggcccagtagctggtcacgttgacgatggcaaagaccacgaccgcgctgcccaaaaggaagatgccgaaggcccagcgtggaccgatcttgtccatgatcgtcccgaagaccatcatcccaatgctcatcccgatgatagtagcgatcatccagtaagaagatccggaaactgacaggccctgcttcttctgcacgattgacggcagccagttcatcaagccaaagtagccggcaatctgcacgatcgtcatcagcatcaagcccagggtctgcaaagccaggcggggcgtctcaaacaagcggccgaaggagatcttttcactcgtttcttccgccttcttgtgagcggccaaaaattcgtcgctttccttgacgtggcggcggacaaagtaggtcaagacaaccggcactaccccaaagaggaagagggtgttccagccgtaagccggaatgatccaggcggccagaagagcggccatgatagagccgacttggccacccacggccgccaccgagctggcccggccgatttgattagcctggaagttttccgcgatcaaggcaattccgaccccgtattcaccgccggccccgatcccggctaagaagcggagagcgtaaagggcggtgatgttgtgggcaaagtaggttaagccagtcgcgatggcaaaaagaaagatcgtatagctgaaagtcttgacccggccgatacgatctcctagcagcccaaagagcgcgccaccgaagaacattccgaggttggtaaaggttccgatccagccgccggccgcggagctgatgtgcatctgcgcgatgatttccgacagggagaaagacaggaacatgacgtccatgttttccagcaggaagccggaagacatggaggccaaaacccacttttggttagtggacattgagctgatattatccattattaacttgtacctccaaaattaatgctcacggacattacttattttgtattggtaacaattattcgcgtttttcttaagattgtcaagggctcttacaaaacaatcgttatttaattactcagcccggttgctgatggccttcggcagggcaatattgtggtggagattatgccaaagatgctggtcagccagggcaatcatcggcccgttgatcaggaggcaaaggagggtgccgatattgacggcatagactttaagccagttgccaacttctacgctgccggcgaactggttggcggggccaacggcaaggactcaatgccgtcaatgatgaactcctggtcctacgcttccggtttcgtggctggtacggcagctgctgacaattccgacaactacgccgttgacgttgttaccagcaccagtcatgctccggctcctaagccagaagcaacttccggtgccagtcactaatattgctaacaattcacaaattttctcccgggcacaaaataagctatatgaaaatatacactttgccctttttggccgcgggaaccttcttccttacaaaaacttgctaaaaaagcccaagctgatgcttgggctttttcttcttaaacgaacttatattcgttattgtaatgcttccggcagtaggatttgataaattgttcgaatctggttacggccggggtcaggaagtggtcggactttttcacgacaaaaatcgggtgaacgccgacattttcatcaatgtgcaagagcttgaccgtccgcgggtccagctggggcaggtggggcacgatggctaccccgtagccccagtgaacgaagccgatgatggtatggtcttccatggactccatgatgattttcggcttgacgccggcttcagcgaacatcttgtccagacgggggcgcaggccgctgcttttgctatagtagatcatcgggtacttggccaaatcagccagggagacagagtcctttttggctaaaggattggaaaagggaacgacagccagcatttcctggtcaaccagatgggagatgtcgaccttgtcttccaggccaggcaggtcaggagctgaggagatgcccaaatccagttcgtcattgaccagctggttcaccaaatcgtcagtggttccctgtacgaaggagaaagtgatgtctttggtgtctttttcctgcttgaacttgtagatcagctggggaatcaggtcctggcccatggtaaaggtgaagccaaccctgatatgaccccggttgacgtccagcaattcagcaatgtactcgccgccccggtccaggtcgctcaagccgctcttgacgtattccaggtagatcttgccatagttggtcaagcggatgttccggccctctttttcaaacaggggcacgccgagctcttcctcaatgctgctgatggcgtaggagagggaaggctgggagatgcccagcttttcggccgtcttggccatgtgttccgttttcgccagttcgacgaagaaacgtaaatgtcgaatgttcatatttgcctccaaatcatgcacaacaggtttccatacctacagtgtaccgttaatctaaaattaataaaatgcttttatcaataattttgctttgcattatttatcacgaagagtgaaaacgataacataatagtgaattgagaaaaatgtaacttgttgaaaaagcttaaaggagattccagaaatggcagacgaaagaaacaacgagatcgaagaaacgaagcttccaggcgttaacggcccaatcaccggctggcttgacgggcacacgattttggtcggtttgatggcttacccaatccgccacaccatgtcaccaaccatgcacaacaacgcttttgccaagttgggcttgaacggggcttacctttgctttgaaatcgacaacgaaaagcttccaggcgctatcgacgctatccggaccctggacatgcggggttcaaatgtttcaatgcctaacaagaagaaggtcatcccttaccttgacaagctggacaagacttcacaaatgtgtgacgcggtaaacactatcgtcaacgaacacggcgttttgaccggctacaccactgacggcatgggctggctgcgggtcttgaagaaggacggccaaggctttgcgggacgtagttggcgaactgccaatcctggttactttcagaaccaagaacgaaggcggcgtcctggaacttggtgaagatgaatacctggacctggtagctactgtagtaaccaaccgtttgggtgacgcggtcgacatcgaacttttccacgatgaagaaagagtcaaggacctggttaagcaggcccacaactacaacgtggtcgtgatcatgagcaaccacgactttgaaaaggtgccagctaaggatgttatcgaattccgtttgaagaagatggctgacttgggcgctgacgtgccaaagctggcctgcatgccgcacagcgctgacgacgttttgaccctgttgagcgcgactaacgacgcccgcaaggcactttccacgccaatcatcaccatggcaatggctgacttgggaaaggtcagccggattgccggccaagtcttcggctcctgcttgtcattcggtgccgttggcaagacttcagcacctggccaattgttaatcaaagacttgagaaacgctgaaaattacttggaactgcactaataaccacgagaaacgcttttccagaaacgaaagctcctgtatcaatcgcgatacaggagcttttttggtggggagagattatcaaaaaatgctaaagcagctacagaggatagacctatcaaagtaattgcaaagtataactctagtgaagtctctgaaaagacattagctatttttagggaaatcgctgccactgataacacagtggatttaataattaaagataatattgtgactatagaaagactatatcctaatgaaagtatacggactgatggaactacaataactacaccatttaccgcatcatttatccaattgcccgcacaaccaaatgaaaaaattataaactttaaatcctggatagatgagatggatgttagaaacggtcagacatctgttaaatctggatctgtttttgtcgtaatgccaactagtggagggggatattctggtcagtacgatggtgaaaaagtaaaaactggagcacacgtacattgtaatagatttaatgggaccaagagcgatcatcgatattggaagaagagcaatccaaaagcttggattgatttctatcacagtgattgtgactaccacgcaagcaaatatggttgtgcagattttggtaatatgtaaaaatgtgatgggcttgataaacgaggaaaaggtgtgaaggactgttcatcatggtcaggaaatcctaaacataagaattcgcccaaaacttgctggtatcgcaaataaaagtgtatgcaatgagaaaggagggtgagcgctgtgccgatttcatcattcgttgggattctcgtcttgctggttgctggagtagccattggcttgtctgtctatggctgggttactcataaaaggggcttagcagttgaagcactgcttgctggggcaatctttctaggcttagtctattgggttggcagcaattttatcggctccatgtgagccttattttggcttttagagcataagaaagctcccgtatcaaacgcgatacgggagctttttaggtggggagattattattttttgtttaggctagtcgcttaaatcttcgccgtcactggctataaccttcttgtaccagtagaaggagtcctttggaatccgcttgaggctgccttcgcccttgtcatcacggtcaacgtagacaaagccgtagcgcttgcgcatttcaccggttccggcggaaaccaggtcgatgcagccccacatttcgtaacccatcaagtcaacgccgtcgatgttgatggcgtcgcgcatggaagagatgcactgctgcaggtaggagattctttccggatcgtggatcttgccgtcttcactgatctggtctttaaccccaatgccgttttccacgatccagagcggcttgtggtaacggtcccagagctggttcaaggcaatccgcaatacgtcagggtcgatcgtccagccccagtcattggttttaagataagggttcttgacccccatagccaggttgccgccagccgtgtcgtcggtttcatgggtagtcgttacggatgaggagtagcaggagaagctgaggaagtcagctgggtactgggccaggagctcatagtcgctgtcttcgtcgtccagcttgatcccttcagcttcgtacttcttcaagatccagtccgggtagcggccgccggtttggacgtcactgtaaaagagggtagcgtcgttttgcttgagggccttcaattggtccttcgggtcagccgtcaaggcgtaaaccgggccgtaagccagcatctggccgacttgaatttccgggtcaatttcccgggccgccttgaccgtcaaagcgctggccacgaactggttgtgggcgccttgggccttgctttgggcatcatcggttagaataccggctgccatgtaaggagcaaggctcatcatgttgatttcgttgaaagttaggtagtacttaaccaggcccttgtagcgctgcataaccgttttggcgtagttgacgaagaagtcgatcagcttgcggccggtccagccattgtacttgatagagaggttaagcggagtttcgtagtgagacagggtaaccagaggttcaatgccgtacttgtggcattcctggaagactttttcgtagaattccaagcccttttcgtttggctgggcgtcgtcaccattcgggaagatccgggcccagttgatggagaggcggaagcacttgaagcccatctcactcatcagcttgatgtcttccttgtagtggtggtagaagtcagttgccgtgtggcttgggtagtagtagccggccaaaactgccggttccgctccttccgggaaggtcatatctgccccaaaggccattggcacgtagccgctttccccggtctgtgggttcttccaggtgatttttctggcttcagtgtgggagccgttggtcattacgtcggccgtgctgagccccttgccgtcttctaaataggcgccttcatactggttggcggcagttgccccgccccaaaggaagccttttggaaaagtgtttgagatattcttttgcttcatgttattggtcctttctgttatctgtctaatgcacaaaaagatttgccggggcaaatcttttcatgagcgtttttgagagaaatatgtattggtgttttgtcgttaggacagggccagcagctggtcgccagccttaaccgcgtcgcacttgctgtcgccaatttcctggtaggacttggaattggtgatgatgactggcgtggttaggtcgtagcccttggccttgatggcgtccaggtcaaacttgaccagtggctggccggccttgacttcttggtccttggagaccaggacttcgaagccttctccgtttagttcaaccgtgtccatgccgatgtggattaagatttccgcgccagtcttgctcttcagaccgatagcgtggccagttgggaagacaaggctgaccgtgccgtcaactggtgacttcaagagcccttcgcttggcttgatcgccaggccttggcccatagcaccggaagagaagacttcgtcttttacttcgctcagcgggcaaacttcaccggcaactggagccaggatagtttcactagcaacagttactgaagaaccttctgctggagcagtttcagtagtttgagtgtttgaagcagtttcttcttccccgtaaagggttgggatcttagtcatcatggtcaaggcgaagcctagaattaatgagatgactgagcagatagccaggttgatcacgctggtgaaggaaccagtcttagggttgatgtatgaagggaaaaggaagatacccataccacccatggcgtagccggtaacgttggtcaaaccacagtagataccttggatggcaccagcgatacaagtcatgatgaatggcgtcttcattggcagggtaataccgtagatggcaggttcagtaaccccgaagattgaggaaatcaaggctggggtagcaagttccttgactttcttttccttggtcttgatcatgatggctgccagggcaccagtttgggcgaagcagacagcaacagatgggttcaagagaactgaccagcccttttgagcaaagtccatgatcgccagaggaaccaggccccagtgcagaccgaacataaccaggacttgccagagaccacctagaactgccccgtacagcatcgggctgagcttgtaaatagcctggaaggcaaccccaacccaagcggacagggtgttggctattggcccgatcaagaggatggacagcggtactgagatcaagagagtaaagaatggaacagcaaacatcttgacgtcagttggcatccatttcttcatccgcttttcaaccagggaggcgaaccaaacggccaggatgattggcacgacagtttggaagtagccggcacttggcagcttgatcggcaggccgaagaaggtggtagtagccttgacagtagtggttaaagttgggtaaagcatagccccggacaaggccaaggcagtgaactggtcaagtctgaacttccgggcagcagtcaaggccaggaagaatggcaggtattggaacaccccgtcgcccatggcgttgaagatgatgtaaataccgttggtagtagccatcccggtggcagccagcagggcggtcagccccttaagcataccggcggcacagagggcgcccaggaatggctggaagatactggagatcaagtcgacgaaacggtcgaacaagttgccctttggcgcgtcttcggcgtcgtcttctgcaacttccccaacccccttgatgtgggagtttctgagaaccgcgtcgtaaacgtcagtaacttcgttgccgataaccacttggtattggccaccagcttgagcaacggtgatgaccccgttccgcttcttcaagtagtcggtgtcagctttggattcatcttttaacacaaagcgcagtctggtcacgcagtgcttgagggaggagacgttttcttccccgccgacgtgcgcaactatgtctttggctaattcatcgtaattctttgccataatcgttatcctcacttttttaaatttgccaaaataaaaacccgcaagccaggattcttcgcgtggaaaagatagaaagagtcctgtataagcttgcgggttcatgcctagtcgaactagtaacacacctggtttaagcgaaaaaaagaacctatcagaaaaaaatcaaggaacactggcaactagtaccagtcggcgatcttgtgataggttcatgcctgatttaacagtaacacgcttaagacatttattatgataacgcttcctaaaagcgctgtcaacagaaaatgcggaatttttttatttttttagcggtgagtcacccgccagatatgaagaatcaagtaggtctggtcatcggctgacagggtccagtcggcttcccgcttgagatactgggcgatccggtcgacggtgtctttttcctttgggtacttggcaaccatcagctgcaacagagccgggtctagttcagagtggctttccttaccggttaagtggcggatgatcaaggcccggaggtgggtaatgaaacgttcataattgaagctgtcggtgtccagggtgatcccgtattggtattgaacaatattgacgatcccgcctaagtaacgggtcatccgcatggtatcctggagtttggagccgtccgattcagcattgatgaagtgataggtcaaagaaaccgcctcagaagggtctaatttcaaatgaacggtggcagagatgatagccagggcttctttggccgcggtgtattctttggggaagagggttttggtttcccagcgcccgctcatcgggttcagttccgccccgtctagggtccgcttgatcatgaagtcgatgtggtcagccagggcaaagtactggtagccggtaaaggagatgccgtacttgttttccagcatttcgcagaccttgtcagtggcttcaaaggactggggatcgatccctttgacgacttcgggttcaacctggtcgatttcgtcttgggccaggaagcggcgctcaatcttgctttcatcgaccggcatcccttttttcaggccaaagccaatacctttgccgatgacgacccagtctttgccagctgagtctttgacaagggcagcgttgttgttgtaattcttgataaattccatagcaagtcctcgttaacaaatcataatcgcgttgttatttaatgttagcgttaacagtgagcttttgtcaatcctactttttaatagagaatttgggcttagctaggaaaataccgggaaagcaatagaaaaagctgatcgataaaagtggctggatgcctttttttacaaggcggcaagcgctagcatattttttagagataaaaacaaaggactggaaaagatgactgacgaaagaaacaatgatattttaccggtaaaaatcagcgggattaccggaccagtgacaggctggctggatgggcacaccattttgctgggtctgttcgcgaatccaatcagacactcagtttcaccaactatgcacaacaatgctatggctaagctgggcttgaatggggcctacctctgctttgagatcgggccggaccggattgaggacgcggtcaaggccctgcggactttggacatgcggggggccaatgtgtccatgccaaacaagcaggcaatcatcccttacctggacaatctggacccggcagcagaaatctgcggggcggtcaacacggtggtcaatgaccatgactttttgacgggctataccactgacgggaccggctggctgcggtctttgcaagaagacggccaggacgtgaaggcgcaggttgtgactttagctggtgccggcggggcggcgattccgattgctgtagccgcggctatgggcggggccaaggagatcaaaatttttaacatccatgaccgcaactgggaaccagccaaggacaaggtggccgcgatcaatgaagcgactggctgcgtctgcagcttgaacccgatggaagataaggaagctttcaagcagtcgattgctgaatccgggatttactgcgacgcgaccggggtagggatgccgccgctggatgacctgtcactggtggaagacccatcctggctgcatgaggacaaggtggtcagcgatacggtttatgaaccgcgggagaccaagctgatgcggatcgccaaagaggctggtgtcaagcatatctataacgggctgggcatggtggtcggccagggggcagagtccttcaagctctggactggcaaggaaatgccggttgactacattaaggaaatcgtcgctaaggcgtaagaaaagcggacaaggcaaacttgtccgctttatttttggcaaaattatctgatcttttcctgcagctcggccgcttggaaggcctcgaccaggtcttttaaggccggcgaaaggtcagccccgcgccggatcccgatgaagtaggtaagcttgatctggcgggggtcaagggggtagagattgattggcaggtgctccagccgcttcaagatactggctgaggagatcgtgaagccgaccccgttgacggcaaggttggtggccgtgataacgctgttggaggtcatccggatatttggctgcacgcggaagtaatgaaataaaccgttgacctggtggcggatggcggattccccgttgcttaagacaaaaggctgctggagcagctccttgggatcataatcagccggatccaggataaagcggtctttgagatagtacttggaattttccggaatcacgatatagtagacctccccgccgttgatataagtatcaattccttgcgcgacggtttccggcgtctgccccatatagtagtcgacatccccgcctagcagccggtcttcgctggtgtgggggaagccttcagcgatctggatcttgacctgggggtgttttgccaaaaaggcaggcaggatcttaggcaagaggaaggtgcccaggctttccagaatggcgatccggatgacttcttcctgctggttgctgaagcgctccagggcgttggccagctggtggcgctgggcggaaatgttttccaaatactggtagtagatctggccggattcagtcagggtaaagggaaccttgtcccggttgatgatggtggtccccagttttttctccacccgcttgatcagctgggtcaagtagggctgggagatgtagaggtgttcggcagcccgggtgaagttgctttccttgagcagggtttccaggtagttgagcatgatgtcgggatcgttcattttctttttttctcctctgttaaaaagtctcgtttttacgataacacaaatgttattgattgataatatttaaagtcgttcattttttccaggaataatattagaattaagctatcaagtaaagaaagcgctaacaaagcgaaaaggagcaaaatcatgtcaatgaaatcaggtacttatagggttaaggccaagggccacggttcatcattcatgccgatggaagtcaccattgaaaacgacaaggtggcggacatcacggttgaatcagcgggtgaaaccagcgggattgctgatgaagtcttcaagcgcctgccaaatgctatcatcgatgggcaaaccttgaacgtcgacgccgtttccggggcttcaatctcctcacaaggggtgatcgacggggttgctgaagcgatcaatgaagccggcggggatgctgaagaatggaagaagcgggacaagccggcttcctcagccgccaaggatgaagaatacgacgctgacgtggttgtcatcggtgccggcggggctggtttagccgctgctacccggtctctgcagcatgataagaaagttgttattctggaaaagttcccgcaactgggcggtaacactgcccgggccggcggtccaatgaacgcggctgaaccagactggcaaaagggcttcaaggccctgccaggtgaaaaggaaaccttgcaggaactggctgaaacgccaaccagcgaaatcgacccggaatacgtggcagacttcgaaaagctgcgtgaccagatcaaggcctaccttgactcaggtgaagactacctcttcgactcagtcctgctgcacgaaattcaaacctacctcggcggcaagcgggtggacctcaagggcaacgaaatccacggcaagtatgaactggtaacgaccttggttaacaacgttttggactcagtcaactggctgaccgacttgggcgtgaagtttgaccgcagcgacgtgaccatgccagttggtgccttatggcgcagaggccacaagccggttgaaccaatgggctttgccttcatccacgttttgggtgactgggttaaggaacatggggcaaccgttttgactgaaacccgggccaagcacttgatcattgaaggcggcaaggtgaccggtgtgatcgcggaaaagactgacggctcaaaggtaactgtccatgccaagagcgtgattttgacggccggcggtttcggggccaacaccaagatggtgcaaaagtacaacacttactggagcgaaattgctgacgacatcgccacgaccaactcaccagccattaccggtgacgggattgccttggg

SEQ ID NO: 2264 - DNA, 2242 bp, Unknown
  gut microbiota DNA sequence
aaggcgtaccactttggcttattctttgctttttcgtcctgtcttgattcttacgttgttgtagtaatcgatgtatttgtgaatagctttctcaagctcatttaagtccttgtatttatgttcttggccgtagaacatctcccgcttaagaatgccgaagaagccttctattaaaccgtcatcgagagaattacccaacctggatatactctgatcgatccctctgttagccagagcagctcgatatgcttggtgctgatattgccagccacggtctgagtggaaaataagcccgttaagagccgggtgcttctcaaatgcgtcatttagcatggtcatcacttgcttaaggtctgggtgcctaaaatgttgtaggagatgatttcttgggtacaaccatcgataattggagaaaggtagagcttttgatctctaagatggaattcagtcacgtcggtaaaccaatgtctgttgggaataattgcgtagaaattgcgcttgattaagtctggcttgattttgccttgaacgccgtaatagctgctgtatttgcgtttcttgcggattgagatagcgaataagcccatcttttgcatgagcctctgcaccttcttatggttgacctcatagtcttcccggcgaagctgtccgtagattcgccggtacccatagcgctggctgtgttctagaaagatctctttgattctatccatcagcttctggttaccagaatccttatcaagcttatgggtttggtagtagtagttacttcttgagatatgaggcaatccagggttggcattgataacgtcgataatgtacttaacgctaagccgcaattcttgccttaattcattgattgcacgagctaattcttcttttcttggctcttacgtttttgaattaaggcctccaatttttttatgtatgcaagctcgactgtaagcctctttacctgctcttccagttctttgatccactgtttgtccttgcttttgggcattcttgggttgatctacctttcttcttggtaatgacagtatacccgttttctttaaaagagcgaagccaatttgcaagaatgcctgtatttgtaagtcctaagtctagagaaacctgtctaagtgcttcaccgcctagcagaactctatcaatggcagcaagcttgaaatcagcagtatattcctgttgagggcgatccagaatatcttcaccatgtttttgaatcaagcccaccaaatactggattcctccacgccccatcccatattttcggctaaggtaggtgcctcttctgtaatcatttacccattcgtggtagatagcaagtttgatttctttagtgtatttagtcatgaaaataacccccgaaattagaacactaatttcgggggtcatatcatttaagggcttttttatctataaaataaagtttagaaaagtctctatcgtgccactttcatacatgatgtatagtccaagtggaatgaatactaagggcacaatgattcgcgtgtatttttcaattgtctcggatattaacggaatagaggatagcacctgactaagcttgcaaaagataattacgccgattgcaaacacaagcaacgccacgagggtctgtgcccaatctaacgaagcaaaataaggtatatagatacctaaattatctccgccagacgcaattgtcagcaatgtaactgtccaaaacagttgatttgccttactttgttctaatctttcaatagtttcttcctcttcttcttcttcctcaccttctccaacaattgcaaagcgaatccctaaatagatagggattaaaccaagcaatccaaccatccatgcttcaggcacgaaattgacgacataagcagcaactaaactcacccctacaagtaagcccgtgcctagatattgccccgcataaatatgccatttctgtttattctgtgatagctgtgcaaataaaataatcaaaacaattaaataatctatactggtggaaatataaacaccaatagcagatatgattgtctgtcccataaaaaacctcctgtattagtcagtaataaatcagcagattttaggggagcacagacacattaatttagctattgctagtgggtaatgccggacgtaagaaagcattttatcctcctcaaaacgtagttacaaaatagtttctaactggaattcggtgattacttccaagtaaagtataacccactatactttacaaggt

SEQ ID NO: 2265 - DNA, 5708 bp, Unknown
  gut microbiota DNA sequence
gatcatcaagagctgcagctgcccttgcaaaagattgatgtcacttaccggcgtgttcaaaccttgcgggagatttttgacaatatcggttaagccaaccagggctaaagctttatcgatcatctcagcagtaatcgtgtcgtcatataaagtgatctggtctttgactgtcccgtcgaccagggcaaccccttgctcgcaaattgctaggaagtggcgctaattcttcggatgagcgtctggcgaactgccatccagcaggatcttccctttttgcggctggtagaggcccaggaggagtttaaaaatcgtgctcttccccttcccggtccggccgacaaaggtcacgtgctcgcctttggcgactttaaaggagtagtccttcaagatcggctggtctggcaggtagccgaaggtgacatggtcaaaagtaaagtagtcaccttccccttggcagatgtccggcttgctgtctgcttcatttaaaaagtcctggatccggctcatcccggccattgcgttttggatgctttggattcccatcccgattgattccagcggtgtaaaaatctgccggacataggcgatcaaggcaacggcgctgccggcattgctgccaaagaaggtctgcatcttctgcccttgggcggccccgatcatcagcaggccgataacgacagcttcgatggttaagatgattggtgaatagacgctgtccagccagttggacttgttctgggcccagtaggattcttcgatatattggtcatacttgtcttccatgtagtcttctttttcaaagatatggatcatggagagaacccggagagtttcggggatatggtggttgaccttggcgctggcggcccggttttgcttctgggaagccagggaggccttctggaaatgccgggtcatgaccaagatcaagggcatgacaattaagataatgaagcccaagccaatgctgcgggtaaagacgacgaagagcaggccgatcagctggaagaggtcggcgatcatcccgactaccccctcgctataaaggctgttgatgatatcggcgtcgttgacaaagactgaggctattgccccgctctcgtgattagtcaagtagcctgtcgtgatggtgttcagcttttgcaccaaggcgagccgcatgccgtgggtcaatttttggccaaaaatcgtaatggatatattctgggctgaggcaaaaaggtcagacaaaacgatcaagcctaggtaggccagggcaaaaagcagggaaacttccttttgatcagtcaagtggttgacgatctgctccagaaccaggggcggcaaaagcgaagtgatgatgcttaagatgatgagcaggaccatggagatgaagctcttgggatggtcatgaatgacctttttagcgatattacgcatgttgctgccccccttcaatcaacttggcatagccggtgttctttttcagcagttcgtcatgcttgccaacagaaacctggtggtcatggatatagatgatctggtccagctggctgaagcagtcaacccagtgcgtcatcagcaagatggcatggccctgcaggcttttcccgcaggccacttcgccggtaataccgatgatttcattagcggaggcggtaaaattgatgtccttgaccgcggtttccgggtagccgtggtaaaaagtcgtcacatggtcaaaagtgaggtcgtttattactttctcttccttttggtaatggtcatagatcggatcgctcattagcggtctgatccggacccaggagacttgggctttttggacagcgttaaacagtttggcggcgtgggagaccttggtggcgagtttggtaaagcaggctaagaaagtcgtgaagctagccaggtcccaggccttccagccgatgtggaggacattgcggccgccaaagtagatgatcaagacgatgccgaacatagcaattgcgtcatagagcgatatacgctgatttcctgcaattgccgatcaattaaatcaggatccctaaaggcaaatcgtgaaatattgccataattgtcagtaataactggattatgatagtcatcaaaccatttaatctgctgcctgataaagtcggtctttgagctgtaatacccgcccataactaaatatggcgctaaatcaagatacgaattggaaatagcactctctgttagcgcatatatgtagactaactttttgtaaaaaagctgtaacaagctgcggcaagacgcgaataatacgaaaaaacggccagcaaatggatctttcccagctactggccgctttatctatctatttatcttacagcatggtccggatctgctggccgtttagccaggcagtcacgttttcaaaagccatttccgctcttcggtcaattgattctttcgtatcaaaaccgacatgcgggctgcaaaccaaattcggaactccgatgagtggataatcagctggcagtggcggatcctggtcaaacacatcaagccctgccttaatccgtccttcttttaatgctgcagccaacgcttcagtatctacgaccggacctctggccgtgttaatcagaatggccccttccttcatctctccgatctcttttttaccgatcaagcccttagtttccggagtcagcggcgtatgaatggaaacaatatctgcctcccccatcacttcatccagtgacttgtattccaggcctaggtcaagggcggcctccttttgactacggctatagccgatcagcttgcagccaaaggctttaaaaatctctgctgtccggcagccgatcgctccagtaccaacaatcccaacagttttgcctgctagttcatgtccctgcagtccgcccttgccctcaccagcttgcacagcctcattgccagcactgatatttctgaggcagtccaaagtcaaaccgatggccaattccgccaccgcatcgttgcaatagccaccagtattggagatcttgatctttttctccttgcaggcttccaggtcaacatggtcaatcccgacaaaggcaactgagatgaacttcaaattcttatctgtccggatcacttcaccaggcaaggggtggttggcgataatcaaggcgtccgcgccctcgctccgcttcttcaattcttcagtatccgttgaaaagctgtcgtaagccgtaaattcatgcccctgcttggtcaatttttccgccagcttgtctaaactctcctggctaatgcccagtggctcaagcaatacaatcttcattattttctccttactttctaccttacaaacacatagacagcgtaagcgcctatatcaagaatattatcgcatttttattgtttgcctgacaaggatagaaattactttaattttttcagcctttttcttgacattagtctacacagagactaaaatcttagctattgtccacgaggagactttttatgaacttaaaaaaccacgaaagcatttcagaatcagtaaccctggccagcgtccgggcgacttacgcgtatgagcaatatgacaagctcatgggaatcacccagtacgagagcatcattctatatgagctcttcacccatccccgcctgtcacaaaaagagctcgtctatagaagcggcatccccaagcaatccatcagcaaggggatccacaatctagctgagctcggctacctggaaatcagctctgctgaccaggacaagcgggtcaagtactgctccttgactgagtccgggcttgcctatgcccgggaaaaagaaggtgaaatcctggctatcgagaaaaaggtgatcgacaagctgggctttgaccgggcagctttggcctgccagattctggatgagtggtctgatctcctcagcaaggaaatagctaacttaaaggaggaaaaacagaaataatgaaaattctcttgccgtacttcaagcgatataaaaaagacgttttcctgactttgatcaccatcgtcttttcagcttttgccaccctctaccagccccgtctgctccagcaggtgcaaaatgaactactggctgaccagcagcaggccgtcatccgggacaccgcgattttgatcggcctgggccttttatccattattaccggggtcctcaacgtttactacgcctcccggatcacccagggcgtggtcagcgacctcagagaagacacctatgccaagatccagactttctctctggccaatgtgcagcaattctcctctgaatcgctcagcgtccgcttgatcaacgacatgcagcaaataatgaacatgatcatgaccatcttcatgcagctgatccggatgcctttgatccttatcgggtcaatcatcatggccatcgtcaccatcccccgctactggtgggcggttgtcgtcctcctggccttgatcatgggtctgggcgttgtggcagtcaagcaaattaccgccatgttcgacaggttccaaatgtacatggacaaaatctccggccggaccggggaatttttgcaaggggtccgggtggtaaaatccttcaaccaaagtccccaggaaattgccaaattaaacaaggattctgacgaattaaacgaagtcaacattaaagttggctactggttctccaccatcctgcctggtgcccagctgatctcctacctggtcatcagcttagtagtttacttgatcggaaccagcattctccagcatccccaagatgtttccgtcatcactccatacgtcaactatgttttgaccatgctctttgccatcctgctggtcggcatggccgtcatgcagatttcccggggtaacgtctccttacggcggatccaggaaatcatggacacccagccagacgttgtcttcaatgaaaaagccccggaagacgccttgggcggttcaattgaatttgatgacgtctccttcacctacccagatggccagcagcccgtcttaaagcacatctcctttgctgttgcgccgggccaaatggtcggtatcgtcggggcaaccgggtcgggtaagtcgaccctggcccagctgatcgcccgcctctatgacccaacaactgggaagatcaagattggcggtagcgacctccgccaggttaatgagaatgccctcagaaagactgtttcctatgttctgcaaaaggctgttctcttctcaggaaccattgccgacaacctccgccaagggaaaaaggatgctacttcatatgaacttgaacgggcagcgcaaatggcccaggccagcgaattcatccagcgctacgatgaaacttttgaccatgaagttgaagaaagaagtgccaacttctccggcgggcaaaagcagcgtctgtctattgcccgggggatcatcgccggcagcccgattttgattctggatgactcaacttccgccctggacgcggaaagcgaaaagctggtccaggaagccctggaaaagcagctgcctgacacaaccacgatcatgatcgcggaaaagatcgtttctgtcatgcacgcggacaagatcctggtccttgataacggccgcctggttgctgaagggacccacgaggaactactcaagacttccccggtttaccaggaaatctataaaacccagaaagccaaggaaagaaaggaggaactttaaatgccagacaagcaaaagtcgcttacttatttgacgaaatatctgaaaaactacaaaaag

SEQ ID NO: 2266 - DNA, 241 bp, Unknown
  gut microbiota DNA sequence
caagatgcctttccgactgccaggctaaaagtttccagtggggcagataaaaagctattggataatgccatttggcgttatttgacagccaaccgtactcactgaccttaacttcaaaaggttaaaaatctgatttcttttgccaagttgaatctactcatagatttaactagaaaggaatatcagaaaaacttaccaatattgatgtgattatcaagatttagtaagttttatgattcgg

SEQ ID NO: 2267 - DNA, 1257 bp, Unknown
  gut microbiota DNA sequence
tgagtacggtttagggatgaggaacaggaggcaagtgatagccgcccgggagaccaagcccaggaaaaaatttaaaaaaatagcaggatatgcgataattttgggccaaacaggcaagtggatggggagaaactgaataagttaaagttcatgtgttttcgaaatgggggtgaagaaaatggatgagcaaggatacgtaatcgtcgataaagaaacaggtttgtatttcgcaaggaactgttctgaaagatatactgtcaacctttggcaagcgtctaaataccaagaagaaaaatacgcccagagaatgctggatatgataaagaggagtccggctacctataaaaccgcaaagcccgagaatctgagcttgcagctctgtaatctcaaaggtctgaaagaaaaagcgccagaggagctgctgtcaagggagcaggaagaagaaattcaagctttcatgcaagagatcggccggggcacggcatatgacaaaattagtgatttttgtaagaatcccttgtttatcgagcctttgagaaagctgctgccatacggtcaaaacttgagtacaaaattggtcaagttcgagcggaatcaacggcttgaccggcgcaagtacaaggctgccttgaatctgcttgagttactttatcctaaagggtcggtgacgacaacggaagagagaaggcggcagtatgtgaaacgggtcgttaaaatttagactgagcgccggttgtatgttgtcagaacgcaagaagtcagtgagtcattttcctgccttttcaaagaagagggcggaatgatgtatttggcaatgcgcaggccgctgccgggcaaagctgctgggttaaactggctaacagaaacaaggagaaaagtctcccagctgctgtagccgggagaaattaagtgaagttgctaccttatatatagtgcatgtactagatgaagctggaaaattttagggggtaaaacgatgaagtcagaagaaatcgccagagtcgaattggacgtggggcttaaggaagttgacgatggtgacaagaatgaagcattggccaagcttgcgtttatctttagcctggaattgatggagaagaacaatctgagtcttacagagcaagaggggacgcagttagggatggctttgacaacgatcatggtaaacatgacggagcatgggtgtctcacgcaagagcaacttgcccaagaatgcaagaatattttgttgcagagtttcctcgtgaaatggatcca

SEQ ID NO: 2268 - DNA, 3409 bp, Unknown
  gut microbiota DNA sequence
tcttttttcccagactcttttagtttatgcaattgtagtccatcagacaaacttttccagatcaatcacccggtcagcttgagcagcttccgcgagattgtgggtaaccagcacgactgtcttgccctgctggcttctcaaatccagcaattgcttaaaagcagcctgagcccgcttggcgtctagtgctcccgtcggttcatccgccagaacgatctccccaggtttcaagattgcccgggccaaggcgcagcgctgctgctcaccacctgacaaggtctgcaccttactctgcttgaccttgcttaagtccaggctcgccaggacctggtcaatctctttctgcttttccctcttgcttttcttgacaaaagccatggccaagagcaagttttcctctacagtcttggtttgaatcaaagcaaaagattgaaaaagatagttcagctgctgacgccgcaatttggttgcctgccggctgttgaccttaggcaccagcttgcccaaaagcttgatctccccctggtcaactgcttcaagcaaacccagcatgttgagcagggtcgacttgcctgaacctgacgggcccacgatcgctacgaattcgccgcgttcaaccgcgaaactgacatccttaaaaatcgtccgctgcccgtactttttgcctaaatgactgacctcaataacttttgtcatactactctcccttaaacaattcaacgacgtcattgaaagaatccttgatcacatacagatagaaaaggctcagctgcagcaggcagatcagcggtagaacaaacaggccaaccttgcttctcaataatcccgcggcaaaaatctgcccagctcccgtcagcaagatcactccaagtggcaaagcatacagctgacgcgggctgaagccgagaaacttcttcacggctatttcctcccagttgagctgcttataaatcataaccaggatcaacaagagcagaagcaaaaggaccagcagaattaccaaagccgcaccaaacatgataactgtctgccacaaactcttctgcagcccgtctatataggaagaaacactgaccaaattgggcttgttatcactgagattgaaacgggccaacagggcctggctcgtgtatctcttccgcgtcttttggtcagcaaacttcaaatagccattcatcccgctggcaaaaagccccccgatctcaacataggtcatattttctggaaccgccagatagatgactggattccggctctggtaaggttctttcacgttattgttccacgtgaaaacttccccctgctcctggtaggtcacaaaaaggaactttcgctttttgacaaaagccgtctgcaggtctccgctgctgaccccagtctgcgcgtcctctttgaggaaagcctcaagggcccggcgctcgcggctggtcatactttgcggtataaaatagacccggcttccggctttggcggcttttaaggcagcttgactgaccttaaaggaaatatgccgcagatagctaggcgaagccgtcagaatcgtcactggtttaagcggcaagctcttatagctctcgtttgcccggctgtctgccagccagctcttggaagcatagaaggaattagccaggtagactcccggcttatcctgcaggtattggtagtaatggtaaaaatcgcggtaaatggctgatgagctgtcagtgtacgctctgtctccatcctggccgctagacgtagactccagcagctgcatccctgcattcttctgccactgtctcgcttgttcttgattggcagcaactgagtccagcggaccgtcaatgccggacagaacgccgaccaggccactactaaaaataaggtaaaaagctattgtaacagcgtacagggtccggcggggatagcggcccttaatcaaatcaatattgcttaagctcaaaagcaaaaacgatgccaaagcgaagaccaggcaggtcatgaccaagctcagcaccaggccgcctaggaagaccaaggcaaaagacaaagtcaagcccgttccttggcctgcccagccggccaatactacagctgaaaggccgccagctgcagcggtaaaactcaggaaaggccgcaaggcactcagtaaaatatcctgcttggaccagccgagcaagatgagatccccagccgttttcagcaaactaaataaaataacgaagaaatagctgagcaagccaactgacgtcagcagcaaaaagcctgctgtaaacacataagtcaagccatcactactgtcatgcccgcccatctgactggtaaaattgctggccttctgcccggtaatccgtctgagccctttgatgatcgtctgataatcccgttcactgcttaagccggccagctgatagctgccatcgacttccttagtctgcttgaccaggtagtccattttggcgataactacccgcccactaccggcaaactggtaaagggacttaatctggttgatcgaacccgtggctaagccaatcgttgccgctgaattctggctggttaaaagccggtttaaatcagctttggaaagcagctttacgttatagtagctgaaatcagcttggagcttgctgctatcgccggcaaccccaatcagcatccccgtgtctctttccttgcgcagcaaaaggaagcttttccggctggcctggtcctccagataatccaaggcttcctgctttttcccggctggaaggttgttcaaatggacagtgtaggtcgtctggtcagacaaataatcctgccactggtccacgtatttttcacccatgtagaaatacaaagtcaccaggagtaaaatcgtctgtaaaaaaagcaaagcgtagccgggaatccgggtacgcttgtcaatcactgatgttctcatttgcaatcccagtatgcttcaacatgcttagtcggtgaaatccaggtttctgcttgagctaatacccccttctttttccagccagatgatacgccgttaactgtcgtggtgtgactatatacatggctctgcacctttgaataagcacgaattttagcaatattgccgtagtcccagtagactggagtcttcttgtaatacactgtttttgctaaaacaggcgttgcagttgcaaacaagccaattgatgctaatgcaatcttaataacagatttttttaaactatgattatgtttcattgcttttcctccataaagatattgatgtttataagtatacgttcagcagcttgttttgtcaatactattattttaatatggtaaaaaagctttttattatgaaaaaatctttttggacaaaaagcttgctaaggcactatatcttgcaataaactattagagcaacgtagatctagtatagtatgaatagaaagagtgtgatcac

SEQ ID NO: 2269 - DNA, 209 bp, Unknown
  gut microbiota DNA sequence
tagcatgaattttgggaccttaactggtgatctgggctgtttccctttcgactacggatcttatcactcgcagtctgactcccgcacataaatgtctggaattcgtagtttatctgaattcagtaacccttgacgggcccctagtccaaacagagctctacctccagcatcctctttgcgaggctagccctaaagctatttcggagaga

SEQ ID NO: 2270 - DNA, 1685 bp, Unknown
  gut microbiota DNA sequence
acaatcaacgtctggaagcctatttaccatgggctgagaatgttcagctccactgtaagtaaagtcccataaactgattaatcccatcttagcattgctaggatgggattttaatataccgcgctattgggcgcttaccttttttcgtccaattttggacgaaaaagcaaataattggacaaaaaagtcccttcatgcttcaacgtgaagggactcttctttatcttggtcggtaacttagtcgcttatcttggtcgctcgaccgaataagttattttcgccagtatttttgattcctgctttttggtttctctggaatggccatttctataaaatcagaactacgatccaaatcacagttcctattatcaaccaaaagaaaagaaggaaacggttttgaactaagcattttctatcatttcccgtcacctccccagacctcaacgcagaatcctctgtgaccacatgcggtgcaggtcagctttcgggtggttggcgtatgattcgcccaaaaggcctccttcaaagtcggcttaaacagctcgtgacattccgggcagatatatttcacctgtctgaaataatacctgctgacaattattccccagggaatagccaccagcacccaaagtacaaatggccaccatatgcctttgacgatcaaaaaaatgatggaaaagcattgcagtgccgtgactgggattccggtcaggatcatcatccagcgcattcttttcagtttcttcttgccttccatgataacggctatgtcaccgatagattcgagagagaatgactcatggcttttcagtccgtttttcaattcacgcagcttttccagttttttctgtttatcagagatttcatccgaaagggatttttcctgatgctcaattaacagtgagatcactttctcgggatgctcttcattcaagatctgtgagatagtattgatgggaagatccagttcccttaggaagcagatgatcttcatgcgtttcagatcgtcatctgaataaagccgtctcccgccttcagataactcactggggatcaggatacctctggtatcataatactgaactgtccggactgtaacgccacagagctttgcaagttcccccgtcgtgtattttgacacagttttcacctccttcacgtcaagaatagctcataacgcagcgtcacaagcaccccatgacgcacggtgattttctaaaaaaatctatctttttctcaaaagctccccgccgccactaatagttgtggtaggcgaattttttgaccatccaaaccgataactcaaccttcttggaggtcatccattaacccgtgacatcaataccaccgcctccatatgtggcgtccgactcataccaatcacacattgcctcaaacgctgaggcagtgcggtttgtcgctgctttctaaggattaatttctacagcaatttaactaagatgagtgcttgcttatcatacccagtctcactattttaacatttcattagctaacggaaactcaatgaacgctactatgttacagcgtacttggtgcctgtcgagtgcgccataacaattattcaagaaagcaatactataatttagttattgaatatcacaaggggtaaaatagcaatgggcgtgtttaaattgtaagcacccagtagcacggtatattaaaat

SEQ ID NO: 2271 - DNA, 454 bp, Unknown
  gut microbiota DNA sequence
aagcgttgtccggatttattgggcgtaaagggaacgcaggcggtcttttaagtctgatgtgaaagccttcggcttaaccggagtagtgcattggaaactggaagacttgagtgcagaagaggagagtggaactccatgtgtagcggtgaaatgcgtagatatatggaagaacaccagtggcgaaagcggctctctggtctgtaactgacgctgaggttcgaaagcgtgggtagcaaacaggattagataccctggtagtccacgccgtaaacgatgaatgctaggtgttggagggtttccgcccttcagtgccgcagctaacgcaataagcattccgcctggggagtacgaccgcaaggttgaaactcaaaggaattgacgggggcccgcacaagcggtggagcatgtggtttaattcgaagcaacgcgaagaaccttaccaggtcttgacatc

SEQ ID NO: 2272 - DNA, 230 bp, Unknown
  gut microbiota DNA sequence
caactaaagacaagggttgcgctcgttgcgggacttaacccaacatctcacgacacgagctgacgacagccatgcaccacctgtctctgcgtccccgaagggaaagacttatctctaagtttgtcacaggatgtcaagacctggtaaggttcttcgcgttgcttcgaattaaaccacatgctccaccgcttgtgcgggcccccgtcaattcctttgagtttcaaccttgc

SEQ ID NO: 2273 - DNA, 230 bp, Unknown
  gut microbiota DNA sequence
caactaaagacaagggttgcgctcgttgcgggacttaacccaacatctcacgacacgagctgacgacagccatgcaccacctgtctctgcgtccccgaagggaaccacctatctctaggtgtagcgcaggatgtcaagacctggtaaggttcttcgcgttgcttcgaattaaaccacatgctccaccgcttgtgcgggcccccgtcaattcctttgagtttcaaccttgc

SEQ ID NO: 2274 - DNA, 221 bp, Unknown
  gut microbiota DNA sequence
gacatgtggagcttctagaagtgagaatgccggtatgagtaacgaaagacaggtgagaatcctgtccgccgcaagactaaggtttcctggggcaggctcgtccgcccagggtaagtcgggacctaaggcgaggccgagaggcgtagtcgatggacaacaggttgaaattcctgtactgcaccgaatcgttatgagcgatggagggacgcaggaggctagca

SEQ ID NO: 2275 - DNA, 3796 bp, Unknown
  gut microbiota DNA sequence
aaacttgcaattttgcggacccagaaggccactactttgcctttaagagtgtgaaggcgtaatatattttcaaaacaaaagaccgtcacgattgtggcggtcttgtcgctttttctactcattattagcaaactttccagcttcaacatcactgatgaacttatataaggaagaaaagaatgcctgaggattatcaatgtggtggcagtggccgccatctggcgtcacaaccatccgggagtttttcaaagtcttgtgcatccggcggacagcatcaaggggcatggtgtcaaattcaccgaccgttaagagggtagggagggtgatctgccctaaacggtctctgaaatcccactcagttaacttgccgaccatcatgaattcattattgccttggaagtaattgtagacttgagtattcgtggtgctgacaacgtgccggctgccattttccgggtgacggatcaggtaaacagagtaaagcttggcaaccagttcctggtacatggcatcgtcgaaattttcttccgcttcgcattcacgcatgtagtccacttgggccggactgaacatttcttctctttcccggttgatgttgacggtgtactcatccaggttgtcaatcatggattcaataataacggccttaaagtgctggccatactttacagcatattcttgtgccagtaagccgccccatgagtggcctaacaggtagaaatcttccaaaccgagcttctggcggacttcctcaagttcatcaacaaagtagtcaatgttcaaatacttacggttttcctctttggaaaaatctggctgatctgaccagtatgaacccaattggtcataagagtagacctcaactcctttgccggctaagccagccttgaaattgtcaaagtcttcatggttgtcaccaggcccgccgtgcacgcagagcaacttgaccggtccttcattgaccttgcgggtaaaaaggtgatagccattgtctaaagtaacgattctcgtttgatccataatattttctccttcagtcataaattcacttgttacttgaagtatgctctcgtgtagtcaaccatgccaaccttgtgccaaagtaccccctttaagttggaggttaccaggtggtcttcaaccatggtgtaaagaggaagaacagggtaatcttggttcatttgctcctgtgcctttaacaggtggctgaagtagactgatctggtcgcggcattttttctggcttggctgagctcattgttgtaggcagcactggtgtatttaccgtaattgtagctgttagtcttttccaaggtctgcagttcgctgtatgggtcagcgtagtcgttgagccacagggaaaggtaaaggtcatatttgccattggtaaccaagttgtaggcggacttggatggcagattcttgacagtcactttaagtcctggcagcttgctttccagctgtgactgcaggaattcactgacattcttgttggtagttgtgtcacttgccaccagggtcaattcaacttttgacttgcccagttgctttaagccggcctgccaaagctttttagccttggcaacattgtaagtttcttttggctgcgctgctgttgcgaagtccttgccactggctggatcctttgcggcatttggtgctgagaaggtgtaggaaggctttgaaccatctgctaaaacctttttagacagctgagtacgattaacagccaagtagagggcttgacggagttgtttgttggccaatacggcgcccttagccatattcagatttacgaagttattacctgaccggtagaggtggtaaaggttcttgttgttttgcagaccttgtgccgtcgtgcctgaaactaccgcgtcatctaggctgccttgctggaagagctggtgggcagtgtttgaatccttgacgacttggtaatttagcttttgcagcttgaccgcgcttttagcgtagtagtgttgattcttaacagcagtccacttttcgctggtgttggtccacttggtgaccttgaaggccccgtcaaaagcggtatacttggcagccgtaccatatttggcaccatattttttaacaaggcgggtattttgcgggtaaaaggctggcataaccatcttgtcgatgaaggtcggttctggattttcaagctgcacgaccagtttatacttgccaacggctttgacgcctaagctgttgaccgcctttttgccttgagagatcgggtcagcattcttaatgttgctgaagatgtagttatagccagacattgctttgggcgaaacgccttttcgccaggctgttacaaagtcttgcgcggttacagtgtcaccgtttgaccatttggcattgtgcctcagattgaaagtataggtcttaccgtcactggacttatgatagctagtggcaaccgcgggaactggctggtcatttttatctgaccggtaaaggccagccatagtttgcaccaaagtgtcccattgggggattgaggcagtcactgaggtatcgagggagctgactacatcagtttccatcaagttcaagcttgtcttgccactggatgcttgggaattgctattgccgcaggccgccaacgtacaagctgacatgccaagtaatgcaactgttgccatttttctaactttcatttgtgttcctcttttcatcttttagggaaaagaaaagcgccccactggatcaaatcgatccaatagggcgctattagcgcggtaccacctattttcgccgttaggccttcacgcacagataatgcgctgccgctttaaggggcggaccccgaaaccactaatctcgcagtttccgctcaaaggcgattttcgcacttggtctgaccgcttcttcacaccgaccagaagctctctgcaggtctcgccaaaactacttttccttttcaaagcaatgttgttttgatttcatgtcttttatcttaatcctaaatctgagaaagtcaacagcaaatggcaaaaaagttaaaccaaagttataaatgccggaaagaattttaacgctgtgttaaactaaaagtattaattacgtggaggaaaaacaattatgaactatcaagacatcaacgctgaaacgatcgaccgctgggtcaaagaaggctgggagtggggcaaggcgattgaccacgagacctttcaagccgctaaagaagggaagtgggagatcaagctgaccccggttaaatatgccccgcacagctggtttggtgacttacacggccaaaaagtccttggcctagccagcgggggtggccagcagatgccaatcttgactgccttgggggcaaaatgcacagtcctggactattctgaccagcagctggaaagcgagcgcctggttgcagagcgcgaaggctacgatatcgacattgtcaaagccgacatgacccagcctttgccttttgctgacgaaagctttgacatgattatccagccagttgccaactgctacgttgaaaaagttaagccgatctggaaagaatgctaccgggttttgaaaaagggtggggtactcctggttggcctggacaacggaatcaactacctgtttgacaatgaagatgaaaagtatgtcgtcaactctttgccttttaatccgctgaaaaatcctgaccagatgcagcagctggaaaaagatgattctggcgtccaattctctcataccttggatgaacagattggcggccagctggaggctggctttactttaaccaatctctatgaagataccaatggcgaaggccgcc

SEQ ID NO: 2276 - DNA, 5392 bp, Unknown
  gut microbiota DNA sequence
cgtacagccttggagaggccgtattcttccgtggtaaccggagttaccttggtcttgtagccggcctggcggtagatttccttggtgaaatcgtaccagctgatatagccggtcttcgtgccgttttcatcatagccgctggcagtttctggcaattccgcgttagttgcgtggtagtagccgtacttgtcagtttcgatcatgtcgaccaaaagccgggccaagtccaaagtgtaagttggcgtaccgatttggtcgctgaccaccttgacttcatcatgagtcttacccacgttaagcatggtcttgatgaagttcttcccgttcaagccgaagacccaggcgatccggacgatgaagtacttgtccaaagtttcagatacggcaagttccccgcccagcttggtttccccgtaaacgttcattggcttgtagcccttgaagtccgggtcccatggagtggtgccctggccatcgaagacgtagtcagtggagatgtaaaccattggcacgtctaattccttggctacgttggcgatgttttgagtgccattggtgttaaccttgcggacagccgcaaccttgtcgtcgtcttcagccaggtcaaccgcagtccaggcagcgcagtgaacgatcacgtcagggttaacttcagtgatggcctgctttacgccttccgcgttagtaatgtccaaagaaacgtaaggagcagtagtaacggctgagccgtcagcgatcccgctgtattccggagccaagtcgctgccaacgccttcgtagccgcgcttagccagttcgttcatcacgtcgtggcccagttgaccattgacgccagttacgaaaaccttcattttttcctcctaattaaaacttgaaagtgtccttgaggcccagccacttttggtccttgtcggacaaagtcagcttagtaccgtcttccaaagcgtagccgctagcatcagctgagcccgggtattcgccaaccaattgcggccattcaatcccgatttcagggtcgttccaagccatgccgccttcatcgtttgggtgccagaagtcgttaaccttgtagcagaattcagccacgtcgctcaaaaccaggaaaccgtgggcgaaaccttctggaatcaagaactgcttcttgttttcagcggtcagttccaccccgtaccacttgccgtaggtcttggagtcgcttctcaggtcaacggcaacgtcgaagacatccccgcgcacggcccggaccagcttgcattgcgggaagtgcttttggaagtgcaggccccgcaaaacacccttggttgagcttgattggttgtcttggacgaagttgatgtcaaaaccagcttccttcatgtcgttttcgttgtaggtttccatgaagtagccacggtcatccccgtgaactgctggcgtaatcactgccaaaccttcaataccgccgacattcttttcaactttgatttgacccattttttctgactcttctttctaaaaaattaatacttcagcttgccttcagccactgccttgaggtgctggccgtaagggctcttgccgtagtgcttggcagcttccatcaacttgtcttcgtcaatccagccgtgcacgtaggcaatttcttctggggctgagatgcttaccccagtccgttcttctaccatcttaacaaagttggaggcgtcaaccaggctctgcatcgtcccggtatccagccaggcgtagccccggcccaaaagctgaacgtccagggtgttgtcgtttaagtacatctcgttcaaagaagtgatttccacttccccgcgggcacttggcttaacctgggcagctctttcgctcacgccagctgggtagaagtacaaaccagttacggcgtagttgctctttggctgagctggcttttcttcgatggaaatagcgtggccatccttgtcaaattcaacaaccccgaagcgttccggatcgttgacgtagtagccaaagaccgttgcccggccggcttccgcgttcttagcggcgttttccagcatgtcagtaaagccgttgccgtagaagatgttgtcgcccaaaaccatggcgcaaggttcaccgttgatgaagtcttcgcccaaagtaaaggcttgagccaggccgtctggacttggctgaaccttgtaagagagcttgacgccgaattgtgacccgtcgcccaaaagttccttaaagcgcggagtgtcagctggcgtggagatgaccaagatgtccttgatcccggccagcatcaaagttgacaacgggtagtagatcattggcttgtcataaacaggcaaaagttgcttactggtaaccagggttaatggatacagacgagtgcctgaaccacctgctaagataattcccttcattttttctcttccttgcctcttacttttcgtctaaaacttgcttcttgccgtacatttcctggtagtagttctggtagtcaccggagatgatgttttcccaccattccttgttgtccaggtaccattggatggtcttcttgataccgtccttgaacatggtttccggcaaccagccgagttcatcgtggatcttggttgggtcgatagcgtaacgttggtcgtgacccttgcggtcagtaacgtgttcgatcaaggagtaaggcttgtccaagtagtcgcagatcagcttaacgatgtcgatgttgtgcatttcgttgtggccgccgatgttgtagacttcaccaaccgtccccttttccaaaatgaggtcgatggccttgcagtggtcttcaacgtaaagccagtcgcggacgttttgaccttcaccgtaaactggcaaaggcttgtcgtccaaggctctttggatcatcaatgggatcagcttttccgggaattggtaagggccgtagttgtttgagcaacgggaaatagttacaggcaggccgtaagttctgccgtaagccccgaccaaaaggtcagcgctggcctttgatgatgagtatgggctagaagtgtgcagcggcgtgtcttcgtggaagaagaggtctggccggtccagtggcaggtcgccgtaaacttcgtcagttgatacttggtggtaacgcttgatcccgtacttgcggcaggcgtccatcaaaacggaagtaccgatgatgttggtttgcaggaagatttccgggttttcgattgaccggtcaacgtggctttctgcggcgaagttaacaacaacgtccgggtgttcttcttcaaaaagcttgtagacgccttcgcggtcgcagatgtccagcttaacgaagcggaagtttggcttgtccatgacatccttcagggttgacaggttgcccgcgtaagtcagcttgtccaggcagatgatcttgtagtctgggtgcttcttcatcatgtagaagacaaagttggaaccgataaagccggcaccgccggtaacgataattttcatgtaatgaacctccaagttcagctagtcaaatcaatttttcttgctgactcaaagtataaaacatgacgtaacgtaagcttcaatagggaaaataaaataactgccgtttttaaaaaactggcagctatttgcggcagataaaggttccggcgtctttagtaatgtggaagcccccggcgacctcgtcttcaacgaattgcttgaattcctggtagcggtccaagagaagggcgttttggttgccgtggcaggacaagatataagaaataactggttctgcttcacctaattcgatagcgtcctcgtagcgctggcaggtcacttgggcaaaaaacggaaccaggatctcttccccgttgtccaggccaaagcggtcatagaggttgacggaagagaggacgatttgggagttgaactcctggaccaggtcagtgatttcgtgcatgtggcgcttgctgtaagttgacgcgcagaagcggccaccttttttcaaaacccggtggacttctttaaggacctgggggatgtcgtcgcagtaaaaaagcatgtggttggcgacgaccaggtcaaactcttcgtcagcaaagggcaagtgggcagcgtcgcattggtcataggaaaagcggctgtcttcgccgatttcctttttggcatcggccagcatcccttctgaaatgtcggtcaagatgacctggcagtcctccggcagacggtcgtggctcgtggcccagagctcgccattcccgcagccaatctctaagatttttaagccaggagtcaagtccagctggcggaaaagccaggggaaccagccctccttgttcatggagtagtctcggtgcaggcggatccgggcagagatgttggtggcgttctggtactgggtcttgaggctctgggtcatggttgaccggtggagcagttccagcatctggctccagtcaacaggcttgccagcttccagggtttgggtggttgagtcgatggcggcttcaacggcggtcatttcttcaatccgctcttctaccagccggcgctggatctggagggaatccaggaggcggcgccggtcgctggcccccagggtcaggccgcggatttcccctaaggaaaagcccaggtactttaacaggcggatctgctgaagcttggcgaagtcagcgtcactgtagcgtctggccccgcccttgcttctggctgaaggcttgaggaggttctgctggtcatagtagcggatcgttctgacggacacgtgggcccgcttggcgaattcaccggatgtgtagtagtcggtcatgggaactcctttctgccttagattataaccgattttttccggacaaaaatacccttgagctcgagctggagttcaagggtgaaattttagcttatttttctatttcaacaatgcctgcaggccgctagctaaaagaccaccggcgattggccctaagacaggaacccaggcataagcccagttagccacgcccttgtttggcactggcaaaatcgcgtaggccagacgtggtgagaagtcccgggctgggttcaaggcaaagccagtcgttggacccaaagcttgaccaacaaccatgattaagaaaccaacaattaatggctttaagccttgggtgaagttgcccaggttgagcaaggtgaagatgaagacaaaagtcgcgatcgtttcactcaagaagttgaaaacagggtttttgatggctgggccagtcgcaaaaatccccacgctgttgccttcgtcagccttagtcgccttaaagtgcgggtagtagtgcaggattaccagagctgccccgacaaaggcgcccaggaattgccccagcaagtagggcattacctggctccatgggaagaagccgaaggccgcgaaaccaatagttaccgctgggttgaggtggccttgtgcgccgaattggccagccacgtaaacgcc

SEQ ID NO: 2277 - DNA, 228 bp, Unknown
  gut microbiota DNA sequence
aatcgatggtagtgactttgctttgccatatgataagcattcaccatttctatgcaatattcaaacaagaaaaaagcctttggccgataataaattaacgaccaaaggtgcttgcttgattcttgccaatatcctttacgatatcgcaaattgttgttacctagactgtttattgcaatcacgaaagggtatggatgaacgcagtgcggctgtgcacatgcttcagac

SEQ ID NO: 2278 - DNA, 845 bp, Unknown
  gut microbiota DNA sequence
ctaaacgaccggactacaatccaggagctgcactctaagggctactctaatcgtgctatagctagagaacttaactgctcaccaagcacggtcggatatgagcttaaaagaggcacagtatcccgtataccggcaatgtgaagcggtataaagctgtcgaagggcaaagcacttacgagctacatagaagcgaatgcggccgcaagagcttgtttcttcgcagacataagttcatcgactatgtttctcactgcttccataatcaaggctggtctcttgatgcttgcgtgggttatgctttggccaagggaatctttcagaaggatcaggttgtatcaaccaaaactctgtataactacgttgacttgggcctaatggatatcaagaacggtgatcttccagagaaggtcaagcgcaatactaagactcgtcgtgcccgtgtaaacaagcgtatcctgggacgaagcatcgatgaacgtagtcctagaatcgaaagccgtaaggactttggtcactgggaatgcgatctggttcttggacacaagactaaggacgatgatgtgttgcttactctgtgctaacgaaagacgcgtcagttcttcatgatcaagatcgaggataaaacctcagctagcgttatgaaggcatttgataagcttcgagagtactacggatccaaatggagtcaaatctttaagtctatcacaaccgacaacggatctgagttcgcagatctatccgatcttgagcaagtttccaagactcttgtgtactacgctcacccttatacatcctgtgataaaggcagcgtagaacggcacaacgggcttatcagacgctatatt

SEQ ID NO: 2279 - DNA, 799 bp, Unknown
  gut microbiota DNA sequence
atcaaatggaggattacccaagtggcttaaggggacggttttgaaaaccgttagacggggcgactcgtgcgtgggttcaaatcccacatcctcctttttattatcgcgggatggagcagtctggtagctcgtcgggctcataacccgaaggtcgttggttcaaatccagctcccgcaatatggtccattggagcagtggtttatctcgcctccctgtcacggaggagatcgcgggttcaaatcccgcatggaccgtttgatggctcggtagctcagttggtagagcaatggattgaagctccatgtgtcggcggttcgattccgtcccgcgccattgaaaatggaggaatagcgaagtggctaaacgcggcggtctgtaaaaccgctctctctgagttcagtggttcgaatccactttcctccataatagggatatagtttaaaggtagaactacggtctccaaaaccgtcggtgtgggttcaattcctactatccctgttaacagaatatggcggtattggtgaagtggttaacacactggtttgtggatccagcattcgtgggttcgattcccacataccgccctagccgaagggcagaaaagaataatcgtggcggtgtagccaagtggtaaggcagaggtctgcaaaaccttaatcgtcggttcgactccgatcgccgccttaggcttaacggccaagtagaatagcatggcggtgtggcggaattggcagacgcgtcagactcaaaatctggtgtccattacggacgtatcggttcgaccccgatcaccgctat

SEQ ID NO: 2280 - DNA, 243 bp, Unknown
  gut microbiota DNA sequence
aaaagccgattgtcctgtatcaccatggatcacgaaaaggcaccgaagcatgggatttcctcacaggctttagcggataccttcactgtgatcaatatcctggctatttacgattaagccaacaagatgtgactcttataggctgtatggctcatgtaagacggaaattccatgattccttgcctaaagacaaggccagagaatccgacgcaacttcggtggctaatcaagggatccactact

SEQ ID NO: 2281 - DNA, 209 bp, Unknown
  gut microbiota DNA sequence
tttgaaattgacaggtgggccgtgagattgccagattcataaacttgaggatcaacaccaacgaaggcatttaattggctagggttgttaaaacgtctgatatctccaagctcactaatgattcttagagcagtgttttcgccgatgcctggaatgcttgtgaggatctccagatcccgtttaggagccagcttagccatctcctgtaa

SEQ ID NO: 2282 - DNA, 800 bp, Unknown
  gut microbiota DNA sequence
attcgctagagtcttttttcccagactcgtcatatctgccttctgttgaggcagatccttttgcgtatactgtttagcggccttttttagagtagttgatcagatacttggccaaagtaattaggccgaagactgccaagatgactacgatgaccgtcatgattgtaaaccaaggcattttcatcactcccaatgttatgtaagctagtatttttatgtattataatatcattgtctttcacttacaatctctaaaccgggttaatcaataatagccaggctgtttctttccagaactgttgcaattttcttcatttcgtcttcagtatcgtctgacagtgttagttgtaagatcagagcttcagcttcatctgtagttaatcttaattggtagccatttctgtggagaaataagagcgtactaatgtacgccgtgcgtttatttccatcctcaaaaatatgtttcttggttattttttgcatgatgtaggcagctttcagccaaatagtcgggtaaagttctgtgccaaaaacaaccatctgaggttgctcaactacgacagacaaaccatgagggtattgcaagcctgttgctttttgccccagtctttctagaactcgtttattaaccgctactatctcttcagcgcttaagtatttcattcgtctttcagccgctccatcaattcgcgattttcgtcaaacagtttatcaattaaagcaagtgtttcaggactaacctttttcctctttttaaaagtaattgtttgaccatcgggagatatttctttatcaaaaac

SEQ ID NO: 2283 - DNA, 225 bp, Unknown
  gut microbiota DNA sequence
attgccttctttgaatcattgctgtaacgcttgctagagatcagcttatgaacttcaaggcgctgcttgatgcggtcaagcaccactgtgatatcgccggtgcgtggataactccacgggctggtcatctccacagaaaactgctttctaggcacgtctgaactgaatgaaaaagtatttccttcaaatgcccaattcaagtcacacttcatgctagagccaagc

SEQ ID NO: 2284 - DNA, 848 bp, Unknown
  gut microbiota DNA sequence
tccagttgctcaagctgctgattgagctgccagcgcaaactcatatatggctggcgatttgcgtttcgcttgccgtatttgtcaacgatggcattggcaagcttactgaagttttcaccatattcattgccgctgctgcaggaaagcagggtggcaagccccttgtcaatgccgcttgccttctttgaatcattgctgtaacgcttgctagagatcagcttatgaacttcaaggcgctgcttgatgcggtcaagcaccactgtgatatcgccggtgcgtggataactccacgggctggtcatctccacagaaaactgctttctaggcacgtctgaactgaatgaaaaagtatttccttcaaatgcccaattcaagtcacacttcatgctagagccaagcctgcccgacttccgtgcccggtagtggtagcggtacgtaatccggcgcaggtagctgtgcgcttgcttgatttgcttatccgtcagtttagcttctatttcagttaaagctccagtgtattcttctggcagctcaattggcttgtgaagaagaacggcttgccatgcgctcttaaatttcaaaataaagaacagaaggtggcgctgatctgcagaaaaattttcatttccttggatcactttcttcaaacggttagccagattcgaccacatgctttttatgttggcacatgcctcacggagagcaccaacccagtgcttggtctgaaaattgtagactgtttccagcttgccttttgagcctttaaccggcttgtcccacttgcgaacttggttgcgcagagcctgccagttattaaccgctagcatcgacttgatgccgcagtagcg

SEQ ID NO: 2285 - DNA, 445 bp, Unknown
  gut microbiota DNA sequence
tagtagattacgcgctaagctgtggagcaaatactattgtgattggcaagaacaagacatggaaacggtcagtaaatatgggcaagaaaaacaatcagaactttgttggcttgcctcaccagcagatgatcaatatgatccgctacaaggccaatatggtcggtatcacggttatctgcacaaatgaatcgtatacaagtcagactagtgctcttgacggcgaaaagccatgctggaacaatggcaataagagcagaaaaaagcaagggctgagcccagccaatcggcgcattcaccgcggcatgtttagaagcaacaagggtttgttggtcaatgcggatatcaacggtgcaatgcaaatagtaagaaaagtattcccgaacgtctcatttgcgaacgggatagtggatgctgtgttgcatccagccaaatggtctcctctcat

SEQ ID NO: 2286 - DNA, 26401 bp, Unknown
  gut microbiota DNA sequence
gagaaactcatcggctgaatgagacgacaaaaacagcactgacttcttccaacgtgccaagccgtacttgtccttgatgaagccagttttaattttgttaagtaggtactgaatgggcttttggctaaatggcatagggcgtccgatatgcttaacgccataagtcttaaagagatactttaaagcgtactgaaacaaagcactctgcgtttttaatgctttctcatgctggattttttgcttgtcagtcagcaacacatggtattgtctggtaaatccatacttttcttcattagacacggatacacaccttctttcgtccttctttatgctataattataccacaaagaaaggtggcatacactatgatcgttcatgaaagaggctgcgtttataacttcaatttccatctggttttcgtgaccaagtaccggaaagaagtctttgacagcccagaaaaggttgaagaaatgaaagggctgctccaaaaaagagcggatatgtcggacatccagatccaggaaatggaagtaatgcccgatcacgttcacatgcttattccattttcgccaaaacagaggcccgtagacgtagttaaagagctgaaaggctggacagcccggaaatggttcgagctgcacccggaaactaagcagatgctgtggggcggccacctctggtcaccaagctattttatgagcaccttaggtgacatgagcaaagaagtcgttaaaaattacattgcatctcagtacacggcagccatgaaaaaacagcagaatggcaagtatggcgagttggaaagaaagagaagaaagagaaactaaaaaacgccccattggggcgtttttgcgtgcttgactcatgtctaaagacacgagtttgcgcacgctttttaatcaagatatccgataaagccaccactttatgataaaataggttactaaacaattttcaatttacgaatgaggtgtgctcaatggcttttgacggcttatttattcatagcctgcttaatgaattacaagatgagattactgctggccgcttacacaagatctaccagccttttaacaacgacctggtcctggtcttcaggaaggaccgcaaaaacaagcagcttttaatttctgctaatcctgaatatccccgcctctacctgagcaaggagtccttctccaaccctaacgtggctcctctcttcgtcatggtcctgcgtaaatacctggaagggtcagtcctccaggaaatcagccaggttggccttagccggatcgtaaacttctccttcagcaaccgtaacgaactcggtgacgaaatacagctgatcctctccgttgaactgatgggccggcacagcaacgtcatcctctatgacaagcaaagcggcaagatcatcgacttgctaaagcggatcaaccctgacgaaaaccgggcccgcctcctcttgcctaaagccaagtacgaactgcccccgctgactcccggcatcaacggctttactttaacggaatcagaattttcttctttgaaaaaagaatacccaaccccagctgacctggccaagcaaatggacggtctagatggcgatgaccggcaagaactgaccggctacttggaagacgactactccttctcttctctgaagaccttctacaaccagttctcctcccctaaggcctacgttctcgtgacgccaaagcacaagcggcggatctacccttacctgccatatcatttggagatgaccaaggaaagctcctccactaacttaaatgaagccttagacgagttttacgcctaccaggccaaccgggactgggtcaagcagcggtcccagcaggtgacccgggtcgtcactaatgagaccaaaaagctccaaaagaagctgaagaagctggaaaagcagctggacagtgctgaaaactccgaaaatctcagagtctccggggaacttttaaccgcctacttaagccaggttaagcccggcatggaaaaaatcgacctgcctaactactatgaaggcaaccagcccatgaccatcaagcttgacccggccctctcccctcagcgcaatgcccagaaatacttcaagcgctacaaaaagatgcgggattccatcaaacacgtgaccgagcagattgagattacggaagaaaacctccgctatcttgattccgttcaaacggaaatcgacaacgctgacccagaagacgtcgaagccatcaaggaagagctaatcaaccaaggttaccttagagctgaacaaaagaagcgccggaagccgaagctgaccgaaaagagcctaaacaagttcaagctcagctccggcaaaactgttttagtcggcaagaacaacctgcaaaacgactggctgaccctgaaaaaggccgacaagaaccactactggttccacgtcaagaacatccccggctcccacgttatcttgactgacagccagccaagtgacagcgacatccaggaaagcgcggagatcgctgcctacttctccaaggccaaaaattccgcccacgtgccggttgactatatccaggtcaagcggatcaagaaacctaacggggccaagcctggcttcgtcatctacaccgggcagaagtccattgaagttaccccggaagctgacgagattttagctaagcggattgactaagatgcaaaaaagaaccgtattatcccaaaatggtagtacggttctttttctatatattctaaagaattagttcttaaagctgtgcactggggctggaatccggccgccgcggttgatcatcgccgcgcttgattccttgtgaacaggcataatcggggcatagccgaagaggccgccaaattcaattgagtcgcccacgtccttgcccggtactggaataacccggacagccgtggtcttgttgttgatcatcccgatcgccgcttcgtcagcaatcatggcactgatcgtttcagctggcgtgtcgcctggtacggcaatcatgtccagaccaactgagcaaacagcggtcatggcttccaatttgtcgaccgtcaaaatccccttttcagctgccgtgatcatcccggcatcttctgattcaggaatgaaggcaccagacagaccgccgacatggctgcaggccatgatgccgcccttcttgacagcatcgtttaacatggccaaagcggccgtggtcccgtgggtccccacgctttccaggccgatttcttccaaaatattggctaccgagtcgccttgggcaggagttggcgccaaagacaagtccacgatcccaaagtcgacgcccaggcgcttagaagcttcctggcccaccaattggcccattctggtaaccttgaaggccgtctgtttgatggtctcagcaaccacgtccatagattcgcccttaaccttttccagggccgtcttaaccacgccagggccggatacgccaacattcaaagccacatcgctttcgccgaccccatggaagcccccggccataaacgggttgtcttcaaccgcattgcagaagatgaccaggttgccgttgttcagcgggttgatcttttcgttctcaatgacgatctggcccatttccttgacggcatccatgttgatcccgcttctggttgagccgacattgacactggagcagactctttcagtttcctttaaagcttggggaattgacttgatcaagacccggtcgccgttttggtagcccttgtgcaccaaagctgagaagccaccgatcaggtccacgccgactgctttggctgccttgtccaaggtaatcgcgtacttaacgtagtcgctatcccctgaagctgccgcgatcaaagaaatcggggttacagtaatccgcttgttggcaatcggaatcccgtattcagtttccagttctctagctaccttgaccaggttttccgccttagtcgtgatcttgtcgtagatcttctggcaggcccggtcactgtctgagtcaatacagtctaaaagtgagatccccatagtcgtcgtccgcaagtccaggttctcgttgtcgatcatattgaccgtttctataatccgccgcaagtccattattccagacctccgcccagttcatgcatggccgcgtacatcttttcattccgaatgttgatttccacgcccagtttcttgcccagttccttcaattccgtgctcaaggcggagaaatctgcctcatcgctgacatcaacgaccatcatcatcgtgaagtagccgttcatgatcgtctgggacaggtccagaatgttaatgtctttttcagctaaaaagctgcttacgccggcaataatcccggtcttgtcctggccgacagttgtcaaaattgctctcatcgcttgccctcctgcttgcaaagcttatatcctgatcaggataagaaataaatttaatttggattaaaaagttctgttttagaatagcatcttttaaattggctgggtagtcaaggccagcgattccagaacatcgaggatcaactggactgtttccaggctggagaaaaccggaatatgggtattcagggcctggtccttgatcttgatcgagtcttccactgccgagtccgacaggttgacgacattaaccaccatcacgatccggtgggtctggattctttccaaaaggtttctagacccatcctggatcttggcgataaccccggtcgtaatccccgcctcagccagaatattggccgtcccttccgtggccgtgatcttgaagcccaggcgggcaaagcgcttggccaggttggctacttcctgcttttcctcatcgctgactgagaagaaaatcgtcccataacttggtatatgcaggtcgctggcttcatagcccttgtaaagggccttggccaggcggctgtctctgcccatcacggcatcagaggacttcatcctggagtcaaaagtattgtctgaactgtaattgaggtaggagaagactggcatcttcacgtggatgaactcgtcaaccggccagacctcgttcgggtagcctaaatcagcaatctttctgcccgctaagaccttaaccgcgtattcaaccaggtccttgttcatggacttggacaagaaggccagattatgaccggcataagtcttgatctgaagcaggtagatttccctgcccttgagcaaaaagtgcaggttgaagatccctctgatcttgaagctgcggatcagcttgattgtttctacccgcagcttttccgcttgctccttgcttaaatactgggggccaaaaaccgcgatggagtctgaggcgtgggacccggactgctccaagtgctccacgatccccgggatagtcacgtcttccccatccgtgatcgccgtaatctcatacttcatccccgagataaactgggaaatcgtataatcatcaacctggttttcccgaaagtatttctccagggccggctggtcatagaccacggctgacttttgcttgctcttttggtgatagcccccgaccaagaccggatagcccacccgggccacaaaggctaaaactgcctggtagtcggtcgttgccaaatatggcacccgtttgacctcagaaatcttggccgtgtctaagtggctgatcggcaaaaggcggtcaatctcgtgctggccaaaaatcttcaaaccgtggctcatcaaaggcaggcgcaaggcggaaacctgcttgccggagaactgggtgaccacgtccgtgatcccttcttcttcgcagatggtgatgatgctgtccaggttgatcgattcaaaatagacccggtcagccaagtggtagtccatcgaggcagattccgcgttgttggacaaaaggaccgtctcatagccctctttcttcaaggccgccagggcatggtagagcatgtagtcaaattcactggttactgacacctggaagggcggcatccccagcaaaagaacctttttcttctccggatccttggaaaattccaattcgctttccaccccgtagctctggtagtagaccttgacttcgggctggtagaccccggcgctgtcatcaatcgctgagaatgagggccggacgtctttttcattcagcaaaggaaatatgtcatggacgtccatcttagtcaatttggccaaaaggtcgctggagaagccccggatcttggcctttaaaaggaggtcatggtctaattcacccgcatgggcaatgtccctgccaatcttgaccaggtagcgcagcttctggtaatagaccggatgaatattcaagacgctgcttatggcctgatagtcgataccctggctaagggcagccagcagctggaccaggtgcatttcgttagggtggcggaggtcatccaggatcacctcatcgctctcgcccctttccttgataaaagctgaccacaagacttccagatcattgctggaaatcaaggccttgaaaaaggcactttcaaaattccgcccgatcccgaccgcttccccggttgactgggtgtgcttgcccagctggtagtggttgtagccagtcttggcaaaggaccagtaaggaatcttgatgctgacggtgtcagagaccggttcaatggccgcacacaggccagtggccgggtcagtgacttcattcagccgcagcccgatcgccagcttggctaaaacatagccgattgaatacaggctggtcttttggtccaagacggcggttctggtcaagcgtggcttaacggccaagagcttgtagaccatttccgtaccccggtggctgatggcgaagtggacgcttaaaaagccgaccagctgcaatttgtccgctatcttaccagcttctgcccgcaggacttgaatttggtcattgttcatggtcaaaagcggcttaatcaagactgagtcgcctgagtcaatcccgaccggttccaaagacccagtcgctccgacaaaacagaggttgccgtcttcatcacggagcaggtccaagatgacctcttcacaattagacaagtcttccgtcattcggtagctggccgggcggaagtcccggtcctggctctcctggcgcaggtactgggctaaatcccggctgctcttaaaggagatgtggtcatcgcgctcaaagtagtactttttgatcaaaagaatcgggaaagagagcttgttttccagctgctcttgcaagtgctcgtcgtattttaaacccaggctgtctaaaaaccaggtctgcccgactggcagatgattggcttccaagaaacgggtccgcttttgcgggttggacatggaaatggccctcacattgatcgttaacagcttgatccccatctggtggaggattccgtcagcctgcagtttcttggtcacgtccagggccatcaaggaaccaaaagccgtcatgatcgcgtcgggttcttccatccggaggatccgcttcaagaagtccaaggtcatcggttccaggtacacggtcaagcccggtaaggggtcggttgagacgctggctggattggggttgaccaggaccacctgaatattctcttctaagagggcctcgatggcgctcttggtcaagaggtccgtattggccacattgcccaccagggctgagccggcaccaataatcaagattttgtttaaatcattttcgcgtggcattatttcaccagtttcaaaaagtcgtcaaaaatcacctgggcatcttccgcccccggggctccttccgggttaaaggccaccgccagcagctgcagcttatcattgctgaagccggctaaaagctcattgtgcaggtcgaaatactcttcattaaaggtcatggccgtgtcatccggcaaaaccagctggccaatattcatggccgtctgccatatctgtccgctgctctgcccgatcaccgggaaattggtcccgttctggtactggggcaggtcaaccaggctgaggtccaggtaggctgaaatcgccaaaaagcccaggccgacccccaggatcggcagcttgcccagatattcatccaaaatctgccgcaagtatggcaaaacctctttggcctggctggggccgttagagataataatcccgtctggccgcagggtcttgatatcgcggacagtcgcgttatatggcagaacattggcattgacctgtcttaatgacagttcccgcagcatggagtgcttgaggcccaggtcgataatggcaatcgtcttgccgacgttaggagcagcataggcgttcttggtggaaaccaaagagctcttgtttttcggtaaaaccagggctctgatctggtcaaaggcgtgttcatcattggtatccatgatcgaggcctttaaaggacccagattctgcagttttctgaccagggcccgggtatcaacgttaaaaattgccggcacctttttttcctgcaaaaagtcgcccaaagactggaatgtgtcattgtcggtaatgttcaaggcaatgtcgttggcaataacgccgcggacactgggctggatgctttcgtagtcaaccgcgttgatcccgttgctgccgatcatcggggtagtaaagacgataatcttgcccgcgtttgacggatcagttaaaacctcttgatagccgtaattgctggtctggatggccaattcgcccgtggcggtgatcatggccccgatgccgtcaccggcataagagctgccatcttcaagaataaggtagcggttcatcctatttcacccgcttctttcgcaagtctgcaaccgtctgctggaaaatttccggcggctggacggagaactccagccactcacctgttgatggctgctcaaagcccagggtcttggcatgcaggaactggccatggccgggcagggtctttctcggcccatacaaggggtcacctgctaaagggtggccgatataagccatatggacccggatctggtgggtccggccggtttccagctggcactcaaccaagctgtagccctggtattgctccaggaccttaaagtgggttaccgcgctcttgcccttttccaccaccgccatctgtttgcggtccttgggattgcggccgatcggggcgtcaattgtcccttcttcttccgcaaaattgccatggacgatggccaggtactggcgcttgttggatttggcggccagctgcttttccagtgattcccgggcagccgcgtttttcgccaccatcaagaggcccgaggtgtccttgtcgatccggtgaacgatcccgggtctaaagccttccggactgtcggccagatccctggtgtggtagagcaaggcgttaaccaaagtgtggctggggtggccggcggccgggtggaccaccatcccctgcggcttgttgaccacgatgacgtcttcatcttcatagacaatgtccaggggaatattttccgcttccagctttaatggctctaacggcaaaacggtgacctggatcaggtcacctttctgcactttatatgaaactttgctctttttgccattgaccaggacttccccggcttggaccaattccttgatccggcttctggacagattagtcatttcccctgccagatacttgtccagccgctggccgctttcttccgcggtcagttcatactcacggttcatcctagtcctccctttcaatgaataacagatagctgaagatcagaatcacgccaacggtaatggcagcatcagccaggttgaagatattgaactgcacaaagtccagctgaatcatgtcgatgacatacttcaaatgcaggcggtcaatcaagttgccgatgatcccgcccaaaaccagaaccaggcccgacttgaacatccagtggctgtacttcttgttgaagtagtagtaaagcactacggcaatggcaacagcgctgactacgtaaaagaaccacattttaccggacaagatgttccaggctgccccgttattctgaatataggtaaaggagaacagccccggcatcacgtcgtggacttcgcccaaacggtaatttgtgacaatataatacttcaaagcttgatcagctgccgcgatcaaggcagcgatcactaatccaactatctgcataatcctcttttctagaacaaaccactgatcttgccggtttcgtccacatcaatatccaaggcggccgggtgctttggtaggcctggcatgtccagaatgtggccagttgaaacgaccacgaagccggccccgttgcggaggctcaagcccttgacatgcaaagtaaagccggtaggagctcccaattccttgacattgtcagtaaagctgtactgggtcttggcaatgatgactggcagcttgtccttgcccatcttcttcaattttacaagctggtccttggccttgtccgtgtattccacgtcagccgcgtggtagatccgcttggctaccttttcaatcttggtttccaggtcgtcatccaggtcgtagctgcgcttgatttcgtagtcgctcttgtcggccagttcaacgatcttttcagctgctgccttagcccccttggagccttcatcatgggcagtcacgatttcgcatgggaagccttgttcttcaatcaatgacttgagcaggtcaagctctgcttcagtgtcagttgggaacttgttgataaccaccaaaactggaatattgtatgaacggacattgttcatgtgccggtccaggttagcaaaaccttcctttaatgagtccaggttttcttcctttaagtggtcagttgacttttcagcctggtacttcaaggcccggacagtcgcaacaacaacggcggcatctggcttcctttccagcttggtggaaacgaagtccaggaacttttgcccgccaaggtctgaaccaaagcctgcttcacttaaaacgtagtcactgaggtgcagagccaggttggttgacaggatagagttgttgccgtgggcaatgttggcgaaaggtccgccgtgcacgaaggctggagtgtgttccaaagtttgaaccaggtttggcttcagggccgttgacaaaagggcagcgatggcaccttggaagcccaggtctttgataaagactggttcatcctcgtaagtgtagccgaccagaaccttgccgattctttcctttaagtcagcaatgtccttggacaggcagagaatagccatgagttcgtgacccacagtcaactggaagctggacgggcgttcaaccccgttgaacttggatccttggccaatcgttacctttcgcaaggtccggtcgttaacgtccaggccgcgcttaatgacgatcttttccgggtccaggcccagttcgttgccttggtagatgtagttgtcaaccagggctgacaggttgtcgatggctgaggtcaaggcatgcatgtccccggtaaagtggaggttgatgtcttccattggaatgacttgggcatagccgccgccggcagccccgcccttcatcccgaagactggccccatggatggttctcttaaggcaatcaccgtcttcttgcctaattggttgttgatggcatccccgatcccgatcgtcatcgtggacttgccttccccggctggagttggtgaaattgaagtcaccaagatcagcttgcccaggtggccgttttcttcactgcgcttgattgcctgccagttgaccttggccttgtcgtagccgtatggttcaaggtcttggctggtcaagcccagcttagccgcaacgtcagtaataggcaattcttctgctgcttgcgcaatttcgatatctgatttaaccatttctgtcacgctttctcttaaaaacaagataatcaatgctttgatgcttggaaacccgcgcccggtggacttcaaagccacgccaactagtcaccaattctggtttttcctccaggacgaactccttccggtaaggcaaacgcaagcgcgtctgaccgtcaaaagaaatgtaggactttttccatgtaaaaacaagcagaagcaggaagatgatgccggttatcacagtcggcaggttgatgaactggctgccttccagacagaagatcacagtcaggaaaagcaccagcaagagccagctgtaataaatgacgccaaggtctcctaaaaagatcaaatgttttttcatgaaaaactccttgtcactagatatctagattatagcaaaaaagcaggaaaataccgaaaaatacgaaaaatatttttaactattgtttttaatattcggtaatcaagttatagttaggaccttaagcaaagaaactaaaaaaatgatcggcttttcaccaggtcaaatctaacttttgacttgactgggtgctctcgtaaagggagctgatataacttttcatgctgggcatggctgccaacaaagttcggtaggcgcttgattcataaattgccgcgatctcggcttcactcttatagctttgcccggtgaaaaagtcccagtgcatctttttgagcatttccgcggcttccggcaggtcctttgctgctcccttgagcaagtgctggcgcagaagcaggttattgctctggtcaaaaacttccttcagataagcgtgaaaatccgcaaaaggcggcagctttttctcttcagccgttaaaaaattgtcaatgtcaaaagcgtggcgccggtagctgagggaattagcagtcagctcaactatcccatagccctggtcgctttccgcgaagcaggatgaaacaacctcgggaaccgggacccagccggacatgatgtgctgggcatggatatggccggaaaaagcgcagcggaccgggtactgactgagcaactggacaatttcaccggtattatttagtttaaagccgtcatgaaccactgaattgtgactgtagaggttatggtgcatgaaaaagaggacgtcttgtcccagtcttttggcctcaaccaattcctggctcagccaccgcctttccccatcatcgatggccccgctggtcataggatgggtgtaggaaaactggctgctgtacaggttggagtccagcaaaagcagacgccagtgcgggttcaagttgactgaatatgataaagagcctggctcctggcttgcggctaagtcatagctggcggaaaaaattcccttccagtcagccggtgaaatttgcgcaacccgtctttcctcactgccactaaaacttctggcccagccgtcataaatgtcatggttgcccggaataaccagcaaggcaatccccgcttcttttaagggggcaaaaatctcccccagcctttcagctgaccgcttggccccattaaaggtcaagtccccggtaatgatcaaggctgccggcttggccctgacaacttttctgacaaaagccctgagagccaggtcctggtaggcaatgtccttgccagcgctggtttgccgcatctttttaaacctggcgccaaagtcatgcaggtcatcggcaattaagtggggatctgagatcagccagaagtctggccgttcactatccgtaatcgtcttcatcagcatatctcttctttacttgcgcttggcccagaactggtagtagtcagcccggaggttaccattgtagagcttgcgcttcttgctggccttttgcccgaagcacttttcaaaatccgggtccgccgtcaagtagtactggctgaaagaagtcagcggccgcaagacttcccccatctgccggtaaagctcttctgccccttgcttgtctttcaaacgcttgccgtatggcgggttggaaacgatgaccccgttttccagatcggtggtaaagtccttgaccgcgacctgcttaaagcggatgtcctgcaagaccccggcattgtgggcattcagcttggctacttccagaatcgactggtcgatatcgctggcccaaattggcgcttcagctggcttaacctggctcttggcttcttccagcagctcttcgtgcaggctcgggtcaaaccagtcaaagtcgtcaaaggcaaacttccgccaagtgcccggggcaatattgcgggcaatcaaggctgcttcaattggcagggtccctgacccgcacatcgggtcaataaatggatgggtcccgtcatatggcgtcagcttgatcaaagatgccgcgaagttttcctttaaaggcgctcccccgtgctcaatccggtagccccgcttgaaaagactttccccggtcgtgtccagcgacaggcggacggtgtccttgtaaatgtgcacgtccagctggtagaggctgccgctttccggtagcttgccccgccggtagtattgggccgccatcttgtcaacgatggcttttttcacaatggactgcacatccggttcagagtgcagctttgagcggacactgcgccccttgactgggaaggccgcgtcgactggcaaaagcatggcccagtcataagcgtaagtttcatcatacaaggttgagaaatctttagccgtaaattcctttaacaggatcttgacccggtcagctgttctgagccacaaattgcatctgacgatgtctttctggccgcctttaaaaaagaccctgccgttttccgtcgtcgtttcatagcccaaggactgcagttccttggccacgacgctttcaaaacccgcccccatggtcgtgtacaattggtattcttccatcgctatctccgttcttttccttctgattcttattctaattactattctgattttatatttgcaagcttattcctaaaagaagaaaaagttgggcttcaaacgaagtccaactctctgccttgcaaatttctataagccacgttctgttccaccaaccgccggccgcggctggtttcagcagccatctatctctacatgatgtagtccaacttttggttcattttcctaagttgagacgcccctaccaaattttgggttacacgctcgcagggtttacctcgttccaccaagccggtttcccggcttgcttcgtcactgtggcactttcaagatattcacgcatggctaggctttagcgctttctctgccgtgaggcctggggcctcctccagcttattgggctgaatacgatcactacgggcatcgcagcccgtgcgtgcgtggactttcctcagccggctcaaggccggccgcgactgctcaaaatttgcgacattactattatagcaaactttctttacttttgtaagtcctgaattccgtaaactctttgttccaaattgtagaccttccgctccaaggttgaaagtctttgaatgattgccatgttggttgagatttcgccgctagtgctgctgttatccaggctgaagtcggcccgctgcctttgtgagcttggcacgtaggtcttaacgtcttcttccttgctttcagtagttgctgatgccgggacggctgccggaatttccttgacggcctgttcttcctgcttgacctgcttctcagcgtcgattacctgcccctgcagttcaccaatccggccgtaaaggtcttcaatgatgtcctggaaggtttcatagtcggaaatgatttggtccaggtaagaatcaacctcatccggatcatagcccttgaccttgcttctgaactgcttcttcaaaatgtcctgcgcggacaacttaatatcgtttaaatctgccattaactcttgactcctttatactaaagtcattttatcaaaaagagcccccataaaaaagaaagaaagagttaaaatttaccattccctttgattttcttcataatccctggcggcctgttccaggtcataataatcgaccaggtccagctggtagtcatcccgcttttccaggtatttttcgatcatctcgtagtcatacttgctcttgcccgggtattccgggtcatagaccagaagggcccggtcggtgtgctggaacataaactgctggtattcccggaattgccggccgccctggtagggtccttttgaagttgcggaccagaagtcagcttgatttttcaaattctgcagcttgagctggttgttttcgctccagcggctgccaaagtcaagataaggcagcatcactgccaggcgcaggttatagtcctgccttagttccagggccacttccgcgctccactgctcaacgcccaggttagcgccagtgatgacccagtccaattgcccttcttccagcaggttggtcaggcgctgcttgatggcatacttgatcaccgtgatttttggatccttgtcgccaaaagttcccagttcatagctctggtagccgctgatccaaattcgctgcatgcaaattcctcccttaatctttttgctttgccagttccttaaaaacattgtaacattaaccacaaaagcaggaatgatctagcttcagagtcagtttgcaaataatctgattaggtttctcaagtttttattgttataatgacttccaggagtgaactttatggtcaaatatccaactggatctgtcatgccccttagggcagcccagcggcaaggagaaaaggccctgcttaaaaaggccagcttttctgaccgcgggatgaccctggagcagcagatcaatgaatcaaaccagtactaccttgacgcgggcatcgcggtcgttcacaagaagccgaccccgattcagatcgtcaaggtcgactacccaaaaagatcgagggccgtcatccgcgaggcctactttcgtcaggcctcaacgactgactacaacggcgtctatcaaggctactaccttgattttgaagccaaggagacgcgcaacaaaacttcttttcctttaaagaactttcatgagcaccagatcctgcaccttgagcagtgtttggaccaggaggggatttgctttgcccttatcggcttcatgaccctggagcgctactttgtcaccccggcatcttttttgattcaagcttggcaaaactggaaggctgccggcaagagttccatgactcttgctgaaatcgaagctaattcctttgaaattaaaagcggattccggccagccctgccctatttagaggcggtcgaccggatcattgcggataggaaacaagaacatggcaacaaatagtccagagcaaaagaacacgcggatggcccgcctgcacgccaatgacggcgccaagaaggcccggcccgttctgcgggtaattaaatggctttttctgctctttttcttgctgatcatctccggcgtcggcgtcttcgcctactacgccaaagacgcgccgagcatcagcaccgccaagctgcaaagcggcggcacatcaagtttttacactaccaacggcaagtttctaatgtcactgggttcacagacccgggtctatgctaaagactcggccattccccagactttgaaagacgcggtcgtctctatcgaagacaagcgcttctactctgaaagcctggggatcgaccccctccggatcgtgtcgtctttcttgaccaacgtcaagagctccagcaccgtggccggcgggtccaccatcacccagcagctggtcaaattgacctgcttctcaaccgccagctcccagcggaccctgtccagaaaggcccaggaagcctggctggccatgaaggtggaaagagaatacagcaaggaccagatcctggaattttacatcaacaaggtttacatgaactatgggacctacgggatgggaactgcagccaactactactatggcaagtccctcaagcagctggacctggcccagctggcacttttggccgggatgcctaacgccccggtggcctacaacccttacctttacccaaagaaggctaagtaccggcgggacctggttcttaaggccatgtatgacaacaagaagattactaagaagcagtacctggtagccaaggctgaagacgtacagaagggccttaagaagcacacgaccagcactgaatccaagctgcgcaaggtcgacgacgcctacatcaaggaagcaattgctgaagtgcaggctaacggctacgacccatacaatgacaacctgaagatcaccatcaacatcaaccaggctgcccaaaacaaactttactccctggctaacagcggcagcgttgcttttaccagcaagaagatgcagatcggggccacggtcatcaacccgaagaacggacatgttatcgccatcctcgggggccggaagttgccgtcagtccagctgggacttgaccgggcagtccagacaggccggtcaaccgggtcaacgatcaagccggtcttagactacgctccggcaattcaatacctcaactggggaaccagccacatcctgcaggataccaagtacacctacccgggcactaatatccagctttatgactgggacaacacttaccaggggtcaatgagcatgcgctatgccctggttcagtccagaaacgtgccggccgtcagaaccttgaatgaagtcgggatttcccgggcctcactttttgccagaaaattaggtgttaacgtcagtgccaatgctggtctttcaacagctatcggggctgacgcctccagcttgcagatggcggctgcttatggggcattcgcgacgatgggcgtttacagaaagccgcaattcgtctccaagatcgaaacggctgacgggcaggtccgcaagtataactctgctggcaagcgggtcatgaagaagtcaactgcctacatgatcaccgacatgctcaagggcgtcttcaccagcgggaccgggaccacggccaaggtcagcgggatctacgaggccggtaagaccggtacggttaagtactctgactccgacctggttaaatacccaagctacagctcaacgccaaaggattcctggttcgttggctacaccaagcagtattcaatcggaatctggacaggctatgacaatttgaaggacgggacgatctctggagtcggccagtactcagcccagctgatctacaagtacatgatgtcctacttgatggctgacgaagacagcacagactgggaaatgccagcaacggtcgtcaagaagcggattgtcaagaatactgaagacaaagtagcctcccctggccagccctacacttgggaactctttgtcaaggggcatgcgccgactgacgctgactatgtctcctcaagcagcgatacttctactgcttccagttcagccgtgacttccagcgtcaaatcaagctcaagttccagctcctcgaagagcagctcgagttccagttcaagcgagaagtcctcgtcttcatccagctcttcaagttcaagcgcggcttcatcaagctcggcagcttcttccagccagagcagcgaggcgccgaagactgaagaaaataagcgagacaacaataatgatgacaagcaggataactaagctgctgaattaataatttatcgaaaaagccagagcaactgatttcttcaaggccctggcttttttatctgctaaaatatatagcaacaggataaaaaacaagaatatctgtcaacaagacttacagaaatagaaaagaggaaatcatggacgcaattaaaattgaggactttttgcactatgccaacctgggcaagctcaaggccaagggtcagaaccttgtctgggtcaagggcctgccagatgccagcaaaaaagacaaatacctctacacattagagaccttgcaagacgggcaagtcagcccccttagctcctttggccaggaaagagacttcgtctttctcgatgaaaacacggtttgctttgccggcaaccggaccaaggaaaaggacaagacctttatctaccagctttctttaaagggcggtgaagcaagggaaatcgctgctttagagggagaagatttcgcggttgaaaatgtcttagtagacggccgcctgctcctcagccggcgggttgacctgcgcgaagctgagaaaaagcaggatccggatgaaaaagactatgtggtcttagatgagttcccggcctacttcaatggcgacggcattatttccaagttccgcgaccgcctctttctttttgaccccgccaaaaaggagttgaccgaactcttaaaagataacccatacttcaactttgacctccactatgtcgatggcactgacctctacttcaccggggattcttacactcaatccaaggcccgcaagtccgccctctaccagctggacttaaacagcctggaatattctcagcttttgccaaaagaagagtggtcaatttttgacatctgcgtcttaaagggccagctctacctggtggccactgatgaaaagcgctatggctcggaagaaaatccccagttttacaagtatgacccggaattcaaaactctttctttggccgcggcttgggaagactgctggggcgactgcgtagacaccgacctttgcctgttggacgtgcggaccagccgggtctttgaggactgcctctacttcaccacgactaaggtcgaccacacggtattggaatgctttgacggcgaaaaagttactcctgtctttgaatttccttccatcgaattcttcgactttaccagtgacggcacttgctggtttactggtccaaatgccaacgagacccagcagctttacagctataaggacggccagctgaccaagcactctagctataacgaagatgccttaaagggccgctatgttgcttccgccgttcaagttgactatcaagactatgccggcaatacccagcatggctgggttctttacccgaaagactttgctgaaaagcaaaaatatccggccatcctcgatgtccacggcgggccaaagacagtttacgggaccccctttttccacgagatgcaggtctgggcaagccagggctactttgtcttctttgccaacatctacggctctgacggccagggcaacgactacgccaacatgcaggggcactggggccgggaagactacgaggacttgctgaagttcacggacgctgttttggcaaaaatcccgcaaattgacgccggccgtctgggcatcactggcggttcatatggcggctacatgaccaactgggtgatcggccatactgaccgcttcaaggctgccgccagccagcggtccatgtccaactggctgagcgatgcctttatgtcagacgtgggtccttgggatgacctttactccattgacgcaaataacttggacgagaagctagactatgcctggcagcagtctcctttgaaatatgccaaaaacgtgaccacgccgaccttgttcatccactctttggaagactacagatgtcctttgccggaaggaatgcagatgttccgggccctcctctactacggggtggaaagcagaatgtgcctctttaaaggcgaaaaccacgagctctccagaagcgggcagccaaaacaccggatccgccgcttaaaagaaattactgcctggtttgaccagcatttgcggtaaaatataagaggcaagaaaacaaaatgttatgcaacaaaggagttttttatgactaaaattgccatgtataatgtcagcccgatcgaagtgccttacattgaagactgggctaagaaaaacgatgtcgaaattaagacgaccgaccaggccttgaccagcgcaactgtagatttagctgaaggctgcagcagcgtgtcccttaagcctcttggcccggttgacgaagaagttgtttaccaaaaattgagcgaatatggggtcaagtgcatcggcctcagaatcgttggcttcaacaccatcaacttcgactggaccaagaagtacaacttgctggtcaccaacgttccggtctactccccgcgggcgatcgctgaaatgacggttacccaggccatgtacctcctgcgcaagatcggggaattccgctaccggatggaccatgaccatgactttacctggccaagcaacttgatcagcaatgaaatctacaacctgactgtcggcttgatcggggtcggtcacatcggcagcgccgtggcagaaatcttctcagctatgggggccaaggtcatcgcctatgacgtggcttacaacccggaatttgaaccatttttgacctacaccgactttgacacggtcttgaaagaagctgacatcgtctccctccacactcccctcttcccatcaacggaaaacatgatcggggaaaagcagctgaaggaaatgaagaagtctgcctacttgatcaactgtgcccggggcgaattagtcgacactggagccttgatcaaggccttgcaggatggcgaaatcgccggtgccggcctggacactttggctggggaatccagctactttggccacactggcctgacggacagcgaaatcccagaagactacaagaccctggccaagatgccaaacgttgtcattactccgcactcagccttctacacggaaacttccatccgcaacatggtgcagatctgcttgactgaccaattgaccatcgccaagggcggccggccaagaagcatcgttaacctgtaatttttactgaattgatcaacgcgaaaacaccggcagtttaatttctgccggtgttttctggtatattgcaattttccattgaaaacgctaactttttttgctggaataatccttttttctaccatacaatggaattagcatgtgaaaaggagaaaaattaagaaatggtcttatccggattttccggaataccaaaccgacttgccagacgtaaaatgtatcgacagtaccggtgatgaagtcagagtcctctaccacccaaacgttgaatatgcagattatggcggacagaaactgaccttggagatcttggagccatctacacggaaccatccggatgacttgacttacccgatctttgtttacgtccaaggttcagcctggatgaagcaaaatgtttaccgcgacctgccccagatagcaaaaatcgccgctcttggctatgttgttgcggttgttgaataccgaggcagcgacgtggcttccttcccgaagctgattcttgatgcccaaaacgccgtacgcttcatgaagctgcacgggcccgaataccagggcgacccaaagcgggttattttagcgggcaattcttctggcggtcacactgccgtttacgccagctttttcccggaaggtgaagacaatctctacccagatgttaacgccaaagtaagtggcgtggtcgacttttacggctctgtctccgtcatgcgtgaagacagcaacccaacaactatcaaccacttgcaggctgacagtccggaagggatggaaatgggccatgttgacttaagagagaattctgacctgcgccggaaactgtcagttgagtgcaatatcagcaaggataccgacattccgccagtattgatcattcacggcacgaaagaccggacggtcaacacaatcggcagcactgacctttatctgaaattaaaggagtgcggcaaagaagcctcctacatcttgatcaagggtgctgaccacggcggcggagaattcacctccccagctgttttaaaggaactggatgctttcattaaacatgttttagcctagtatataaaaaagaccgccttctccggcggtctttttacattcccaaaacttctttttcaatcgtgtccaggacgccattctccgcagccggcagttttgttacgaacttggctgcttccttgacctcttcgcgggcatttttcatcgcgtaggaatggcccgcgaatttcagcatttcaatgtcgttaaggccatcaccaaaagccatgatttcctcaggcgaaagatcatagcggcttgccagccatttaagcgaattaccttttgacacttcgggctggagaatgtcgatgctggctactcccgagttaaaaatctgcagtttttccgcgcagactgccctaagcttctcctcagtttcgtccatgcggtcagtgcctggcactatcacgatttctgtgaatttgtcatcaggcaaaggcaggaagctagatacattctgattatgcgagaaataaaaattcattctttcgcgaaaagccggatcagcctgttccaagaaataacaatagttgatcccgcagagcatggtccgttgtgccaggccgttttccgcaattatttgcattattttttgaaccatggaccggtcaatctcgtctgctttaatcagctggcccttttcaaaaatcaccgaaccattcaagccgccaatcgtcatttcatccttcatcgggaagaagtccgctacttgttggtactggtctcccgaaataggcaagacgcggatgccttttgcgcgcagcaggtcaaaattgcgtgcccagcgctcacgttcataaaatcccttccgcggcatgaagctttcatccatatcaaaggcaatcaattttatcatggctatctcctgcaaaatttttgcttttctcagcttaatctaaataactgtagggatccgggttcttggcccgggcaggcatcttgtagcggccaaagaagatcatggcatggtgggtatggatccactcatcctttggtagcagctcctccagccgcttttccacctgcaaaggcgttgccttctccggcacgatcttgaacttcttggcgatccgagacacgtgggtgtcgaccgcgattgccggaactccccagccttcagccaaaacgacattggccgtcttgttgccaaccccggctaatttgaccaggtcttccttcttgcccggcacctggccgccatattcagcgaccagggtctgggccatttccttgaggtgcttggctttagaatgatagaggccaaggtgggaaatatctgcctcgatctcctcctggctggccgccgccatggcttccggggtcggaaaatccgcgaagagctggggggtcaccttgttgaccatcttgtctgtcgtctgcgcgctgagcaggaccgcgcacaaaagctggaagcggttgtcccagttcagctccccttttgcttccggaaacatggcgtcaatccgcttcaaaacatttcttgcttcttcatcactcaagagcttttcgtctttttccattaaaatcctcccaaaaatttactaacggtttctctccagatactgctggacctcgctggcggtcttcaaattcattctctgccagttcagcaggatccggtcaacatacttgaagctcatcgcccgggacaagactgcttcccgcagggccaacttgataatctccggggcgtagtggtccaaattcagccagtcctggatttcctcccgctcaatcggggtcaggtagcggccgaattcaatctcaaactcccgggccaggtcactcattggatcgttattcaagctgtctttagcttcttctaacacttccccgttcatgtccttgacctggacatgctggtctaaatactggtccagcttgtcatagagctcatccagactgtagcggctgctgatcttcccgctggcgtccttggcctgcctaagagacaggcagcccttgtccagcaggctctggatcaagagggtgacgtcactgacgctgaagttggtattggccgcgattttttcattgctggggaagtaatttcccctttgaaagaaagcttccagctgcaagaccagggccagttccgcttcagtcaagcccaggcgggcatagtaggcaatcaggccattgctgatgctggtcacccccagctgccggtaaaaattgtaacttgccattttctcacgttctttcacaaaaaataaaagagtgagctaactcactcttttattttagcttttattcttgttaaaaaacaactaatgcgcttatggctgcattctgttgatcattcttgggaatgggacagcttcacgaacgtggtccagcttgcagatccaggcaataacccgttcaaagcccatcccgaagccggagtgcggcacgcttccgtactttctcaggtccaggtaccaggagtagtcgtccaggttgaggcccgcttcttcgatttgcgccttcaaggtgtcgtagtcagcttcacgttctgatccgcccatgatctccccgtagccttctggcgcttccacgtcggcgcagaggtaagtcaatgggttttccgggttcttcttcatatagaatggcttgattgctactgggtagttaacgatgaagaatggccggtcaaattgttctgacaggaaggcttcatctggcgcgccaaagtcgtcgccccacttgaagtccttgccagcttcttgcagcatcttaaccgcgtcatcgtaggacaagcgggtgtaattgccttcagcggctggacgcaatttgtctaagtctcggcccaggatgcttaattcgtattcgcagtgttccaaaacctggccaaccacgtaagacaggaagcgttcctgcaggtccagggattcatcttggtgcatcca

SEQ ID NO: 2287 - DNA, 304 bp, Unknown
  gut microbiota DNA sequence
tctgatagatagtatttgagatcaaagacgctgagccaagactgttggttaacggagccttgggtacaggagctttgataatcttgtcggctggcgcttcatcattgcagtgctggcacttgtaagagtgttggatgtgatcgattctcttaacctgggctggaatgtagagcagctcttgtctagcacagaagctgccaatctctttcagttcatgctggcagtctggacaagtaagatcatccaaacgatgatgaacctcctcgcccggcagagagtctaagatatcttgctttctgccgac

SEQ ID NO: 2288 - DNA, 210 bp, Unknown
  gut microbiota DNA sequence
gaaacgctcaaagcaaataacgaagaattgctcaagcaggttgcccttcttactgaacaagttgcttatttgactaataagctttacggcaagtcttccgaaaagagagctgtcaacccagatcagctgagccttttcgaagaagacaacgcctcccaagatgacgaggacttgccctcgcattaccgaaactattacctataagagacg

SEQ ID NO: 2289 - DNA, 649 bp, Unknown
  gut microbiota DNA sequence
agaatccccgtccctgcccccagttccagcgtcgtcagcatgataatgtcggtcaccggctggacattggggatatcgatgattttaaagatccgcaaaaccacgcacatcgcagtcagcaaggccagcagggtcagcctttgcagctggtagcgttccttggtctgcattttagtattgcttcaaagtgaagacaaccttggacttgttcttagtcagcttttgcttgtcagctgccaccatgggcatcttgccgtcaacggtataagtccagtagagcttcttcttttcattgcccaggcctttgatcttggtaatgaagacaccatctgaagacttagtgtagttgactttccaggccttcttcaaaacagtgaagacgctcgtccccttcttgaccttgaaggtcttcttagccagggtttgctttttcttggccttggtcgtgtccttcaaagtgtaggtcacgctgattttcttagccttggccttcttagtagtcttcttagccttagccgttttagtggttttggctgcttgcacattttgcttttggactggctggctggcaaaaaggcccacgaaggctgccaaggcaactacgactgctaaaatcttctttttcatcttttgtttctcccgtttttta

SEQ ID NO: 2290 - DNA, 256 bp, Unknown
  gut microbiota DNA sequence
attcttagagcagtgttttcgccgatgcctggaatgcttgtgaggatctccagatcccgtttaggagccagcttagccatctcctgtaaagcagtctggcactcctcttcagcgctcagaatgttgttaatagccattttgaggccacgaatatgagcactgttctttttgaccgctgggcatgcgactttagccaaacgaataaggctttgcgttatgtcgttagcgcgctttttaccaataccagataagcctt

SEQ ID NO: 2291 - DNA, 3443 bp, Unknown
  gut microbiota DNA sequence
aggcttggcaaagcaagtagttatggacccagaagtcttggttgacaccatcaagaagtacaactcttacgttgatgctggtcatgacccagaattcggcaagagtgccttccacttgaagtgcgaaaaggcgccattctacgcaacccctcgtaagccagctatccaccacacgatgggcggtttggtaattgacactaaggctcacgttttggacgaagaaggccacgtcattccaggtctgtattcagctggtgaaaatgctggtggcttgcacgccggcaaccgtttgggtggtaactccctggctgacatcttcacattcggccggatcgccgctgacacggctgacgaggaaaacccagctagcgacgcggttagcagagcgtctcactaaaaaagcgaggaaacagtatgttttacaagagccactttggcacgattttaaccacggttttatccctcttcatggggctggtgatggcgatttttatcatcttcttgaaccacctaccttttacttgggttaacctcttcgaattaacggcagaaatcaacttaatcgttttcgtagccagcctctttatcccctacaacgcttggggtgcctcttttgccggcctcttccacctgaaagaaggcacggtggcctacagcttggttgaaggcattatcccttcagttgttttaaacacgctcaacacctttatttgtgcaggtgccagcatctttctacaacgaagccattcctaaggctgccagaatgacggcttacctgaatggctgcaaagaagcttggattccttgcttcattgtttcctacattgcctcctttgcggcagtagctttaggcaaaaaggttgcgcaaaagtacgttaagtagagtatttttaacaatttcactatgatcgtcaaaagagtctaggtttacctaggctcttcttgactttcccagaatcaggcagtcaaaagcagcaatagccaaggtagaaaagattttttaaaatatactaagatagaaaaaacaagtaacattttttaaggagaaaagtaaaaatggaaaaagatatcacgatcatgcgtgacggtttaaagctagcagcgaaggtttcaattccggaaagtaaagaatacgacattgcgatcctggtttacggctttgtggggatgatggcccctaaggttaacgacttattgccagttttagcagaaaaattgcaggaaaaaggcctggcaaccgttcgctttgactttaacggccatggcttaagcgaaggaccactggacaacatgtccatttataatgaactggaagactaccatgcagtaatggattacgttttgaatcgggacggcgtgaagcacatcaacttgattggccactcccaaggcggtgtcttatcttcaatgatggctggcttttacgctgacaaggtcgacaagctggtcatcatgtccccagctgccaccttggttgatgatgcccgcatcgggacttgcatggggattgactacgatcctaaccatgttccagctaagcttgatttcaaaaaatttaagctgaacgactggtactttagaacggctaagtttatcaacacctttgaagttgctcgtgccttccacggtccagttttggctttgcatggcagtgaagacaagattgttaacccatatgcggttaagcactatcaagcaatcttggacaactgcgaaatgcacctgatcgaaggcagtgaccacggtttgcaccaaaaccgcgaggaagtttataccagagtggttgactttttgattttgtctcaattaatttaaacaaaacagtagatttccaattttgtctcaattaacttaaaatagatctagaagatccgattttgttgaagttaattgagatgattttatgctagtaccaagaccaacttacttacaaaaactagaaaaattagctaataagcagattattaaagttctaaccggggttagacgctgcggcaaatctagcctgttgcagctgtttcagcaacagcttttagctgatggcgttcaaccagagcagattcaagcaatcaactttgaggacctagctttttccaagctgactgactaccaggaactctatcgctacctaagtcaacgcttgctgcttgatcagatgaactatatctttttggatgaaatccaaaatgttcctaattttgaaaaagcagttgatagtctttttattaaaagcaatgttgacttatacattaccggttctaacgcctttatgctgtcaggtgaattagcgacgctgctttctggacgttatatcgaaattccggtatatcccttatcttttaaggaatttgcccaagctaagcctgatcaatctttgcaagagagctaccagcagtacctgctcaggggcggctttccttttgccttgcagctgccagatgatgaaagtttccgcgactacattgatggcgtggtaaacacggttttagtcaaggacgtgcttgccagaaaagataagagcgattcaactttggttagacgattagcagcttttttaacagacacagcaggtagcttgactagccctaagaaaattgcgggtaccttgacctcaatgggacagaagacgacgccgaacacggtggcctcttacctggagctcttagaaaatgcctttcttttttaccgctgcgaccgttttgatatcggcggaaaaaagtatctgagcatcaatcccaaatattatccagttgatattagcttgcgccgggccctagtggggcagaagcggcccaacaaggggagccggctggaaacgattgtgtatcaggagcttcgccggcggggatatgagatttatgttggcgtgatgcagcagactgaggtggactttgtggtggtgaaggatggaagacgggagtactaccaggtatcgctgtctttggacgatgaacagacctaccaacgggaagttagaagtctgcggctgatcgatgacaactatcccaagatcatcttgactgaagatccggggcattttgacgaccaggggatcagccaggtgaacattattgattggttgatgggggaatgaatatgaaagtaagacgcagagccatgtataaggctctgcgtctttactatttcttggctgacattgttggctatccgccttgcaatattggcggttgctctagcctggctctgccagtgcctaggcaacttgctgatgcggatccacatgttaggtctaatctttcgcttaacgtggagaaaaaaggacaagcaaaaaagccgctgattactttggcaagttcacggctttttagctaattattattaatgccaccgctattaacggttctgcgaaggctcttgctgaaacttaagcttcagactgatacaaatgcgtgggctattctaaccgggattctggtagttac

SEQ ID NO: 2292 - DNA, 581 bp, Unknown
  gut microbiota DNA sequence
cgtgacgttgccgtttgggtccaccaagccaagaccaaggaagctttgccagttttgatggacactgctatccgtcaagcttacgcaaagaagggtccagctgttttggtaattcctaaggacttcggttggcaagaaatcgaagacaactaccgcgtttccgcaagcaaccacgttgctgacaactacgctgctccaactgctgaatcaattgaagccgcaactaagttgatcaaggaagctaagaacccagttgtttacttcggtttgggtgcttcaggcgctgccgaagaattgaaggaatttgctgacaagttcaagatgccaatgatgtcctcatacctgggcaagggtatcgttgaagacagcttcaagccatacttggggactatcggccgtctcggtgctaaggctcctaacgaagttcaaggccacactgacctggtagtttgggttggtaacaactcaccattctcagtattgtggttccctaagaacgccaaggttatccaaatcgacgttgacccagaaaagcaaggcaagcgtcactcagttgacgtatcaatcctggcagacgctaa

SEQ ID NO: 2293 - DNA, 338 bp, Unknown
  gut microbiota DNA sequence
tggccaaccacgtaagacaggaagcgttcctgcaggtccagggattcatcttggtgcatccaggccatttccggttccatcatccagaattcagtcaagtgccggcgggtcttggaagcttccgcccggaaggttggcccgaaggtaaagatcttgccgaaggcttctgccccgacttccccgtaaagctggcccgattgtgacaggtaagcgtcgtggtcgaagtagtcgatatggaagagttccgtggtcccttctggcgctgagtgcatcagaagcggggcgtcaaacttcacgaagccttcgttttcaaagaagtcgaccgtggccttgaagat

SEQ ID NO: 2294 - DNA, 215 bp, Unknown
  gut microbiota DNA sequence
tggaagagttccgtggtcccttctggcgctgagtgcatcagaagcggggcgtcaaacttcacgaagccttcgttttcaaagaagtcgaccgtggccttgaagatccggtttctgatctgcatgatggcgaatggccgccggcttctcagccagaggtgacggtggtccaaaaggaagtcgatcccgtgttccttgttggtgatcgggtagccttc

SEQ ID NO: 2295 - DNA, 308 bp, Unknown
  gut microbiota DNA sequence
atagcgaagacagcgttgtctgcggcttccttgttgatgacatcccagattggttcttggcgtacgcggccttcgtccttcaagtggtcgtcagcaaatgaagcggtccatgcgtcccattcttcacggtcggccaaagcagccttgtaaagtggtgattcttcacgggcttcaccggcgtcgatcaaagcacgcaagctcttcttagcgtctgccaggattgatacgtcaactgagtgacgcttgccttgcttttctgggtcaacgtcgatttggataaccttggcgttcttagggaaccacaatac

SEQ ID NO: 2296 - DNA, 327 bp, Unknown
  gut microbiota DNA sequence
ggtgaatacgttcccgggccttgtacacaccgcccgtcacaccatggaagtctgcaatgcccaaagtcggtgggataacctttataggagtcagccgcctaaggtagggcagatgactggggtgaagtcgtaacaaggtagccgtaggagaacctgcggctggatcacctcctttctaagggaaacggatggatggagagcagaaatgctaaaagaaatccatcagttacggaagcacactgcaaaagaaactttgttcagttttgagagtatcagctctcacttgtacgttgaaaactgaatatcttaattccaagaaaaaaccga

SEQ ID NO: 2297 - DNA, 243 bp, Unknown
  gut microbiota DNA sequence
gaagtctaacgtatgcattatggtcaatggccaaaaagttaatgactatgccatctccaacgatatggtaggcttcaatcagctgctgggtgaccttaagcaggttactaaaccgcagattatctttgaagcaactggcgtctattccagaagactccaggcgttcttggacatgcacgaattgcgctatgtcatgatgaatccgctagaagccaaaagaaagacaaaggatgacctgcacca

SEQ ID NO: 2298 - DNA, 214 bp, Unknown
  gut microbiota DNA sequence
cggacgagcctgccccaggaaaccttagtcttgcggcggacaggattctcacctgtctttcgttactcataccggcattctcacttctagaagctccacatgtcttctcagtcatgcttcaccgccgctagaacgctctcctaccacgtgcataaatgcacatccacagtttcggtatcatgcttagccccggtaaattttcggcgcggcgtca

SEQ ID NO: 2299 - DNA, 452 bp, Unknown
  gut microbiota DNA sequence
attgaagacttgtccgaattaaacttgaaggatattgctttgacaaagataaagaagcttccagatggtacttacagactgcagctgactttttcattgcctcgcaagaagcaggaagcaaaaactattcaaggctttgactggaacatggcgggcaatgaggcattttgctcatctgacggcaagcgcatcaaggtatcagacagaactatcaaacgtgctgacgagtatgagcagaagatcaacgaaattaaatcatttcgtgacttggaagagaatatccatggccgaagcaagcgatatcggcgacttgaccgcaggcagcagaagctgaatgcaaagcgtacgaatctgcttaccaacgaataccgtcatctggtgcacgaagtggccgacggctgtgacacgatagtcgttgagaagctggatgcctatgagatgcgcaagcgtgg

SEQ ID NO: 2300 - DNA, 315 bp, Unknown
  gut microbiota DNA sequence
gcagcttggacactgccattctttctgaccaactttgagatctttgttgatgtatccgcagtcgtggcatgccttgcttgtccaaaatgaatccactttgacaagcctcttgttctgcttctttacaagcgactctaaaatagtcatcagctcatatggcttaaggaccgccagtctgcgattgatgcctttgctttgagcagagccttttccacgcttgcgcatctcataggcatccagcttctcaacgactatcgtgtcacagccgtcggccacttcgtgcaccagatgacggtattcgttggtaagcagatt

SEQ ID NO: 2301 - DNA, 209 bp, Unknown
  gut microbiota DNA sequence
gaccatctcgcaaggctaaatactaaccagtgaccgatagtgaaccagtaccgtgagggaaaggtgaaaagaaccccgggaggggagtgaaagagaacctgaaaccgtgtgcctacaagtagtcagagcccgttaacgggtaatggcgtgccttttgtagaatgaaccggcgagttgcgttagtcagcaaggttaagtcagaaaagacg

SEQ ID NO: 2302 - DNA, 209 bp, Unknown
  gut microbiota DNA sequence
agaaccagctatctccaagttcgtttggaatttcaccgctacccacaactcatccccgcaattttcaacttacgtgggttcggtcctccagcgcgttttaccgcaccttcaacctggtcatgggtaggtcacttggtttcgggtctgcgtcagccaactgctcgccctcttcagactcgctttcgctgcggctccgtcttttctgactt

SEQ ID NO: 2303 - DNA, 2038 bp, Unknown
  gut microbiota DNA sequence
agcgcgtaatctactatgcgcttggatgccttgtgggcaaattgacgaatcttggcattgcgccaatcggttaggcgctgcatggatttggtctggccgtataccgcctttgggccttgcttggtattgatgatgctttcgagctggtggtattgagcttgaaggctcttcaatttcgccatgcgcttgttgtagtactgattgacagacttgattgcacggccattaatgagtaaggccttatcgcccgtatttgagacgcaggcaaatgcattatctacacctggatcgataccaatatagcggccgttgtctggcagatacggtttctggtttgcagctggagtgtaggctactgtgagtttataaccatttgacagtggcttaattgcgatgcgattgaccttttttatgccgtctgcaagcttgatgctaagccccaaagaatgaataatcagataccgcgctacgacatctttgccatcagcacttttcacttctttgactctcgcgttttgtggtgtcacgtaaaaggtatgacgtctgcttttcttcaagtaacgtggaattctcggcctgccggtaaatttctgtggtgctattttgtaagattgcaaggcacagaaccaggccttccaaaccgcggctacttctttaagcgtctgttgagcacattgaacagtgggcatctgaccataaagcataagctcattggcatttcttttatttttgaagatcctgtccaagccctcataataaatcgatccttttctcttgaaaagggcttgtctgagctgatacaaagcggcgttataaatcttatgagcaatttctgccgcacggtcaagctctggagtagccttgatgtaatactcactggccaattggtcaatgagttcactatttctcggaattgtcttttgttttttctttcttttcgcttggaccattttcgttttacctcctttcctaataattcatccactggccttagtgttacttgttcgaaaagtaatatagatcactgactgtctttagattatttctatgattttaagttcttctacattctcgtacctctaagaattattatatcacgcctcaccgaactggatacgaacaaaaggtaaagaattgatttattctgtcaaaagcaacagtatggactaatttgactcaaaattctctaactatatgcgatctcagtgaaaaaatcttcggctatagctgaattattagccagctattctggccagaagagatcgtttaaggttttgtcgaaaagcgaagaaatgtgttaaacatatcgtatcaacaagttaatagcgattacattttattttacggaaaggtgattgtcatgtttgatttgaaggactacggacctgatccatgtgctttggacttaaagcaggccgccttagagaatgagaagtatcgtgaaactttgtggacgggagatcacttccaggtaaccctgatgtgcatccctgctggcggcggcgacatcgggcttgagatctaccacgacaacgaccagttcatcgatctcgtcagcgggactggccgagtgcagctgggtaaggagaaagacaacttgaccgtggacaagatcgttcacgctggtgaagctgtcttcattccagacaacacttggcacaacgtgaccaatgctggtgacgagccaatgaaatgcttcagcctgtacgctccggtaaagcacgcacatggcacgaccgaatcgactaaggacgacgcgatcgcccaggaagggccgctggaagggtcaaatgaataatctctctagcacgtgaatctttcacgtgcttttttgccgaaataaaatcctccaagttatagtatacgtagctattattagacgcataaaataatataaaaaatagtttaagaatatcatccaaagtgttgcatttacaaaatacttgtaaaatatagaatgaatacggtaacattaatgctttgtattggaggataaaaaatgaaggcaatcaagcagctctaccatgagcacaagatc

SEQ ID NO: 2304 - DNA, 209 bp, Unknown
  gut microbiota DNA sequence
cacctgtcaatttcaaagcgtgggacagctattggcagaaaggtgctgtacttggccataaaccaaattcagtcggctaagaaagcgggaaacccttgtcatatcgcggattattacgagaaacgaaaacggtcttctgagactgcaagtcacaagaaggccgctatcgcatcgatccataaattattacggacgatcttcgctttaat

SEQ ID NO: 2305 - DNA, 219 bp, Unknown
  gut microbiota DNA sequence
tgatgaagcgccagccgacaagattatcaaagctcctgtacccaaggctccgttaaccaacagtcttggctcagcgtctttgatctcaaatactatctatcagaagtacgttctcaaggttcctgcctaccggcaagagaaagacttgcggcgtatgggccttccgcttgatcacaagacggtttcgaattggcatatcaaagtctgtgagtactacct

SEQ ID NO: 2306 - DNA, 240 bp, Unknown
  gut microbiota DNA sequence
gccaggatattgatcacagtgaaggtatccgctaaagcctgtgaggaaatcccatgcttcggtgccttttcgtgatccatggtgatacaggacaatcggcttttcggcatgcttgcctgacaagaaggtccagacatagtctttggctctttcgctgtctaagactcgatatggcgtctcatctgcgtgaatgacatccagctttagcagctcttttctcaagagctcgtaaaggctgga

SEQ ID NO: 2307 - DNA, 284 bp, Unknown
  gut microbiota DNA sequence
ttgacgttcgtaaaagaaaaaggcgtcaaatcagataacagcagattcgcaagaaagatgcgcaagcgcttgaattcatggactaagggccaactggatgaacgtattgaatatctttcaagcaaaaattcgattgaaactcatgatgtcaacccagcatatacttctcagtactgtccaatctgcgggcagcattttgaggaaagatacggcagtcatcatgaactgaccaaatgcaagaaatgcggcgagatgaatgcgaacatcgccgcagccaaaaacat

SEQ ID NO: 2308 - DNA, 209 bp, Unknown
  gut microbiota DNA sequence
tggctgggggttacggtggccaacctttctccggcctgccagggcctggaagaaaagctgatcaagctggagcgggaaatgtatgaattgcaggctgacctggtggtcaagcggcaccatacgattaccttggctgaagtgacttacatggaagagcaaatcgatgcctggacggaagaattgccggaaatgaaggaattcatcctgcc

SEQ ID NO: 2309 - DNA, 260 bp, Unknown
  gut microbiota DNA sequence
tcgatgctagcggttaataactggcaggctctgcgcaaccaagttcgcaagtgggacaagccggttaaaggctcaaaaggcaagctagaaacagtctacaattttcagaccaagcactgggttggtgctctccgtgaggcatgtgccaacataaaaagcatgtggtcgaatctggctaaccgtttgaagaagctgattcaaggaaatgaaaatctttctgcagatcagcgccaccttctgttctttattttgaaatttaa

SEQ ID NO: 2310 - DNA, 846 bp, Unknown
  gut microbiota DNA sequence
actacggccaatgcaatgctgaatcagtccttgatgccgactgctaaaagagaacctttgcactgggatccaactggctggcacaacaagcggatttccagcggttggctctataaccggagtcacttgatcggctaccagctgactggacagaataacaacccgaagaacctaatcactggtacggaagaaatgaacgtatcggggatgctgccatacgaaaatgaagtagctgactatttgaaggaatcttcaaataactacgtccgctaccgggttaagccgatctttaaaggagatgaacttctggcccgtggcgttcaaatggaggccaagtctgttggcagcaacgcggtttcctttaacgtctatgtctttaacgtccagcccggcgttgttttgaactacagcgatggtaccagccgggtacagaattaaatagcattagaaaaaagttctctgaagctgttagacttcacttctaacagagcggagaacttttatcttttatgagctttaatacattacgttaagtgaaagtgtattgagtagcacaattcctacggtgaaaaatataatggaaactatcgaaagcaatatgcaaaatttgaaatcaatctgatattccccataagcaaacagtttcttaatgccgataaaaagcatcaaaattatcaagtagatgacgattaggtacacgccaccaactatgaaagcatatcatagagaagcgctagacagattctttaagtcgctaaacagattcccaagaatctcgacggagcccatcatggcgaaggacattgctgtaaagattcctaagatccagacaaactcagagtagat

SEQ ID NO: 2311 - DNA, 526 bp, Unknown
  gut microbiota DNA sequence
ccagcattatttttacgaccttgggctgtgagtggctttacgcgattcacgaggaatatggctacctggctttgcgtaacatctgctttcaagttttgtctctgatcctgctcttgacatatgtcaaggatgaaagcgatctattgctgtatgcttggactacggtggcgggcagcgcgggggccaacttgatcaactttctgaggttacgtaagtactgcacctggtctttgacctggcgcttttcttggcaaaagcacctcctgcccatcctcgtcttatttgccaactctctggtcaacctgctttacgtaagcgcggatgtagcccagctgagagtgatgaccagcgactattatgtaggcctttactcggtggccagcaaggttacggccctgcttaagcaattgttaggtgctgtgatcgttgtgaccgtgccgcgcctggcctgcttatatgggcaaaagggcggagaattttttcaaaaattggcccggcagatcgcggatttagatttcgcgccggc

SEQ ID NO: 2312 - DNA, 753 bp, Unknown
  gut microbiota DNA sequence
ctgccgtatctttcaaaaaagtcggacattctggcaaattcttcatcgcttaactttttggagtagactctaatcgtcttgggctgagtctttttcactgtctgcttgactgaagagctttttgctttcttggatgactcttgcattccgatgcgacctctttccatacagcttagctgagaaaacggtgattatagataaaacatcttctacaagttctgaatttggagcaacgttgtctgtctgattgatgacaactagctctacatcgtttacctgacagattgtctcaatcatttcaaagccaaaacggacaagccggtcttggtaatttacaacgactcgctcacactgcttcttgcagatcatgttgatcagctctgtcaggccctttttcttatagttgagactagatccaacgtcttgaatgatcttaaactgatatccattgacttcgcaatatctagacaccacgtccttctgcctttggaggtcttctttttgatgaccagaagaaacccggcaatagccgatggtcagtagcttcttaggcttagctgccttcacatttccttgcagaacttcatctagcatttctttagtgtagcgacgttgattggaggcagttctaagcggagtaatcaatccctcagcttcccaattgcggagagttgacttagcaacattaagatattcagctgcttttgatatggacatgtattcgctcattatttcttcctcccaatcttttga

SEQ ID NO: 2313 - DNA, 17524 bp, Unknown
  gut microbiota DNA sequence
cgagatgaatgcgaacatcgccgcagccaaaaacatattgagtagattaactgacgaagaaatcacgctttacacgccttacaagcgagttaaggagattcttgacagtcggataaaagaagcataagccaagtaatactacaaagttgaaggctctagcatgtaagagcagtcagctttaacgagctcagttcggggtattaaaatcgcggcttgactgcttcgagaatgcatcacgatatgcttgcctgctttttgcgggcaagatgcctttccgactgccaggctaaaagtttccagtggggcagataaaaagctattggataatgccatttggcgttatttgacagccaaccgtactcactgaccttaacttcaaaaggttaaaaatctgatttcttttgccaagttgaatctactcatagatttaactagaaaggaatatcagaaaaacttaccaatattgatgtgattatcaagatttagtaagttttatgattcggatacttgcttatctcctttggccacactaaaagcctgtctccagctggaaacaggcttctttaattcataatttaagagagcaggataaggcttaagccactttttcctgcttccacttcagaccgatgccggtaaagccgctgaggatagagaagacaggtgacaggaggctgaacatggtgaaggggaggaagtccagaactggtacgcctaaggctgaagccacaaaggaaccagccaccccccaagggatcaagtagttgatgacgctgcccccgtcttccagggcccggctgagggccagggggtcaagaccgatccgcttgtaagcaggcttaaaggcgttggccggcaggataacggacaggtattgttcaccgacgaagaggttgatcccaatcccggccatgattgtcgtcaagatcagccggcccggcttcttaaggcgttcaaccagaggcttcatggcgctgtcgataatgcccaggtgcatcaagattccgcccagggccagggtcatgatgatcaaggaaacagtccccatcatgctggagatcccgccccgggtcaagagggcgtcaacggtcttgttgccggaatttgaaacgtagccggattcaatcagcgttgccagcttttgcatcttgaagcccggattttggacaaaaatcatggcaacggacaagaagatgttggcaaaaagcgtttgaatggctggcacctttttccaggcgcaggcgaacatcaagatgatcggcaaggctgcccagaaggaaactgagaagtgctggcggaggctgctttctacggtcgcgatgccagctaaggaagttgccttattgctctggcccaggaagaagaaaaagagcaaagagccgataaaggcgggaatagttgaccacatcatattcttgatatggtcaaagaggtcagcttcagctaccgcggaagccaggttggttgagtcagacagtggagacatcttgtcgccaaagacggcgccggagataatggccccagccgtcaaagccgggttgatgcctaaagtgctccccatcccaaagagggcgatcccgacggtggacacggtcgtaaagccggacccgatggccaggccgaccaaagagcagaccaggaagaccgagggaacgaagaagtggctgctgatcatatgaaagcccaggaccatcaagaatggaataatcccggcctggatccagacagcaatcaaggtcccaattaaaaggaagagaaagatcgggacaatggccgtggaaatcccctggctgatccccttcatgacttcttcccactcaaagccgcggatctgcagccagaagatgagcaaggcgatgacagtcaagaccgggatctgcggggacaggccaaagccgatgacgccccagcccagcatgaccagcatcaaaataagaatagttactgcttctttaaaactgatttgtttgttcatatgtttgttccttagttaaatctgtatttgcttttgccagtttaaaccaaggcttgatatcgcttcatatttctcctttctgcaaacaaaaagccccagctgagtcggttgactcaggctggggcgcttataggcacggtaccacccaactttgcagcatgctgcacttgctttagccgtaacggggctggaccggccgagctgcttgatcccgtaattcgctgcttcaggcctgtccggttcgcatcaaccaccggttttctgagcgctgagcctggctgctactaaaagatcactcgaatttttatgtttcctactataacattatgagctttgttaagcaacgcttttgctaattattttttaagccggcgggaagacaatagccaaaaacgatgaaaagtgagaccggctttcaattgatttgcagatatcgtctgttttggaggaaaaaagacgcaaaaaagcgaaaaagcagaaaaaatctctcaaaagggtttgacggacccggaaaagtttgctaatattaatatacatgaattggagtagtactcaagtggctgaagaggcgcccttgctaagggtgtaggtcgggaaaccggcgccagagttcgaatctctgctactccgttataacaacaaatatataagacaagcgactgatttgacagaatcagccgctttttttcatctaataagtatttttcttttcttaattaaaactggtattttttaaaaaatgcaattttttggccgctttttgcgttattgtaatgcattttcagtcatagagataaaattaacaaaaaagttgaaaaaggtttcaagaaagttttttcacgtaagcgctttttattgtataataggaatgtaccgaagtttttgaggaggaaatatcatggtaggaattgttttagctagccatggcggtttcgcggacggtattgccgaatccgcgcaaatgctctttggcccacaagacaattttgcccatgtcattctgaagccttctgaaggcccagatgatattaagggtaagatgaatgaagcgattgcttcttttgcagaccaggaagaagttttgttcctggttgacctgtggggtggcacgcctttcaaccaggcaaacggtttgctcgacggtcacgacaagtgggcaatcgtttccggtttgaacttgccaatggtagttgaagccttgacccaaagaatgatcaatgacaaggctaccgcgcaagacatcgcgactgcgatcattaagccggctaaggatggtatcaagaccaagcctgaaagcttaatgcctgcagagcaaaaggcagctgcacctgcagccgcagctggcgctcctaaggaagcaatcccagaagggactgttttgggcgacggtcacattaagatcgttggtgccagaattgactcacgtttgttgcacggtcaagttgcaactggttggattccatcacttcacccagaccgggttatcgtggtttctgacaaggttgccaaggacgacctgcgcaagagcatgatccgtgaagctgctccagctggtacggtagcacacaccgttccattggagaagatgaaggaaatctctgaagacccgcgttttggtaatacgcgcgccttcttgttgtttgaaaacccagaagatgctttgcaaacgatcaagaacggcgtagacatcaagactttgaacgtcggctccatgtcatacagcaagggcaaggttaacgccaacaacgttctgtccatggatcagactgacgtcgacactttccgtgaactcgaaaagatgggcatcaagttcgacgtccgcaaggttccttcagacaacccagaaaacatggattcaattctgaagaaggcacaaagcctgctcgatgaacaaaagtagtagtgggaaaaggagttaaaaatggacttaaatgctattcaagtcatcctggtgattgtggtagctttcctggccgggatggaaggtatcctggatgaatgggaattccaccaaccattggttgcatgtactttaatcggtttagttactggcaatcttaccttgggtattatgctcggtggttctttgcaaatgatcgctttgggttgggccaacatcggtgccgctgtcgcacctgacgccgctttggccgctgttgcctcagccatcattttgatcaagggtggtcaaggtaccaagggtatcgggactgccactggtttggccatcactttggccgttgccggtctgttcttgaccatgttggtccggactatttcaactgccatcgttcacatcatggacaagcacgccgaagaaggtaactggcgcatgatcaacgtatggcaatggatcgctgtctgcttgcagggtctgcgtattgctatcccagccggcttgttgcttgctattccaactgaaactgttagaagcgcactggctgctatgccagcctggctgtcagctggtatgaccatcggtggtggtatggttgttgccgtaggttacgctatggttatcaacatgatggccagccgtgaagtatggccattcttcgccattggtttcgctttggccggcgttaaggacttgactttgatcgccttgggtgcgattggtttatctatggccttgatgtacctcgctttggaagaaaaggtaagcaagggctctggcgatgctgctgcagctggtactggtgacccgctgggcgacatcattgatgactattagaaatcaagccagaaaggagaaataaatcatgactgaaaagaaagtaatcttatcaaagcgtgatcgttgggacgttatgtggcactcacaacttctgcaaggttcatggaactacgaaagaatgcagaacggtggttgggcctacagtatgatcccagctttaagaaagctgtacccaaacaaggaagacatggctgctgctttgcaacgtcacctggtcttctttaacactcacccttacttggcttcaccaatcattggtgttaccctggctttggaagaagacaaggctaatggcgttgaagttgacgacgaagctatccaaggtgttaaggtcggtatgatggggcctttggccggtgtcggtgacccagtcttctggtacactgttcgtccaatcctcggtgcccttggtgcctcaatggccatcaacggtaacatcctcgggccaatcctcttcttcattctttggaacctgatccgtatcgccttcttgtggtacactcaagaattgggttacaaggctggtgccgctatcagctccgacctttcaggtggtttgctgaagaaggttacccgtggggctgccatgatgggtatgttcgtcctgggtgccttgatcgaacgttgggtaagcatcaccttcactctgaaggtttcagaagtgccaatccaaaagggtggttacatcgactggaccaagctgccaagcggtactgctggtatcaaggaagccttgacccaacaagctgctggtctgtccttgactaataccaaggttactactctgcaagacaacttgaacatgctggttccaggtttggcaggtctgctgcttaccttcctttgcatgtggctcttgaagaagaaagtttctccaatcgttatcatcttggggatcttcgttgttggtatcctcttccacgtatggggcttgatgtaagattaacaaatggctcaatcaatgaataagaccgttgatctggctgtatccggaacttggttccgggccatgtctacctacggcaaagtcatgatcggcgatgaagcttttgaattctataacgagaagaatgttgaagactatatccagattccttgggatcagataacttatgtagtcgcggacgtttacttcaaagggaagtacattccccgctttgagatccggactaagaaggatgggaagttcatctttattaccaaggatccgaagaagactctgcgggcgatccgtaagtatgtcccggccgaccacatgcggcaggctttgggagtttgggatacgatcaagctcttctttactcgcaaaaagaaatagaatggaaataagcccggaccaagtccgggcttatttttgtgcggtaatgttaaaaatctccgtgttatactgaaaagagagttttgccaatggaggatcgacatgaaagcaaagcaggcgtataagctggtggaccagctccgcaatccaggaccaagaaattactacatcgattgctttccaaaaatggagccgccagacaattatgatgagatatttgaatacctgaggtcgcatacgattggcgaagcctacgcggacaaaatgctcctgttgctgttaatgctggtcagccagtatgagacacacattttttggatcatgatctggctaaagaaacttatcctgacttgcttgaccgggatttgaccgagctgcctgtggctgatctgctggagatcagcaagaagttgattgtgacagatcactaccttggggtaaatgtcctttttaaggacaagaagcactattccttgctccggatcgaaagcggcattgatgctgatctgtataagctttctaagaagtcgaagaagctggttaataagctgcttaagcgtaacggcctcttcttggtgaaatactaaagtacataaaaaagctgaccttgcggtcagcttttgttgtatctcattaattattttgctgcttcttttttcttattgaaggccttgctgaaaccatagaggacagcgaaggtaatcaaagccgtgatcattgggacccggtagctctcaaggaagaggagcaggataacaatggcaccgaagaaggccaagagcaggtagtcaaggtatgggtaagctggcagttggaattcatgtagctggtcctttggcgtaacctgccggtagcgcaggtgggtcaaggtcatgatgatccagatcagaaggaacatgctggttgccattgatgagatgaagctgaaggcttcgtcccccataatcatggtgatcaaaggcgcgcagatgatgattaaggctgagaggaccaggcctctcattggcaattgccggtggttgagctggccgaagaacttgctccacttgctttccccgcctaaagtaacggagaagagcaggcggccggcactgtagaggaagctgttggttgctgaaatagctgccgtgatgaccacgaagttgatcaagttgccggcacccttaaagcctgcccccatcaaagcttggacgaatggtgagctgaaagttgaaaccttgttccatggcaggatcaccaaaatcccgataatcgccaaaacgtagaagagaatgattcgcagtggcaattcattgatcgcgctccggatagtcttgtgtggatccttagcttcagcggctgtcagcccgatcagttccaccccgatgaaggagaagataaccatctggaagccttgcaagaagccgcctgccccgttgttgaaaaagccgtcagcgtacaggttgctgaagctggcctggccgtacttggttgaaccggagctcagcagcatgaaggccgcgaagataacgaagccgacgatcatcaaaatcttgatgatggcgaaggcaaactccaggttcccgaagaagcgggcagagatcaagttgatcaagagcaggaccgcgactgagagcaccccgggtagccaggttggcaggttgggcagccaggacttgaagtagatgcctaaggccgtcgtttccgccatggccaggatcagccagctgagccagtaaagatagccagtcaccttgccgatgtccttgccgagatatttttcaataaactcgatataggtgtgcttctttaagtcagataagatcagttcacccagggcccgcatcaagataaagaggaagaggccgacgatgatgtagatcaagatgactgccggccctgccttctggatgctgttgccgaccccaagaaagaggccggtcccgatcgtcccgcctagggcaatcagctgaatgtgggcattggtcagtgtccgtttgtatgtactttgtgttttcttttcttccataagacctccattgagttacatgaaacattttaacataagctgtcagaaagtgaaattaatttaagaaaatagtctataaggcaaaggaatcttaagaaatagggcacgttgccctcttgcaaaaatgactgggattatctacgattaggataaagaaggaaaaataagcgattaaagttaggaggaaggcaaatgtacggcttgatcaaccaaccagcggtcttcatgacggaagacgacctcaaatccagaagcgatgaacttttatacggctgggctgtcaaggcaaccgggaaaaaggaagacttttggtacgtaaccagtcattacggctataagggctacgtgccaaaggccgtggtaactccagttagcctggaagaaatcaaggcgcgggaggtcaaactcatccggcggccagtcattgacgtcctggctgagcccaaggtttcagccgacattctgttgacggtttataagggcagcctgcttaacgtgacggatgagcttgcggacggctattacaaggttaagctcttggacggacgaagcggctgggtttccaagacggccttggcaaagcggctggatgaagatgacgtcttgtggtcagcagatccggaatactttttgctccaagccaagccggatgaagaaagcttcagaaagcaggtaacggagaccgccaaggagtacttgggctgccagtaccggtgggcgggcaagagccccttggggatcgactgctcgggcctggtcttcatgagctatatgctaaacggggtcctgctctggcgggatgcggaaatcaaagaagcctggccggtgcatgagattgagtttgaagacctgcggccaggggacttgatttatttcccaggacatattgccatgtacctgggccacggcaagtacatcaactcaactggctataaggagcacttcggggtagccatcagcagcctccgtaaggaagacccagactaccgggccgacctcttccagatgatcgagaagtgcggctccctgttttaagaggaatgaactggtcccaattgcttatgctataatcgagtaaatgaagtacttagccgggattggggcaggcctggtcagcattagtatttttgactatttagcgccaaaaaagacttagcgttgatgacaaataagcgcaaaaaaatagtggaccttccatctgaggaagttccactatttttctttgtcttacttgctaaagccgttaggatgcttttggtgccagttccaagcgctggcgatgatgtcgtcgacattttcgtacttcggactccagcccagcaccttccgggccttgcttgagtcagcaacgagtgagtccgggtcaccgccgcggcgtggcccgatagtataaggaatgtcaacgccggtaaccttgatggcggccttcaggatttccaagttggagaagccggtggccgtacccaggttgaagacgtcactttggttagtttccatcaagtgcttcaaagccaggacgtgggcgtcgatcaagtcaaccacgtgcacgtagtcgcggacgttagtaccatccttggtgtcgtagtcgtcgccaaaaatagtaaagtcaccgccgccagccagggcagccttcatgatgttaggaatcaagtgggtttctgggtggtggtcttcaccaattgacccatccagggaagcacccgccacgttgaagtagcgcagggcgatggacttgatcccgttagccttgtcagcccagtgcatgatcttttccatcatcatcttggtttccccgtaagggttgattgggttgagcggagtttcttcagtgattggcagcttttcagggatgccgtaagtcgcagcgctggatgagaagaccaggtacttaaccccggtttcttccatggcttccagcaggctgatcatgccggatacgttgttcttgtagtacttcagcggcttcttgactgattcgccgaccaaagagtaagcagcaaagtgcatcacagcttcgatcttttccttcttcaagacgtcagctaccgcatccttgtccaaaaggtcaacttggtaaaacttggcctttgggtcaatagcttccttgtgaccagtgaacagtgagtccaaaacgactacgtcattgccatcggcaaccagccgtcttacagcgtgggagccaatgtagccggcaccacctacaactaaaattttcatgtttactccttttttatacttttttgcaaaacctaactgatacctagtataacagaaaatgctttccccggctgaagcaattacagagcaattgccttgttggccttggccaaaagactggccggaatcgcctggtgcaggtgccagacaaaggaaaccggccgctcgcctgcacttgaaacataatccgcgttgcctaagaaagtgtaagctgctgtataatttccctgctttttgaactctctgacaaaaagagaaatcagattgccggtctcgccctggtggatatagcgctggattttgggactggctggccggtcctggctctggctctgccagtggaaaagctgggcattgatggcatagtcctcatacatggttgacggggagaagtctttttcactcttgttcagattaataaggaagatatccgtctttttatcagcgaagtacttgaccccctcccggaattccggggactggtcctggttgaagtagtcaaaggccgccatgatctggttgacattgtagtggcagtggacttccaagggacaggtgaaggggtattcgttagcttccggcaagacggtcaactggctcagccggtagcggaggacttccattaattcctctttgacgaagtcttcctttaaaaagtccttgatcccttcatgcaggtccttaaagcccagttgggccggctttttcttgtagaaactgtagtagagcatccccagcatcaagcgttcagtctcattacttgtctcttttggcatcttcaagtaagccagccagtagtccaggagccttttggaatcgatgtggaaaaagctgctgaacttctggtagacctggttttccacatcccggtcgtcagtaatcagtccggcccacttcttcaagcggaaaagtgaacgcgacccgctggcgtggtagaagtcataaagactcatgtcataggccttgaggaagttagccaagtttaattccaggcccgtgtcttcgctaaaagtcttcacccgctgggtcaagccatttttgttagccgcgttctggccaaggttggccaggatgtactttttggcaacgggctcaagctccagatagcaggctgccggcaggtgcgggaagccatctctgatttcatatggcagggcatggcctggtccggtcagggccttgaacttggcctcgtagttatagtggcggttggcctggccgatgaagtccaggactgtcaagcaatccttgcccgggctgaggcggaggccccggcccagttgctggaggaagatggtcgggctctgggttggccgcaggaaaaggatggtgttgacggctgggatgtcgaccccttcgttatagaggtcaacgacaaaaataaacttaagcttgccggaggtcaaatcttctttagcctgctggcggtcagcctgggcagtctggccagacaaagcagcggaagggatgccggcctgattgaaggcagcggccatgaactcggcgtgcttgacgctgacgcagaagcctaagcccttgatgtcttccaaattgttgctgtacttgtccaggttgcgcaaaatcaacttggcccgggcgtcgttagccgtatagacattttccagctcactgacctcgtattggccccggctccacttcatgccggagtagtcaacattgtcggtgaccccgaaatactggaaggggcagaggagctggcggtcgatagcctcgcctaacagcatttcggcggcaatattgccgtcaaagtactgcaagatatcctgcccgtccattcggtcgggggtcgcggtcaggcccagaaggatcttgggcttgaagtgactgagcagcttttggtaggacttggccgcggcatggtggaattcgtcgatgatgatgaagtcgtagtagtcgctgggcaagagatcagccattttttctgagttaaaggactggatggagacgaaaagctggctgacatcatcagtcttgtactggccgaccagcaagtggccgaagttgaagtcgttgaggacttcgcggaacttctgcaggctctgctccaggatttcctgccggtgagcgacgaagaggaggcgggcatggggatgctctgccaagtagcgcttgaagtcaaaggcggcgatgacggttttccccaccccggtggcggcgacgaggagatttttataatggccgtaaacttcccgctcagcctgcagccggtccagtatctcctgctggtagttgtagggccggatgctggtttccaagtggaaagtatttgccttatgccggttcagttctgtctgcagtttcttccggcagtcttcttgatccgggtcaaaagtttcaaaagaagggtcgttccagtagctttcaaaggagacagcaaatttgttgacgatgtcaaaagactcctgctcagtgaccttgacattccattccaggcccgtggtcaaggcagcgctggagaggttggaggaaccgatgtaggcggtggagaagccagtctctcttttaaaaagataggatttggcatgcaggcgggcgtggtcggtctcgtagttgatcttgactgtagtgttgggcagctggctcaaggtcaggatagccttgtagtcagttgcctgggtataggttgtcgcgatcacccgtagctggtggccggctttttggcaaaaagcttccaaatctcctaaaagagggcggatggccgaccacttaataaaggaaacgagcaagtcgacctggtcagaagaggaaatttccttcttgatttcgctgagcatgctgggctcatttttactgccggtaaaaagggcattctcaactatggaagtctggggccggataggggtaatcttctgggactgggtcagcttgtggtagatggaggtcaggacttcgccttgttccaggatctgcaggtcctcgtagtcggcttcgccggtatgcagggcgacctggtcgacaatggagttggccaggcggatctgggcgatgagggcagccttgtcttcaccggacttgaagatgtcgcggaggtagtgcaggcccgaccggatgacctgggagaggtagatggtcaagagctggcgggagtcatcagcgtttagctgttctagtttataatccctggtttttgggtcaattttttccagctggtccaggatttcttggttaaggatttgttcgtaaatgccgtctttcagcatgcttttcctgctttctaaagtgttttgccttaattgtatcaggttcggggaaatttgctaaattatggctttttattaccattctcacaaaaaagactataatatgcttatggcatgattttttacaaagggggaaaaatgatgaagaattacatgcaacatcttaaagagcgggccattagcgcttatccgcctaagaccagccggcggtggagtatctgtattgcagttgctgtcatcattggcctgctgcttagccattttggccaggccaatttcggggcctcgcttgctgatttcgccctgttttgcgggattgacttgttaggagtaacttttgccaagcacggggtcaatatttttctggcctacttactggcggcagccttgtattttgcggtttctgtcttattgactttttacatcatgtcatccaacaatttataagaaagcaaaagcagctgacttctagttaagaagcagctcctttcttatttagtcgaattgatccagtgaaaaccagccccgatgagccaaatggcgcctcctaaaataacgaggacccagctagtggaccagcggccggttacgatgctggccagcaggtagacagcgatgacgatagtccagtagatgctgttgttcctgcccaggcgcttagggtcagtgttcggccggtccatctcttcgcctggttcgatggtctgtccgtcttgcttgtcgtctttcagcaggtagtcagctgacacgtcgtataaaaccgtcagtttggcgatgtatgatatgtcgggcacgctgtcgccgttttcccagctggccaccttggcttgtgtggtcattaatttttccgctaattctttttggcttaagccatgcttcttgcgcaggtcgcgcagcttgcttgaaagcatcatgtttttccccctcatcaatctctcttcgataatattatagcctttagccagcttaaaagctcgcggggaaagaaaaagttcccgcgtcagcaggaacttgaaaagtcattaatctaatttgtcagccaggtcggtcagcttggcaaattcgcgctgaaccaggaaggagacgcagagggccaggccggccaggatgatgaaggcggccaaggtcacgtagtagctcttcaaaacttcgtgggtgaaggagagcaggagcgggccaaccatgccggctgccgcccaggcagtcaagatggagccgtggatggcgccgagttctttagtgccaaagacgtcgcccaggtaagccggaataactgagaagccggccccgtagcacgacatcaaaaggctgagggctacagcgaagatgaatggtgagtgggtgaagatcaagatcacgaacatggccatgtcaacgacaaagatcaagctgtaggtcaaaggccggccaatgtagtcggacaaggttgcccaaaccagccggccaaagccgttgaagaggccgatgatgccgaccatgacagcggcagtagccgcgctcatcccagtcagttcctgggccattggtgaagcagcggagaccagggagatcccgcaggtgatgctgataaagaacatgaaccagagcaggtagaaggccttggccttcagtgcttggttggccgtcatttgcaggccgccagtcaaggaaacagcttccttgtcttcactcttgaagttggccaggtcttcagcagttggccgcttaataaactgggcagatacgatcataatcaagaagtagccggcacccaagatgtagaaggtattggacaagccaacgcttgacatcaggaattgggcgaccgggctggttaaaagagcggcaaatccgaagcccatgatggccaggccagtagccaaaccccgtctatccgggaaccacttgatgatggttgagatcggggtgacgtagccggcacccaggcccagaccagcgatgacgccgtatgaagcgtacaagagccagagctgctggctttgaacagccaggccagtcaaggcgatcccgctcccgtaaaggatggcggaaacagtcccagtcaaggtcgggccgaatttttcaaccaggcggcccatgaaagccgcggacatccccaggaagaagatggccaaactaaatgcaaatgcaactgatgattcgctccagccggtctgtgccgcgattggcttagtgtagacgctccaagcgtatactgagccgatcatcagatgcagcatgacccccgccaaagcaacaatgtaacgattagtcttcattgttcagatattctccttataaatctttggactttgtagcaatacacgaacaatattattaaatagggtcaatatcattcgatgtgttaaggataccatgtcagcaatgtaagggcaaggcaaaatttttaagatcttgagttgggaccgctaaccatactactagatctagggttgttttttgcaaaagagttaccggtaacatgaccggaaaaagtgaaagcgcttaggaaaacggctaagatagaagggtgagaaaaaacggccacaggccaaggaggaaaaaatggctagcgataccaagattgacttgcgcaagcaaatgatttacagcatttttgtcagaaactactcgccagagggcaacttcgaaggggtccggaaggatttggaccggatcaaggacttggggacggacatcatctggcttttgccaatccagccgtcaggcaaggagaagcggaaggggagcctgggttcaccctacgcaatttccgactaccgggctatcaacccggaatacgggactatggaggacttcaagcgcctgtgcgatgacgttcacgccaaggggatgaagatcatcatcgactgcgtctacaaccacacttccccagactcagtcctggctaaggagcacccggactggttctaccacaagaaggatggcagctttggtaacagggtgggcgactggagcgacgttatcgacttagactacagccacaaggacctctggaagtaccaggcagagactttggtcatgtgggccaagtatgtggacggtttccgctgcgacgtggcctcgatggtgccggtggacttttggaagtatgccagagaagaagtggctaaggtgcggccaggggctatttggctggctgaatctggtgccccggactttatccgcttcttgagaagcaagggggcagtcggtgggtcagattctgagctctaccaggcttttgacatgacctatgattatgacatctacccagatttgcgggcagcgctgctggggcaaaaggatctgactgactacctggctagcctgaaccggcaagaaggggtctacccggaaaactatgtcaaggcgcactttttggaaaaccatgacgtggtccgcgcgcacgggatgatcgatgatccggcggccttgcgggcaatgacggccttcatctacttcatgaagggggccatgctggtctacaatggggaagaaaagggggatgcccaccacgtgaccctgtttgacaaggacccggttgactggaacggcgatattgatttgacggacctcttaaagaagatgcatgaaatcaagcagctgccaatcatggctgagggcagctatgaggctaaagaggtcagaaagggtgtcttggaagctgtccacagcctgggtgaaggtggagaagaagagcagttgatcggcttgtttaatacgaccggcaagaagcaggcgattccgacccagctgccagaggggatctacaagaacatttatgatggcagcagcgtccaggtttacgaaggagtcatgcggatcggcgagattaccattattgagaaataagggctgagaaagcagtctgagggagacagattttttgcgaaaattggcgaaaatttttttgacaaaagcagattgtttgctataatgaaagagttgataaattgccaatttagctcagttggtagagcatctccctcgtaaagagaaggtcattggttcgattccaataattggcactaagagaattaaacagttgtaagaaagtctattatct

SEQ ID NO: 2314 - DNA, 1428 bp, Unknown
  gut microbiota DNA sequence
gttttctcagctaagctgtatggaaagaggtcgcatcagaatgcaagagtcatccaagaaagcaagaaactcttcagtcaagcagacagtgaaaaagactcagcccaagacgattagagtctactccaaaaagttaagcgatgaagaatttgccagaatgtccgacttttttgaaagatacggcagatgccggcatttctttttgaaccgctactgcggcatcaagtcgatgctagcggttaataactggcaggctctgcgtaaccaagttcgcaagtgggacaagccggttaaaggctcaaaaggcaagctagaaacagtctataactttcagaccaagcactgggtaggcgctcttcgtgaagcatgtgccaacataaaaagcatgtggtcgaatttggcgaatcgcttgaagaaagtgatccaaggaaatgaaaatctttctgctgatcagcgccaccttctgttctttatcttaaaatttaaaagcgcatggcaagctgttcttcttcacaagccaattgagctgccagaagaatacactgaagctttaactgaaatagaagctaaactgacggataagcaaatcaagcaagcgcacagctacctgcgccggattacgtaccactaccactaccgggcacgcaagtcgggcaagcttagctctagcatgaagtgtgacttgaattgggcatttgaaggaaatactttttcattcagttccgatgtgcctaggaagcagttttctgtagagatgaccagttcgtggaattatccacgcaccggcgatatcaccgtggtgcttgaccgcatcaagcagcgcctcgaagttcataagctgatctctagcaagcgttacagcaatgattcaaagaaggcaatcggcattgacaaggggcttgccaccctgctttcctgcaacagcggcaatgaatatggtaaaaacttcagcaagcttgccaatgccatcgttgacaaatacggcaagcgaaacgcaaatcgccagccatatatgagtttgcgctggcagctcaatcagcagcttgagcaactggagaaggcaaacccacctttgtctaagactgctttgaggaagaaaagaaaactgcttggcaagctcaagaatctggagcagaacaatatcggcagaaagtcgtatgacaagagctaccggtcagcgcaagaaactgtcagaagctttatcaaccatgcgataaacagaatgatcgagacagagcatccggcggtcattgccaaggaagacttgacgttcgtaaaagaaaaaggcgtcaaatcagataacagcagattcgcaagaaagattcgcaagcgcttgaattcatggactaagggccaactggatgaacgcattgaatatctttcaagcaagaattcgattgaaactcatgatgtcaatccggcatatac

SEQ ID NO: 2315 - DNA, 338 bp, Unknown
  gut microbiota DNA sequence
tggccaaccacgtaagacaggaagcgttcctgcaggtccagggattcatcttggtgcatccaggccatttccggttccatcatccagaattcagtcaagtgccgacgggtcttggaagcttccgcccggaaggttggcccgaaggtaaagatcttgccgaaggcttctgccccgacttccccgtaaagctggccggattgtgacaggtaagcgtcgtggtcgaagtagtcgatgtggaagagttccgtggtcccttctggcgctgagtgcatcagaagcggggcgtcaaacttcacgaagccttcgttttcaaagaagtcgaccgtggccttgaagat

SEQ ID NO: 2316 - DNA, 641 bp, Unknown
  gut microbiota DNA sequence
gcttcatttgctgacgaccacttgaaggacgaaggccgcgtacgccaagaaccaatctgggatgtcatcaacaaggaagccgcagacaacgctgtcttcgctattgacgttggtaacgttaacatggaccacgcacgtctgttgaacatgaacggcaagcaacgctggactacttcaggcttgtacgcaaccatgggttacggctcaccagctgccattgcagccgcaactgcaatgccagaccgtgaagtatggcacttggccggtgacggtggcttcgcgatgatgagccaagaactgcttactttggctcgctacaacatgcacgtattgactgttgtctttactaacgaaactttgggcttcatcgaagcagaacagcgtgacgaatccaaccaacctctgtcaggtgttatcattccagacaacgactgggcaaaggttgctgaaggtatgaacatgaaggccttcactgttcacgacaaggctgaattccaagccgctgtagaagaatggaagaagatggacggcccggctttcatcgacgttaagtacactaagcacatggcttactcaactgaacttaacactctggatgacccagaattcgtgaagtactaccacgcagaagctctgcaccc

SEQ ID NO: 2317 - DNA, 4635 bp, Unknown
  gut microbiota DNA sequence
aaaccagcctctgtcaggtgttatcattccagacaacgactgggcaaaggttgctgaaggtatgaacatgaaggccttcactgttcacgacaaggctgaattccaagccgctgtagaagaatggaggaagatggacggcccggccttcatcgacgttaagtacactaagcacatggcttactcaactgaacttaacactctggatgacccagaattcgtgaagtactaccacgcagaagctctgcacccattctcctactttgctgaaaagtttggtttggaaattgacgcggcttcaggtgcatccggccactcagaagacaaggcagaagcattgcaagttcaagcaacttcaagtgcttcaactccagaaactgcaccagacactagttcaggtgcttctcactaagagaaatataaataaagaagaaagcgaaaccttttggtttcgctttcttcttgcttgcaagtataataaaagaggcagacatactaggaggtaaataaatgcaacaatttggtgtgatcggtttatcggtcatgggcaagaacttagccctcaatgttagaaatcacggcttttcagtctccggcttctccatcgacaagccggaagtcgatgctttggccaagtacgaggatgacaagctgaagccttgctacacttgggaagaattcgttgattctttggaaaagccccgcaagattctggtgcagatcatggctggtgacccggttgaccaaaccattcagaagctgatcccgcttttggacaagggcgacatcattattgacggcgggaactccaacttccacgacaccaaccgccgctaccatgaattaaagaagcacggcctgcacttcatcggcatgggcgtgtccggcggtgaagaaggcgccttgaacggcccggccttgatgccaggcggggacaaggaagcttatgaagaagcagcgccaatcttgaccgcgatggccgctaagactgaagacggtcgcgcctgcgtgtcctacatcgggccagaaggggcgggccactacgtcaagatggtccacaacgggatggaatacgcgatcatgcaggaaatctctgaagtctacgacatcatgcgcaaggtagcccacaagtccaacaaggaaatggcagatatttttgctgaatgggacaagggtgacctgaacgcctacttgattgaaattgcttcacaagttttgcggcaaaaggacgacttgactgacgacgatgtgatcgaccacatcttgaacgttgcttcctacaaggggactggcaactggatgctggaagacgccatcaagctgggcgctccaattacggtggtagcggaagcagttttggcccggttcatgtccaaggcaacgacccgggaaggcaaggaagtcgtttacgacggtgaagttgccagcgacttgatcgacaacttgggcaaggcaatgtacctggcacagatcgtggcttacgctcaaggcttccagcagttgactatggccgctaaggcttacgactgggaactgaactacccggcgatcgcgcagaactgggaagcgggatgcatcatccacgccaagaccctgtaccatattgaagatgcctacgctgacggcaagcaactggacaaccttttccaagacccatactttgcgggtgtgatggaaaagaacctgccagccttgcgagcagttgttaagctggctgcggaagctggcgtgccgactccaagcttcagcgccgctctgaactacctggaatcaatcttcaacccaagcctgccggccaacatgattcaggcacaaagagactacttcggtgcgcacacttactacagaaacgaccgcgagggcgtttaccacaccgaatggtatgaagaaaaataacaaacagtattgatgaaaagagtgaaacttcgttggaaagtttcactctttttgtgtttctgagaaaatgctggtggaaagaaaattatattttttaatgatttctcctttttttaaaaaggtaagataaatatatgactgaataaaaacagccttaaagccgcgcttaccatgatgctagagcatgtgtcaatgacttttgcttgaatttttttgtcgaattttatgttgacagggattatatgtggaactatactgaaagcggttaaaggggaagaaaaatataagggaggagctgtatatatgtatattattaggcaacaatggctgcaggacaatgctatacgtaagtggtatttcctagcaaccattttaattttatttgggggatgcagtactgctattctggtaagcgacgcaccgcaaaatcagtggttaagtcagaccatattctcacgctttcttgttttcagcttgctggttcctgttcagatcttgcttttactgagtacatttcgtgtccgtctgcaagacatatatgttactgggagcaggcggataatttggaagcagctggagtatcgtttggcgatagctttgctcgtgacccttgtgccatggggagtcggctgcttgattggtatgtgcctcaatggctgggggaccagattagggactatagtggcagaagcattgattcgctacctgtatctggccttgtcctgcctggctattctcttgctggtcagtctctgtttgctggctagcaagagaatctgggcctttctggccggctttgttctaagcggaatttcctatttcttgaacgtcaaccatcatttttccttgttctatgattttcttatcgatgatttgggaaccctgcttctgtcccgcttgccgatcctgctaagcatagtcttgtttctagctgttggcgtgcaaatggaaatcgctagaaaggactggtaaaatgcggctttttaaagatcagtttctgtatttctggcagctgataaaggtgaggttcctatcatggctactgttgacctgtttgtttttgctggttgccggtggtttcatgagaaacggcagaagtgccaatataatggtcttccaagggcttggattggcagagataagggctggcattagagattttccggtcttgtggttcggctatttctttttcccgctgatgatcagcttgaatattttcaaggaattgtggatcagcagggtaatgcagctgcggggccagcagatcaagccaagtcacttcagctgggtcaatgtcatattgcagttgcttttggccgcagtttacgtcttggcaagcaatgcctgcctatggctgaaagacttgctatgtggcaactctcctcttgttctgggaccatggcaaggaggagtagcagaattgcactggatgttaattgcctggcttggggttagttcactcttactgattcaagccagttgcagtgagctcactcccgctttgggtttgattatgccaatcgtcttgttggtttcgacctctttgacggcttggagcggcaatccgcttaatgctttaatgtttagtcgctggaccagtggcgcagagttgtttatgtttgtgtggaccttgatctgggctttgctgtacgtgttagttgacagcaagcacggctgggtctaaaggaggaagaatgtttattgagttaaagaatgtaaacaaggtcatctcaggccggcagctgctcagtcaagtcaactgcaagattgaggctggccagatcgcggtttttgaagggatcaacggatctgggaagaccttgattttaaagacgattttgggcttgatgaaggttgacggggaagtcttggtagctggcaagcaagtcaagccgcaagatgcttatccggtcaaggctgggattttgattgaaaatcccagcttgattacagacttcacggcaacgcggaatatggagcttttagccaagcttgatgagcatatttctgcaactgaaatcgcagaattgctgaagtactttgacttaagccgctttcctaatgaaaaggtcaagaagttttctttagggatgaagcagaagctgggtattgctgaagccttcttggggtcatatccgctgattgttttagatgaaccgaccaacgctttggatagcgatagtattgataagttggtggatttgatcaagttgcggcaaagcaagggatgcacttttgtcatcgcttcacatgaccgggattttgttgagcaagtggcaaccaagcgctttaaagttgaagaaggtgtggttcatgaagcgtaaagtgtggctggcggcagccatcgtcttgtgcgtgctagcaggcctgcgctattggcaagtaaacgctaatcctgtttgccgcggggtagacaaggaaatttttgtcaagaaagggcaggaggttcatgctccgggaatcgactttaagattttatccgccaagatggtcaaagggaaagaaaacgtctatttgactgtaaaggtggatctgaaagaccatggctattacgcggatggcaagcatggaataatcgccgcggttaacaacatgtatttcaatatgccatacagcctcagtaatccatcagatcttgatgtggtggatggcaaagggcacaaggtagccattggacatttgactagcaagactccccagccattgacggtgaaatttgataatgtgcgcagctggtatgat

SEQ ID NO: 2318 - DNA, 299 bp, Unknown
  gut microbiota DNA sequence
gcattcatctcgccgcatttcttgcatttggtcagttcatgatgactgccgtatctttcctcaaaatgctgcccgcagatcggacagtactgagaagtatatgctggattgacatcatgagtttcaatcgaattcttgcttgaaagatatacaatgcgctcatccagttggcccttagtccatgaattcaagcgtttgcgcatctttcttgcgaatctgctgttatctgatttgacgcctttttcttttacgaacgtcaagtcttccttggcaatgaccgccggatgctctgtctcgat

SEQ ID NO: 2319 - DNA, 209 bp, Unknown
  gut microbiota DNA sequence
aaaacatattgagtagattaactgacgaagaaatcacgctttacacgccttacaagcgagttaaggagattcttgccagtcggataaaagaagcataagccaagtaatactacaaagttgaaggctctagcatgtaagagcagtcagctttaacgaactcagttcggggtattaaaatcgcggcttgactgcttcgagatgcatcacga

SEQ ID NO: 2320 - DNA, 1644 bp, Unknown
  gut microbiota DNA sequence
ctgcttaatagctagtaaattagaattccattctatcaataccgataataaaacccctgaaattattgtcctaatttcaggggttttattgttaaggtcagatgagtatcttaagtcgtcatccgttcaaggaattaggcaattacaccgctgttcaggcggtcgactacgacgctgacaggatcgatgctgtgaattgagctgatgcccagaccgaaagaggcaattccgcggctaagatcgccgtcacgcatcccgtacagcaggcagttatagtcaccagccgcagcccagatttcagcagccgacttgccttgcttatccatctcgagcagcttttctggcaactcaccaggcaatgaccggtagaaggaattaggcgcgcggaacataagcaagtcatcggcatcatatttgagcatgtcctgcttgatgttttcagctaatggagattcttcagttgccaaaaatgcggtcccagcatatacgccttccgcgccaaggtcgaaggctgctctgacggttcgtttgtcaaccagaccacccgcggccacgacaggaaccttgccgtcagcagcatcaacgatcaatggcaagatggcaaaagttccgatgaccttagctggaacagtgccgccttcatcaaaaccagtggcaataatcacgtcaacgcctgcttcaatggcttctctggtattttcagcagttggcgtcacagcacggaagatgatcttgatgccagcttctttgaacttctttgcccacttgcggttcattaggccactccagagcacgacaggaacgttctctgcaactgcaagctgaaaaatttcctcagcagttgccgctgaaattggagtcgtgtcttcttcgccagcatcggaagcatttgagctgcttgcgtgagtgaccgcgtcttcttggggatctttaaaaggcgagagattaagtgcaaatggcttgtcagtcagtgacttgatcttgatcagcttatctctaagctgatctgcgctttcaccgctcaggccaagcgttcccaagccgccggcatttgagactgctgctaccatttctggagtcgtcaagtaagccattgctgcttgaatgactggtttttcgattcctaagatttcacatacgcgattagtcatgattgtttctccttacaaataacaggttgttttgctttaactcatttgttattatattggaaatgaaagcgcacaacaataacctgttttgatattatgttaacaaaagtggaaacattatgactaaccaacatttcttgtacgatattcttagaacatgccagtattcacaaacgctggcagaagttgccgacaagctctttgtcagcaagccctacctcagtcgggcgctaaagggggcagagaccagttttggcgtgaaattggttgagcgttcaaagaagccgatcctactgaccaaagcgggaattgaaacgctcaagcatctggaagtgattgctgcggctgaagatgaccttcagcgagttcttgcccgggaagcatctcgcgctccgcagccggtcaacatattagtcagcaacatctttttagagccgatggtattggacctgctttgccagcggcagctgactgatccacaattgcggttttg

SEQ ID NO: 2321 - DNA, 274 bp, Unknown
  gut microbiota DNA sequence
aatgcatacgttagacttccggctgctaacatcaataccgaaaacagttttcaataaatccataagaataaacctccgctttacttggagatgagctgccttcacccaattcaatcagatctaattttctcaacaggactttaacagtcaacatacttagacgagattcacaattgaatggtgaagctgccagttttttatacgacatcgtgtgtccaaagagtctacggcattggcttcatctccactttacatagtaaaagaaaaagtgttg

SEQ ID NO: 2322 - DNA, 209 bp, Unknown
  gut microbiota DNA sequence
caggccgaggacagtgtttgacgggcagtttgactggggcggtcgcctcctaaagtgtaacggaggcgcccaaaggttccctcagaatggttggaaatcattcgtagagtgtaaaggtaaaagggagcttgactgcgagagagacaactcgagcaggtacgaaagtagggcttagtgatctggtggtaccgcatggaagggccatcact

SEQ ID NO: 2323 - DNA, 1226 bp, Unknown
  gut microbiota DNA sequence
tctgagttttcaacgctttctcatgctggattttttgcttgtcagtcagcaacacatggtattgtctggtaaatccatacttttcttcattagacacagatgcataccttctttcgtcctactttatgctataattataccacaaagaaaggtggcatacactatgatcgtccatgaaagaggctgcgtttataacttcaatttccatctggttttcgtgaccaagtaccggaaagaagtctttgatagcccagaaaaggttgaagaaatgaaagggctgctccaaaaaagagcggatatgtcggacatccagatccaggaaatggaagtaatgcccgatcacgttcacatgcttatttcattttcgccaaaacagaggcccgtagacgtagttaaagggctgaaaggctggacagcccggaaatggttcgagctgcacccggaaactaagcagatgctgtggggcggccacctctggtcaccaagctattttatgagcaccttaggtgacatgagcacagaagtcgttaaaaattacattgtatctcagtacacggcagccatgaaaaaacagcagaatggcaagtatggcgagttggaaagaaagagaagaaagagaaactaaaaaacgccccaatggggcgtttttgcgtgcttaactcatgtctaaagacacgagtttgcgcacaccttttaatcaagttcaccggcatggtgaatctgctggcggtgcttcaagttaaagccgagggcatccagggcgtggctattctgctggtaggtcaaggcgaagaggttgattaggccgtcgtcagtgttcagctcgtagacgaaggtagattcgttatcggggataaagagggactggcggctttccagggtgtcgtcttctgagaaagtgtagtcatcgatcaccccttgcagaagcaggcagctttcctcttttttacagccagcagggatggcttggtagaccgcgtcttggttgcggcggttatagatgacatcgacgtcaaagttttcccggaggtcagcactagtgataaagaggcggtgcagctgccgggcctgctggtagaaggagcgccagaaggcagctttttcctccccgcataagccagcaagtttttcagagatgctatagtccaggatttcactggggtcaatctccagatcttccaggtagtcgttgtcgtattcattgttgtagtcggtcatttttatca

SEQ ID NO: 2324 - DNA, 362 bp, Unknown
  gut microbiota DNA sequence
accgcaaggttgaaactcaaaggaattgacgggggcccgcacaagcggtggagcatgtggtttaattcgaagcaacgcgaagaaccttaccaggtcttgacatctagtgccatcctaagagattaggagttcccttcggggacgctaagacaggtggtgcatggctgtcgtcagctcgtgtcgtgagatgttgggttaagtcccgcaacgagcgcaacccttgttattagttgccagcattaagttgggcactctaatgagactgccggtgacaaaccggaggaaggtggggatgacgtcaagtcatcatgccccttatgacctgggctacacacgtgctacaatgggcagtacaacgagaa

SEQ ID NO: 2325 - DNA, 417 bp, Unknown
  gut microbiota DNA sequence
ggggaaagcaaggctaaggctattaaggccatggttgaagggccagtgactacggatgtcccggccagcgtcttgcaaaagcacccgaacgttacggtggttgccgaccaggcagcagcgagcttgcttaaataagaagcaaaacaggaggctaattaatttacttcgtaatcacaaaatgctaaaatgtaattacgaggtgatggtgatgcaatattcaattgggacgtctaaactgtttaaatccggaaattcgtatggttttagagtgacaaagcacgacaaggaattattgtctgccaacgctggagacgtttttgataaagaaatatctcccgatggtcaaacaattacttttaaaaagaggaaaaaggttagtcctgaaacacttgctttaattgataaactgtttgacga

SEQ ID NO: 2326 - DNA, 22697 bp, Unknown
  gut microbiota DNA sequence
caatctgatgaggattggagaaccaagtgtcaaacatgacgtacttggcagtgagccctgctttcaaggcttgatcgagcagctggataactacatcggtccccctttgattgggccataatccgcctcttggccgcgattgtgcgcttgccgatcttcttggtcgtcccgatgacattctgatcgttctttgaggacaagagtgatgaagcgattgggacaaaggaggatccatcagtccaacccatggtcatcatccgaaaacccttcttgtaggtcatcgaaacgtggtcgaatactttggcagccagctcagtcttcttgtatccagttctagagtagagcgaatcgtcaaaaacgaagcaatcggcgcgttggtcagaagtcagatctttcaggtgcccattgacgatcctctcagctagcagaaaagtgaggcgaagccagttgatatgtgggttctgcatgaatcgatagtaggtgtttttggagaagccagcagtacacttgccagacttctgttgcatgtacatgcttctgtctggaaacacattactgaagatgtatgaaaggatcgaccaaagtgggattcctttggacttgcggagcccacatctacagagaagctccataactttgtagtccttgaagaacttttcaacagaacgggcaattttaggttcgttttcagtatcgaatgatggtagacatagcgcaagcctttcgtttgatattgatgatgttgtggttgactaaattatatcaagcgaacaaaggccttgtgcttttttattggctaaactattgaattttcaaggtacaagcccacttttgtaagtgggaagtttaagtaagttttttagagcaatccattttggattgctttttctttaaaattcgggcaaactgaagtggtttgactatgtttttatgctgatttgtaagataataagcttaatcctgtgtgaaatcgctatattggagattgcaagcttttgaaaagaaattaggaaaagagtgtaactgatgaacaaggcccataaacgaataggaatgctgctgattgccataatcgcgtgcttgatggtcattccagtctttgagcccctgccggaggtcggcggaaagagcaaggttcaggagcatcccccgaagaaggagcaggttgccaagaaagaaaatgaccgcccttaccctgacccgagtgacatgcgtcccatgaccggccactactacctgtattccagcgaaaccaagcgcaagtaccctgacctgcgtaagtacaaggatgtctggatccgtgtctccattttgggagcccgggcctatgtcatgtctggcaagaaagtcatctacaccatgtacgcttccccgggcgcgatcaagaagaacggtgaaagccggaccccagtcggcaactaccggatccaggaagaagccggtgaggtcttctacaataatgacggggtaggggcccgctattgcgtctcttaccaccagcacggggtctacctcttccactcagtcccgatcaacaacttcaattccggggttaaggccggcaaataccactatggctacaagggcggagcccacctgactaccctgggcaagaagccggacagccatggctgcgttcgtctgtcagtcagcgatgccaagtggatctatgagcaaagattgaacgggggcctgccagttggcagcaaggttgtcctcaaaatgcgttaggaaatctgcatagagaaagcgaacacaaatatttttgatataaagcgcttacaagagagaatttatttgctctaatattcattattgggtacaatagagtcgtaagaagctcaggaggtatttttatggcttatttcgttaatggtaatgacatttttaagaaggctcgtaaggaacactacgctgttggtgcctacaacactaacaacttggaatggacccgcgctcttcttcgtggtgctgaagaaaccagaactccattgttgattcaagtttcaactggtgctgctaagtacatgggtggctacaagctcgttaaggacttggtagaagactcaatggacgctatgaacatctcagttccagttatcttgaacttggaccacggcgactacgactcagctgttgaatgtatcaagcttggctactcaagcgttatgttcgacggccacgcattgccaactgaagaaaacttggccaagaccaaggaaatcatcaagctggctcacgaacgcggcatttctgttgaagctgaaatcggcaagatcggtgaaaaccaaggtgccggcgaacttgcttcagtagaagacgctaaggccttcgtagctgctggcgttgacaagcttgcctgcggtatcggtaacatccacggtgtttacccagaaggctggagcggcttgaacttcgaccgtcttaaggaaatcgctgaagctgttcctgaaactccacttgttttgcacggtggttcaggtattcctcaagaccaaatcgaaaaggcaatttctttgggtatctcaaagatcaacatcaacactgaattccaacttgcattccaagaagctactcgcaagtacatcgaagaaggcaaggaccaagacaagagcaagaagggttacgacccacgtaagctgctcttgccaggtactgaagctatcactgactcaatgaaggaaatgatcagctggatgggtactccatcaatcgacgacaaggaagctgacgcttcattcgacagaagctcacttaacgaagaataatctgaagcttcagattatttttcatgagaaaaggctctacaacagcatttgctgctatagagcctttttctttttctcttattcaattttgtgcttattttttgtctaatctgactgcgacctggttaaagctgtagggtttgacgaaggtcagctgccagccggttaaagccaagtcttcgccggcaaaatttgggttgtagaggggatcgcccacgatcggccagcctgaggctgacaagtggacccggatctggtgggtccggccggtttccaaagttaccagcagtttagcctgctttttctcctcgtctttttctaagacctggaagtggctgactgctcttaagccgtcagctctgacctgcctttttctttggtctgccgggtcttgcccgatcggcaggtcaattgtgccttgatcgggtatttctttgtttaagtcaaccgtagccaggtagtctcgtcttaaggtcttgctggtcagctgccggtttaagatcgggacgactgcaggatttttagcgaccagcaagagcccgcccgtcagcatgtccaggcggtggacgatgtaggggctgtagcctaagtagctggcgcagtcgttaagggccgttccgttttccccctggttggggtgggtcttttgccccttgggcttgtcaatgactaaaacattttcgtcttcatagacgacttttggcattttgccgctggccgggtagtctccttgcagggattccacctggtctaagtagaggtcgactttttcattgcccttgatcagttggttgaagctgcggtattggccgttgactaaaacctgccgctcagtacgaagatagtgccgccatttgcggggaattaagagctgcctaagcaggtcactgacggaaactgagggacggtctgcgggatagattaagctgaagtgatagatcatggctggatttattttctttctaaaaaccttgttagcgcaattaagaaatggataacttgctccttgcaggatagccgcggccagcttttatgataaaatcaaactgtttagaccacgttctaacgaaggagaagatgttaatggaaaacaggcgcaaagcgcgtaaacaaatgaacgactcccagcccaaaaagggcttgtggagatggctgaaaaggatcaactaccgcttccaactgctaagatggttgattttgatcgttttgagcctttttttagctgtatcttcttattatacctttaaagtcaaaacagccaacctgtccaacctccaggcttccctggccaagaccacggttatctatgaccagaatggcaaaaaggccgggtccgtgtcttccggcaaggggacctatgtcagcttgagcaagatttcccccaatgtccaaaaggccgtagtcgccaccgaagaccggaccttctggaccaatatcgggatcagccccaagggcatcctccgggcggcggtcagctatgtcatccacgggggcaatatcgccgggggcgggtcgaccatcacccagcagctagtcaagaactccattttgacccagcagcagactctgtcccggaaggtggaggaaatgttctatgccatccaggtgaccaaggtctattctaaaaagcagatcatggccatgtacctcaacaatgcctactttggcaacggggtctacggggtccaggatgccagccgcaagtacttcggcaagaacgccagccaattgacggtggctgaaggggcaaccttggccggcatcttgcggaacccttcctactacaacccgatcgattccctctcgcactcggtttccagaagaaacgtgatcctgcagctgatggttgacaacaagtctatcagccagacgaccgccaacaaagctaaaaaagaggggatgaacctggttgatgcctacaaggcgaccagaggctacaagtatccttactactttgacgccgtcatctctgaagccatcagcaagtacggtttaagcgaaaacgagatcatgagcaaggggctgaagatctacacgaccctggaccagaactaccagaagtccatgcaggccagcttcaagaacaagtacaacttcccggtcaacccggccggcacggcccgggcccaaggggccagcgtggccatggatcccaagaccggggcagtcaaggccctggtcggaggacgcggcaagcacgtcttcagaggctacaaccgggccacgcaaatgcagcgccagcccggcagtgccatcaagcccctggctgtctacgcgccggctctggagaacggctaccattatgactctgacctctccaacaagcggcagaagttcggcaagaacggctatgagccggtcaacgtcgacaaccagtactcgaccacgatcccgatgtaccaggccctggcccagtccaagaacgtcccggctgtctggcttttaaacaagatcggggtgtccaccggggtcagctacttgaagaagttcggcattaccgtctcaaagagtgaccagaacctggccttggccctgggcggggtgtccaccggggtcagtcctttgcagatggcccgggcctactcagcttttgccaacagcgggaagctgccggacagctcatacatgatcaccaagatcaccgacgccagcggcaacgtgatcgcggaaaacaacaataccgggaccagccagattatttcagctgacacggccaaggaaatgacccagatgctgctcagcgtcttcacttccgggacggccgttaacgctaagccagccggctactcagtagctggcaagaccgggtcaactgaagtatcttttgcttacgggactaaggaccagtggatcgtcggctataccccggacgtggtcgcggctacctgggtcggctttgacaagaccgacaagaaccactacatgcaggggatttcggaaaccgggattaccaccctttataaagacgaaatgacccggatccttccttacagcaagcagaccagctttaccgttcagtcagctgactccatggcccaaagcaatgggacaagcagctcttcttcaagttcttcggactggagcaagaagctgaaagaatcgattagcaatggggtaaagaatgccgaatcaacgattcagtcatggtacaataagattactggaaaataagcaaacagaattttttatggaataaaaaaggagaaaagaaaatggtcaacatttacgatactgccaaccaattagctaacgacttgcggggaacccagcaatttttggctttgaaggaagccatggacgctgttaaggcggatgagggcagcctggccttgttcaaggaactggacgcggcccaaatggaaatcatggaagcccagcaaaccggcatggaattgactgaggagcagcaaggccacttcaagagcttgaacgaacgggtcagccaaaacaccaccctgcaaagcatgcttttggcagaacaagctgtttacaccctgctcaacgacgtacaaaagaatatcggccagcctttgtctgaagcatacgaggatttgagaaaagcctaatcatgaaattcattcatttagctgacgcgcacttagatagcccctttcgtggactatcttttttgccaaacagggaatatgctgaaatccgccagtcagctgcccagtctttgactaggatcgtggacctggccttaaaagagcaggtcgacctggttttaatcgccggcgatacctttgactcaaacaagccgtctccggccagccagctttttttagcccggcaggtgaagcggctgactgacgcccagatccaagtggtcatgatcttcggcaaccacgattacatgacccggcaggatctcttggtcgaaaacagtccttacttctgcctcttgggtgaccaggaaaaagttgcccgggaattttttaagactaagaccggctttgcctacaatgtgaccggcttttcctatagccagaaccatattgaagctgacctcctggaccagttcccggaaaaagagagctataccatcggcctgatgcacgcggcccaaagagcggccagcggcaatgtctacgctccctttgacttaagccagatgaaggagctgaactatgactactttgccctgggccacatccacgcccggcaaattttaagcgagaagccgctaattgtttaccccggcaacatccaaggccgggatgtcggcgaactgggggagaagggctgctacctggctgaagtcgatgagaccagcgggcagaccagcttgacttttgtccaaacagcaccgattacctggaagcagctgactttagagctggaccaggcaattgataagagcagcctgcatgccaaagccctggaacttttgcaagaaaatatccaaggcaagacctacttcagcttgaagatttcgggctcagaatatttgaccagcgaagaaatagacctttggcaggaccaggaggcctgggccggtctgtccgcggctttagccccagcacaattggttgatgtccgcttatccgtccggggcctggtcagcctcaacaacagcgaccgggaagccctggctgctgctgaagcagaagttttgactgacgagaagattcagcagctggccgcttcctgggccaagaaggacccatatgcccgccggcttttagagaacggggaattccgcggccaggtccgggacttggtggccgtcaagctggccaggcgcctgcaggcaatgactgggggagaagaatgagactcaagcagattcaaatctacaatttcggtcagttcagccaggagacttttgacctgccagagggcaatttagcagccttcttcgggggcaatgaggccggcaagagcacgaccgtggccttcatcaagcagatcctttttggcttcaatttgaaaaataccagctcagtattttttgaagactacgaacccttgaccaagagctacccgatgggcgggcagctggtctttactagtgatgcaggggaatatgtcttagagcggacctggagcaagggggacaagagcaagaccggggcagtcaaggtcctcttaaacggccaggaagtcccggccagcctcttttacgaccagattcaaaatatcgacgggagcttttacgctgaaagctttatctttaatgaagacctcctccgccaggtcagctccctgtctgaaggcgagatcctggagaacatctactatctgggggcggcccagagcagccagcttttagccatccgggctgactttgacaaggaagccaagggcctcttcaagccaagcgggaagaaggccccggtcaaccaggacttgctcaaattggctgagcaaagagacaaggtggccgctgacggccaggaattcgacgcctaccagcagctggaaggccagcggctggctgaagagcaagcagctaaaaagctggaaaaagaagtccaggaaatctccagccagctaagcatgctggaaaagaagctggagcaggtgcagaactaccagacttatctggacctaaaaaagcaggtcagcccggtcgcttttgaccaggagctctaccagaaggccctggagcttaatgcccagatcaaggccctcaaggccgccatcaaggaagaaaaagcagcggttgacccggcccttttggccaaaagaaaggaccaggtccgggcctggcggcaggaactggggcgaatcagccagagcctggaaatgctcaagcagcaggtcaagcagctggaagaaaagcaggccagcctcttagaattgaccccgcatttagagcaagtggcagatttatccatggaccagttccagcagatgcaggctgactgggaagaaagccagaaggcagaagccgcgcctaagaccctgccgccatatgtcggcttgatcgtagcggtaattggtctggctttgatcgggcaaaaccggattttggcaatattgttaatccttgccggcgcggctttagcagcttatgcctacttcaaaaagcccgccaagggaccggacaaggcgggagcctttaaggaaaagtacggtatcgatgccagcgttaaggtcgactccttgcttgccccttaccgggacctggccatcaaccggcgggacttggcaaatagccaggcagaactcgctcaaaaagaaaaacaggccgctgacctggcccgccaattgggcttggatggcagtgaccttacagctgtcagccagcagctgggccgcttggaagagcaggtggaagctgagaatgcggcgcttagggccagccaggaggtcaaggcggccaacttgaactaccaaaagcaaatcagcactttaactgaacagcttttggccatctaccagactgccggggtagaaaacctggcagcctaccaggcattagcgcaaaaactgcaagagcaaaaggctttatctgcccagatcaccgctttgaagaacaacttgggtgaccagttagcggcttttgaagaaaatggcctggattcaagcaaattgctggggcaaaagcaagagctggaaaaagaactggctgataagcaaaaagctgtctcagcccgccagcaggaaatggccaaccttttggctgaggaaaaacgctatgcttcttccagccaggtggctgaagacaagcagaccttggctgaaatcgccgacagcttcagaagagacagccaggactacctggccagccttttggccggggaagtcattggccggaccctggatctagcctcaaatgaccgcttcccgaagatgctgaaattagcccaggactatctggaaattttgaccggcggccgctaccgggaaatccttttgccggccaaattgtccaacaagaccccgctcaaggtggtcagaaaagacaaaaagaagatccccctggcctacctgtcccgggggacccaggagcagctctattttgccttgaaactggcttttgtcatgcagatcaaggacaagatcgacctgccggtcttgatcgacgattcattcgtcaacttcgacggcccgcggaccggctacattgtagacatgctcaagaagatgagcgaagacaagcagatcctggtctttacggccagagaagacttggctgaagccgtcagcgccgcgccaatcagatacagaaagaaggagcaggatgcttaaacgtttgctggattacaatgaaggggaagaatttgacctggtcttgatggtcaagaattcccagctgcgccaagataagaggggcaagcactacctgctcatgcaattggctgactcttccggcagcatccgggccaattactggcaggctcaggctgaggacgccagccgcttcaacgccggcacggtggttgaggcctcagggatgattgaggactaccacaaccatgaccagatcaagctgttcagcattcatccggtcagcccggacgaccaggtggacttgagccaattggtggccactgctccggaaaagccagcagaaatggagaaggagatcaaggactttgtagcccagatcgacaataagaactggcatgacctggtggacttccttttgaaaaagtggtccagccgcttcttcgcttacccggctggcaagtccaaccaccacgcctacaaaggcggtctggccttccacactttgaccatgctgaaagacgccagaggcttagctgacaactacccagccgtcaaccggtctctgctttatgccggctgcatcttgcacgacatgggcaaggtgctggaattgtccggcccggtagcgacccagtacacggcagaaggcaacttggttggccacctggttttgatcgatgagcagctgatgctggctgcccaggaactgaaaatcgacctggccagtgaagacctgcttttgctgcggcacatggtcttatcccaccacggccgctatgagtacgggtcaccgaaattgccggcgctgcttgaagcagagcttttacaccggatcgatgacctggacgcggcggtcaacgccatcacgactgaattgtccacgaccaagccgggggaattcaccccgccgctgatgtcccaggacggccgccgctattaccggccaagacaggaaagatagggaaaattcttctttttctattccttttatatttctctctttccctgtttgattttttggattaaactcttgacagattcaatgagatattttttaattattttaatcaaaaaatcatttaaaaaagaggatctaacaatgaacttgctcaagacaaacatgactagtttcttttatggctatgcttatttcgactaaagcgtccgcggatacggacgcgagacgttcgtatctcagctagccaatgtttgttgagcctgctagatacacattcaatctagcatggctgggggcaagggcccactcttttatagatatgcaaccatctggattggagacgtcttccaaaacaggtggtttttatttttagattagaaagagtggacaagatgagaattgtattagttggcttcatggcatgcgggaaaacgacggttggcgatttgctggcgaaaaagctgaacaagctgcagatcgacttagaccaggctattgtggaaagagaaaagctgaccatcccggaaatttttgccaagttcggcgaagaccacttccgcctctgcgagcaccgggccctgctggccaatattggcaaagacgcggtgatcacgaccggcaccgggatctgcgcaatgtcttggaacggtcctcagcccgggaaactaccatgcgggtggctttgggcaatatcgcccagcagtttttgcggcagctggatatcgacctggtggattatgtggcgcaagtcgggccagtagaagctgattctgaaaagcccttagacgtcagtgagatccggcagaagatttttcaaaatgacatgcatgttatcgaccaggacaaggtggaagacctgcatcagctgatttcagagactaaggaaaagggtgatacactgggcggaattatccgcctggtagcaactggcctgccggcagggctgggcagttacgtcagctgggacacgaaattggacgccaagcttgccgcggccgctgtcggggtcaatgccatgggcaattccggcacgacgaaccgtcttttgctgggaattttggccggcagctcctttgccagtcaattgatcggggatgcttctttaagcaagcggccgatgaagcgggtcagccagcccttggctaaattcggggcagagattgccttgagcccggccggaaccctgccagccagggtcatagggcagaagctgcatggggcggaaatccagctggaagttgccagcgcccaggtcaaaagcgcggcgatttttgctgcccttgaagcaggtagcccgtcaaccatcatcggaaaattgccgaccagaaaccatactgagatcatgttgcggcagtttggcgctgatatcacaatagaggcggacaatttgaccatccatgtccagccgggccaagaattgctgggccaggaagtagaagtgcccggcgacatgtcttcagcagccttttggctgaccgccggcaggctaaggaaatcctggccgcttatgagctgaaaaagtagtatcaaaagaaacaaagaaaaaagacgcgattcagtgaatcgcgtctttttatcgtctaatcgtcggcccgcattagtttgagcttgatgatgagctagatgatgatgaagtgccaaggtagttagccagcaggttcttgctcttcaggtccttgtccttgatgttgacgttggccttcttcagaaccttgctgatgatcttggtcatcgtgttggagtcagctgcccacttagcgtagagctgcttgtcgatgaagctcttgttcttagtgtatgagcccttttcagtagtcttcaaaaccttgatgacttcgtagccggatgaagtcttaactggcgtggtagtgtattcgccttccttaagcttccaaacagctgacttgaaagtgctgctcaagctggtgtcagttgagtcgaaggctgccagcttgccggccttcttcttggtagcagtctcagttgagtacttcttagccagagtagcaaagctagtgccgctcttcagcttcttgatgacagtttcagcagttgacttcttggcaactacaatgtgttgcacagtggtcttggtgtggtagctcttccaccagttcttttcttgcgtggtggttggcttcttcaagtccttcaaagcggcaactgagtacaggttggttgccaggttttgcttgaatgacttagtagtcaagccgctgtagctcaaaacagtgctgaagtttgagccgtattgcttcttgtacttgttgtattcggcgttgatcttctttgaagataccttgtcaccgtattgggccttcagcgtgcggtagatgatcaagctgaccaaagttgattggccggctgaagtgtccttcatagcttcgtagtattcgtcctgagtgatcttgccacccttgtagttaactacagtagctgagctgcttgagcaagcgacagtggacagaccgatagctgcggcacctgccaaaacggcaattttcttcaaatgctttttcataaaattaaatctccacatccttcatacgtactggttactaatataacatatttttccagctatagagttcctggaggcaaagttcatgaaaaaatccgcctttcttaggaatttctttactagctcttaccgcttccagttccaaggatcctggtgccaagccaacaattccttatattgttcttcgctgaccgtttcagcaatttcctgtgcaatcagttcccggtagttcaagagcgggacaaacttggcgtcggccttcttgaagttttcgtcagcgtctggcaaaaggtaggtaaagattgagctgatcccgtcaacgtgggcgccggtgtccttgactgcttgcacggcagacaaaacgctgccgccagttgaaatgaggtcgtcgatcaaaacgatgtggtcgtccatggacaggcggccttcgatttgccggccttggccgtggtcctttggcttggagcggacgtaaaccattggcaggttcatgacttgggcaacccaggcagcgtgcgggatgccggccgtagcgacaccgccgatcaccgtaacttccgggaattcctgcttgatcaaggctgccaggttttcagcgattgcctgccgcagtttcgggaaggaaatggtttgccgcaggtcagtgtagatcggggagtgcatcccgctggcgtagacaaagtccttgtctgtggaaatagtcacaatcttcttgtcgatcagctggcggataatttcgttattttgcatcgttcttgctccaatccttcaaaatctcttcatatgctttttgcgggtcagcggcctgggtgattggccggccgataacaatagcggttgacccgttttcccgcgcctggcctggggtggccacccgggcctggtcgtctttttggtagctctttggccggatgcccggagtgacgaacatgaagtcgtcgttgaattcgctcttcatcgccttgacttccaaaggtgagcagatgatcccgtcagccccggcttcctgggcctggtgggccaggctctttacttcgtcagccaggttgagtgagcagtgctgttcattcttcaagacttcttcagagattgaagtcagttcagtcacggccaaaagctttggcaccggcttgccggccggggtaccttcgatcaggccttctttagcggcctggatcatctgcttgccgcccagggcgtggacagtcgtgcagtaaacgcccaaagcagccagctggtaggcagtccgcttgacggtgttgggaatgtcgtgcagcttgaggtcaaggaagatctggtagcccttggcggacaaatcacggacaatttccggcccgtactggtagaacatttccatccccagcttgacgtgcaggccctgcttgtccttcagctggttgaggaacagccacattttttcctgatcatcatagtccaaagcgataaataacggtttgttcattgcgactccttaaatttacaaagcgcgtatgaccgcataagaaaagcccgccagagtctacagagaccccaggcgggcagaatgcgtgcataccaaaaagattgtgctgcttgtggtctctctgtaccaattaaagctcagttaacaaaagactatcacgaactttctgaaaaatcaaggggccaggccagcttgccttttttatttttttgtaggataattttggcgaattgaaaagttaaagaagtcacatgaagtcacacgggaggaaaaatgaccgcagaagttaatttggctgttgaactgccaggcttgaagctgaagaatccggtaatgccggcgagtgggacctttgcctttggcgacttgccagagaatttcaactgggacgagatgggtgcgatcgtcttaaagactgccacccggcatgcccggaccggcaaccctcagccgcagattgccttgctcgctgacggggtcatgaacgccgtaggcttgaccaacccaggcgctgaggtcgtggctagcgagaagatcccggctttaagagaaaagcacccggacctgccgatcttggccagcgtgggcggggaaagcgtggaagactacgtggaagtcgcgaaaattctggccgcggccaagccggacgctttagagcttaacttgtcctgcccgaacgtgtctgaaggcgggatgacttttggcatcgtgccggaaatggtggaaaagatcacccgcctggttaaggaaaaagtggacctgccggtatacgtgaaattgacgccaaacgttaccagcatcgtggaaattgcccaggccgctgaaagaggcggggctgatggcttgaccttgattaacaccttgctgggcctgcaccttgatttaaagacccggcggccggttttaggcaatgactttggcggtttgtccggtcaagcagttaagccagtggccgtccgcatggtggcccaggtcaagcaggcaactagtctgccgatcatcggggtcggcgggatcaacagcccggaagacgcggctgaattcatcttggctggggccagcgctgtccagatcggcagcatggccttccatgacaaattggccatcaaacacgtgattgacggtctgccagcagttttggctgacatgggcgcaagtgacgttaccagcctggttggccagtggcagtcaaataaacaatagaaaaatttagagcaagaaaaaagtgttgagtaattacttcatggtaagagtaatcattcaacacttttttatgttctgattaattttcgctctcgttcaggtcctggttgagctcgctgcttagtctgtcaatcttggcctgcaggcgggcgatttccttgtcggcttcctgcttgaagcgttcaacgtcggtgttgaggtcgctgaccatctgctcagctgctggcagttcactggctaagcggctgccggcttcctgggcccgggagaggccgtcttgcagttccttgtggctttccttgaagtcttcagcgtcttctttgagatattccctggtgctcttgccgttttcatctggcagaaaggcaaagaccgcccctgctgctgccccgagcaaaaagcccaggccaaagtgcttgaaattccgcatttttcttccccctcagttaaaactgggccttgatccggtcgcagacttcctggtacttcttttcgtcgtactggtcggcattgtttctggtgaagaacttgatgccgtcgccttcccagcgggggataaagtggatatgagagtgcatgaccacctggccggcaatttcaccgttgttgctggtgatgttcatcgcctcgatccgcgggtcagaagccttgatggccttggagatttccggcacgtattgcataaagcggctggcgtcttcagcgctgtagtcaaagaagttggtcaagtgcttctttggcaccattaatacgtggccttcgttgacctgggaaatgtccaaaaaggccttcacgtcgtcattttcaaaaacggtgtagctgggaatttcgccgcggataatcttacagaataaacagtcgtcaattaattcagccttagtcattgtgttacctctgatcaattttaatgagttatttttcagtttctctatgtctccatgctatcataagaggcagataaaaacatgaagaaagatagggaaaatatgactctagaaatatcgcatttgaccgggggatacagcggcatcccggtaatcaaagacgtcaatctgaccatcgcttccggtgaggcgatcggcttgattggcttgaacggggccggcaagtcgaccaccatcaagcatctgctgggccttttgcgcccgcaagccggcaaaattactttaaacgggatcaacctggctgagaagccagctgaatttaaaaagctggtggcctacatcccggaaacgccagtcatctacccggaactgaccttgaaagagcacctggaactgaccatcctggcctaccagctggatccggataaagcctgggaaaaggctaaagagcttttgaccatgttccgcctggcagacaaattggactggctgccggtgcacttttcaaaagggatgcagcagaaggtgatgatcgtggccgccttcttgactgacgcccagcttttagtgatcgatgagccatttaccggcctggaccctctggctgtcgccaacttcatcggcctcatcaaagaagcgcaagagtctggcaaggaaattctgatgaccacccacgtattagccgatgcccagaaggccatcaagacctacgcgatcttaaaccagggcacgatcgagttcaccggcagcctggatgaaatcagggaccactatggcttagaggccagcgactcctttgacaagctctatcagctcttgtaccaggagcagaaaaatgcgtgagttggcaaagaagagactgcagggtaacttccagcagtcagccaagtatttggccctggttttcaacgatttctttgtcctggctctgatcttcatctttggggcagtcatgttctggtatgcccaggtgatgaaggtcttgccggtaaaggcctggtactatcccctggtattatccgccttgctttggctggcctacttgccgggcaaactggtgaccctattgcagacggctgaccggcagtttttgttggccactgacgaccggctggatgattacctggctcccatgcgccgctacagcttagttctgccggccctgcttttggccttggctggcgggagcatgtatcccttcgccagtttaaaaatgggcctcagcaatctcaactactttagcttggtcttggccctctttttcgccaaggtctttgagcaaggggcggtcagccgcagcctgacttttgaccacagggtcaagcaggtgacctggctgatcaggctagtcctattagccttgcttttggcgagtttgtatttcttgccaaatgccttgtacctgcttttggctcttgccgttatcgcagttttggccttacgggcctggaaaaattccgcctttgactggcagtacgccattgactatgaagcaaggcggaaagagacggtttacgccggctttgccctgtttactgacgtcaaggaaagacaggtcaatatcaagcggcggaagtacctggactttttattgccgccttttggcaaggaaagcccaaacagcttcttgtaccggcggacccttttgcgggacccggaatacttgaaccttttggcccggatgacggcctttgccgttttgttaacagccatgatccaggatccggtctggtctctgctcctgtccgccttggtcatgtacttaaccgtctggcagctcctgcctttagggcaaaaatatgaccagaacatcatgtaccgggtctacccgattgcccaaaaagagcgggggcaggaagtcagccgggtcttggcctgggccttgcttttgcagacggggctgattataattttctggctggccattatgccgggccagtttgcctggagcctcttgctcttggtctggtgcggccttttggccaaaggctacctgccttacaagacccagcagctggcgaaaaaatcccgctacaagaagcggaaaaaatagggcaaaagggtaaaaaagcaaacggtaaaataagatatagataaaactaagaattagaaagaacagagagaaagacatgcgtttaaagaacaagccttgggcaaacaaactggtagaagagcacccggaaagcgccttggactggccggatccagcggaaaagatcgactgggcagcccgctttggcaacgacaagccaattgaaatcgaagtcggctcaggcaaggggcagtttattactactttggctaagcagcaccctgaccgcaacttcgtggccatggaaatccagaagacggcagccggcatcatcttgaaaaagaagctggacgaggggctggccaacctgcagatcctctgcgccgacgcggccaacctggtagcctacttcggggaaaactccaccagcaagatctacctcaacttcagcgatccctggccaaagagccggcatgaaaagcgccgcttgacctacaaggactttttagccaagtaccaggcagtcttgaccggcgacgggttgatcgaattcaagaccgacaactccggcctgtttgcctacagtgtcaagagcatgaacaattacgggatgcactttgacttcgtgtcagttgacctccaccacgaaagcgaagaaatcgtggaaaagaacgtggaaactgagtatgagcacaagtttgccagcaaggggcagccgatctactgcctgcacgcgggctttctggccaagtaaaaaatttccctttgccgggaaaatcggttaaaatagctagtaaatatttctcttattaaaagtaagcaggaggcaaacatggaagaatataaagtagttgaccaggcaaagctggcggacttagtcaagagcgggcggacggttgtcgaattttctgctgattggtgctcagactgccgctttttggaacctgccatgccagcaatcgaagctgacttcgcagacagcaagttcatcaagatcgaccgggacggctccatcgacttgtgcaaggaaatgaacattatgggaattccttcatttgttgtctaccaagatgggcaagaaattggtagactagttaatggagaccgcaagaccaagcaggaagtagaagcatttttgcggtcgcttgactagataagaggggacttgagatcaaatgatcactagtattaacaaagtaagctatcccaacactttgatcgtcatcttggcgcaaggcgatggcaaaagcaatttcgaagaaaaggccgacgtaacccgggttacggacggcaagggcgaattgaccggcttcaacttctttaacgttgaccaggtactggactacgacaagctgccaaacggcgaagtcaagctggatgaagaccaagtcgcagctttgaacgaaaaactggccagcgttggtttttccgacaagctgactgtggccaagccaaccctggtttacggctacgttaaggaatgcgctgcccacccggactctgaccacttgcacgtaacgcaaattgacgttggcgatggtcaggaccaccaaattgtctgcggggcaccaaacatcgcccaagggcaaaaggtcgttgtggctctgccaggcactttgatgccaactggggcccagatttggccaggcgccttgcgcggggttgaatcagacgggatgatctgctcagccagagaactgggcttggctcatgctccgcaaaagcgggggatcatggttgttccggacagcttcaagatcggtgacgaatttgaaccgaccaagtgtgacgaactgctggccagcggcgctatcaccctgtaattgttaaaaaacggcaaaaaataaagagctttcggctgattatggcctggagctcttttttcttggcctaagaatgataaaataagggtcgaacgtttgaaacaaatggagcgaaaaaatgttagacaagactaaacaaatttggtttattgggatcaaggggaccgggatggcttccttggccttgattttgcacgacctgggctacaaggttgccggcagcgacatcgacaagtacaccttcacccaggacccgctggaagccgctgggattgaagttgcttccttctccaaggacaacatcaagggaagcggccaggtgatcgtcaagggtaacgcttttaagagcgacaacatcgaagttgccgcctgcgaggaaaagggcgtggcgtggcaaagctatccggacacggttgaagaaatcgtccagcagtacaccagtatcggggttgcgggttcccacggcaagacttcaaccaccggccttttggcaacggttttgggcgaagccgctccgacttctttcctgatcggtgacgggatggggaagggggtcaaggactcccgcttcttcgtctacgaagctgacgaataccggcggcacttcctggcctaccacccggactaccagatcatgaccaatgtcgactttgaccaccctgactacttcaaggacagagacgactatgcctcagccttccagacggcggctgaccagactaagaaggggctttttgtctggggcgatgacgaacgcctgcagaagatccagccaaagacggccaagaagtacacttacggcttgaaagacagcgatgacttccaggcctttgacgtggttaagaccactgaaggggccaagttccatgtccgggctaatgggaaagacttaggcgaattcaccatccaccttttcggtgaccataatgtgatgaacgccacggcggttattgccattgcctttactgaaggcatcgaccttgatgtagtcagaaagggtctggttaagtacaccggggccaagcgccgcttcagcgaaaaggactttggtgacacggtggtcatcgatgactacgcccaccacccaactgaactgcgggctacgattcaagctgcccggcagaagttcccggaccggaagctagttaccatcttccagccgcacacttactccagaaccaaggaattcgaagaagaatacgtggaaattctgaagggggtcgacaaggccttcttgacgccgatttacgggtcagccagagaagcaatgggcgacatcaagagtgaagacatcaccagccagattccaggcgctgaagttattgacttcgacaatctgaaggatcttttggcttacaagggtgactgcatcgtcttcatgggtgccggtgatattcctaaatatgaagtagcatttgaaaaaatgctggaaaagtaagatagcagcagacaagccgttgaccaagtcagcggcttgtttttatgccatagcagactcctgctccaagcaagactgtaactgctaaccagctgccgcaaaccggcgccgatgaagaaaaggccagcctgcttagtgccttaggtctgggcctggtaaccctgacttccctcttcggccttctgggcggcaagaagcgcaagcattaatccaaaattcagcttaattaactatctcttctaagcacgcaaacagcgtcaaggtccccaagccttggcgctgtttcttttttatcattgtctggtttaattttattatttaaaaatgctagacaactaataaacagctgattataataattgctagacaactaacgaaaataaaagaatgtagaaatgaaagaagaaagaggagggaggacaggatgga

SEQ ID NO: 2327 - DNA, 428 bp, Unknown
  gut microbiota DNA sequence
aaaacaatgtaagtgcccaatagcacagtattaaaatcccatcctagcaatgctaagttgggatttatcagtttataggactttacttacagtggggctgaacattttcagaccatagtaaataggcttccagacgttgattatctaataaggacggctcattgggcaacttgtctagaagatagttgatatatttgaattgatccaagccattttgcttggcagtttcgagtatgctcataatgatggccatggctttggcgccagtgctgctctgtgaaaagagccaattcttgcgtcccatgacgatctctttgactgcttgctctgttgttggacagttcaagtcgaccatctttcagaatattcatgaacttgtccatatggtttaagcagtactggaaggctactccccagcttgcctgaag

SEQ ID NO: 2328 - DNA, 209 bp, Unknown
  gut microbiota DNA sequence
ctactcaggatactgataggccttctttggatttcgcttacggggctctcaccctctctggcgcgttttcccaaacgcttctgctatcctctgaagtgccatgtttcagtcctacaaccccggcagataaatctgccggtttgggctctttcctgttcgctcgccgctacttgggaaatcgatatttctttctcttcctgcagctactt

SEQ ID NO: 2329 - DNA, 253 bp, Unknown
  gut microbiota DNA sequence
gcacatccacagtttcggtatcatgcttagccccggtaaattttcggcgcggcgtcactcgactagtgagctattacgcactctttgaatgatggctgcttctgagccaacgtcctagttgtctgcgcaactccacatccttttccacttagcatgaattttgggaccttaactggtgatctgggctgtttccctttcgactacggatcttatcactcgcagtctgactcccgcacataaatgtctggaattc

SEQ ID NO: 2330 - DNA, 1314 bp, Unknown
  gut microbiota DNA sequence
tgaatagcttgttcaagctcatttaagtccttgtatttatgttcttggccgtagaacatctcccgcttaagaatgccgaagaagccctccattaagccgtcatctagagaattacctagtctggacatactctgatcgatccctctattagctagagcggcttgatatgcatagtgctgatattgccatccacgatctgagtgaaaaataagcccgttaagagccgggtgcttctcaaatgcatcatctagcatggtcattacttgcttaaggtctgggtgcctagaaatattgtaggagatgatttcttgggtacaaccatcaataattggagaaaggtagagcttttgatctttgagatggaattctgtcacgtcggtaaaccattgtctgtcgggaataattgcgtagaaattgcgcttgattaagtctggcttgatcttgccttgaacgccgtaatagctgctgtatttacgtctcttgcggattgagatgccgaataaacccatcttttgcgtgagcctctgcaccttcttatgattgatctcatagccttcacggcgaagctgtccatagattcgctggtacccatagcgctggctgtgttcaagaaagatctctatgattctatccatcagcttctggttaccagaatccttatcaagcttatgggtttggtagtagtagttacttcttgaggtatgaggcaatccagggttggcattgataacgtcgataatgtacttaacgctaagccgcaattcttgccttaattcattgattgtacgagctgattcttcttttcttggctcttccgttcttgaattaaggcctccaatttttttatgtatgcaagctcgactgtaagcctctttacctgctcttccagttctttgatccgctgcttgtccttgcttttggacattcttgggtggtctacctttcttcttggtaatgacagtatacccgttttctttaaaagagcgaagccaatttgcaagaattcctgtatttgtaagtcctaagtctagagaaacctgtctaagtgcttcaccgcctagcagaactctatcaatggcagcaagcttgaaattagcagtatatttctgttgagtgcgatccagaatatcttcaccatatttttgaatcaagtccaccaaatactggattcctctacgccccatcccatatttccggctaaggtaggtgcctcttctgtgatcgtctacccattcatggtagatagcaagtttgatttctttagtgtatttagtcatgaaaataacgagtctgggaaaaaactggactttagat

SEQ ID NO: 2331 - DNA, 2609 bp, Unknown
  gut microbiota DNA sequence
tttttgaggatcgtggtgttgacccaaagaaattggttacgctaaaaatatttgactatttgattccaaatggtgaaattaaccatgctaaatttgagagatccgtttcagttgctggtaatctggatgtaagtaagacacaatatttgaaagatattggaaagatagatgcaaaatttaatctttatgggttaaattttactctagatgcttacaaaaatgttgagtatcatggcgcttttccagctgatgagattccaaatcaattaaattcaggctttggattaatttgggacggtagtagcattgagacttgtgatggcgcctttggcaattacctacgatataacgatcctcataaactgtcactgtatctcgcttcagctttgccagttatcatttggagccaagcagctgaagctagcttcatcattgataacaatctcggactaactattgactccttgaatgatctaccaaaagtcctgaataaagtgacaaaagaagaatacgaacacttcgcgatcaatgcgagagaagtagctaaaaagctcagaagaggcgacttcaccaaggttgctttgaaaaaagcagttaaagctttggaaaagtaaaaacggcttggttaagatatagccctagctactatcctgatgacgaaaagatcttgttaaaggtattaaaaatagtaagaccgtatggtaattgtcacagtggcagcttaatttgtatggtattacggttcgacagtagcttttattagattgagagcgtaaatgaataatccgagcattaagaaaaacatattcattagtaccttatatcaggtcttatctataattacaccattagttacggcaccttacgtttccagagtcatcgggactgatgggattggggcctacagctggacttcctcaattcagacctacttttccctggtcgcggccttggggacgctttcatatgggatgcgggaaattgcccgcaaccgtaacgatgttaaaaagcggagccagattttttgggaaattgagatactgagtgtttttacctccctggccatgctgctgttatggggaatttacctaggctttcaaagccactaccgggttatgttccttatcttgaccttgaacctgttcaacactatgctggacatctcctggttctttgacggcttggagcaattccagtacacggtgaccaagaacgccctggtcaaggtggctggggttatcttgatcctgctctttgtcaagagccctaaggataccaacctttacgtcttcattatgacggggacgaccttgctggggaccatgtctatgtggctggagctgcataagttcatcgtaaaagttccaatcaaactggtcaacttgaaacggcacttccatgaaactctgatctactttattccgaccattgccacctccatctatacttatatggacaagaccttgatcggcttcatgacccagaacaacgcggaaaatgcctactatgagcaggcaaccaagatcatcaatttgaccaaggcggtgacctttaccgccgtcaacaatgtcctgggggccagaatttcatacttgtttgccaagaagaaagagaaggaaatcaagcagcggatccaaggatccataaattatatccttttcatcggagtggggatcggctttggcctgctcggaattgcggatacctttgtgccggtcttcttcggtcacggctgggataaggtggcacttttgctccgcttgttcagcccgcagatcgtgatcatcgggatttccaactgtctgggttcgcaatactacaacccggctggcctgcggaagcagagcgcggtttacattatcatcggggcagtcgtcaactttgtcttgaacctgttcttgattccgcgctttgccagtgccggggcaacttttgcctcaatcatcgcggaattgacaatcagtctgctttacctttaccatgacaatggctacttggagccggtttatattggcaaggtgatctggaagaagctgattgccggaactctgatgatgctggtcatcctggccttgaatccatttggcaatcctggcatcatcaagctgggcatccaatttgttttaggcgcgggtacttacctggcgaccttatttatcatgaaggatgattctgttggcctgcttaagaagattttgggcaggggataagggagattttagaaaagacaatggacaatattaagctcaagctctcagaagatttttttaaagaagaagttagaaacgactatacagtcagcccggagatgaagaaggtctgggccgtggaactggatcttctggatcagctggaccgagtctgccagaaatatgatattccctggtatctgtccggtggttctctcttaggcgctgttcgtcaccagggctatattccttgggatgatgatatcgatttgatgatgtacaggaaggactttgaacgcctctgcgaagttgccagtcaagaatttacggaaccctatttttttcagactgaagaaacggatacaggatctatacgagggcatgcacagttgcgtaattcggctaccactgcaatcttaa

SEQ ID NO: 2332 - DNA, 209 bp, Unknown
  gut microbiota DNA sequence
cggaaaacttctctagcagaggctttaattcggactgacgcttctcgtatctctcttcagcggaaaggtcttcccaggcgcgctccaggctaaacatttgattacagtagtggatcccttgattagccaccgaagttgcgtcggattctctggccttgtctttaggcaaggaatcatggaatttccgtcttacatgagccatacagcct

SEQ ID NO: 2333 - DNA, 455 bp, Unknown
  gut microbiota DNA sequence
agaacgctctcctaccatgtaccttacggtacatccacgatttcggtaatgtgtttagccccgttacattttcggcgcaggatcactcgactagtgagctattacgcactctttaaatggtggctgcttctaagccaacatcctagttgtctatgcaattccacatccttttccacttaacacatattttgggaccttaatcggtggtctgggctgtttccctttcgactacggatcttatcactcgcagtctgactcccggatataaatctgtggcattcggagtttatctgaattcagtaacccaagacgggcccctagtccaaacagtgctctacctccacgattctcaactccgaggctagccctaaagctatttcggagagaaccagctatctccaagttcgtttggaatttcacctctacccacacctcatcccagcatttttcaacat

SEQ ID NO: 2334 - DNA, 209 bp, Unknown
  gut microbiota DNA sequence
tgcggtacgggtgcaccgtttctggctagaagcttttctcggcagtgtgacgtcgcaaccttcgctactttaatttcgctcctcatcacgccttgtccttatgagagcaagcatttgactcactctcagacttgacgcttgaacgtggtatccagcaccacgcgctgctagcctcctgcgtccctccatcgctcataacgattcggtgc

SEQ ID NO: 2335 - DNA, 209 bp, Unknown
  gut microbiota DNA sequence
agtgatggcccttccatgcggtaccaccagatcactaagccctactttcgtacctgctcgagttgtctctctcgcagtcaagctcccttttacctttacactctgcgaatgatttccaaccattctgagggaacctttgggcgcctccgttacactttaggaggcgaccgccccagtcaaactgcccgtcaaacactgtcctcggcctg

SEQ ID NO: 2336 - DNA, 209 bp, Unknown
  gut microbiota DNA sequence
tctctccgaaatagctttagggctagcctcgcaaagaggatgctggaggtagagctctgtttggactaggggcccgtcaagggttactgaattcagataaactaagaattccagacatttatgtgcgggagtcagactgcgagtgataagatccgtagtcgaaagggaaacagcccagatcaccagttaaggtcccaaaattcatgcta

SEQ ID NO: 2337 - DNA, 15009 bp, Unknown
  gut microbiota DNA sequence
gtttgttttattttttaccagagccccattagccgctgcaaaagcaggctgacggctgtgatcccggcccagcaggaagccccgagcaagaggggcttggccccagacctgaccagcttgacgatgttggagttaagaccaatcgcggccatggccatgatgatcatgaacttgctcagctcctttaaaggcaggaagacattggcatttactccattagccagggcaaaggttgtgattaaggaagccaggacaaagtagaggatgaaggcaggaaaggcccgcttcaagctgaagctgttgtccctttgctcctttttggcggtgaaatagcctaaggccagggtgatagggatgatggccagggttctggttaatttgacggtcacggccttgtccagggtctggctgcccaaatggaacatgctgtcccaggttgccgccgcggcagtgacggaagaagtgtcgttgatggctgtcccggcaaagatgccgaaagaagtccccgaagtctggtcaaagcccaggagcttgccaaagatggggaagaggatggcggccaggacgttgaaaaagaagataacagagatggcctgggctacttcgtcgtcgtcagcgtcgataaccggggcggtagcggcgatggcgctgcccccgcagatggatgagccgaccccgatcaaggttgagatcttgccggggatgtttaaagacttgtgcaaaagccaggcgagcaagagcgaggtcgagatggtgcagatgataatcggcagggactggctgccggtcttgacgaccacctgcaggtccatcccaaagcccaggagaacgacggccgtttgcaggatatacttggacgtccacttgatcccgctggccgcgcctttcttctcttcccaaaagagggtgatgaccatgccaaacaagatggcgaagacggcgcccccgatgactggcagggccttgcctaagagccaggcgggggtagcgatggccaggcagaccaggatgccgggcagattctttttaatccaattcatttcttttttgcctccagatattttttgaacatgctttagtatagtagtaaaatggtagaaaataaaattatagattattatctgtcgataaagcagaattattgtaaggaggcaggggatgctggattttcgcgtcaaaacatttttaacggtctgtgagaccatgaacttcacccgggcggctgaccgcctgcatgtgacccagccggcggtgtcccagcacatccgctatttggagaaggagtaccaggtcaagcttttcagctaccagggcaagaaactgaccttgaccgcggcgggagagaaactccgccaggccatgcggcagatgcagagcgatgagcgcctgcttaaagcggaaatcaagcaggctgacctgccgccggtccgctttggggtaaccatgaccattggggaatacgccttagccaggcccctcagccgctttttaaaagaccatccccaaaccaatgtggaagtagtctacggcaacacccagtttttgaccaagaaattggatgagggggacttggactttgccctggtagaaggggacccggccaggggttatgccagtctgcgctaccaaagcgaggacttcatcgccgtctgctcgccagatttgtcttttgccaaggagccggaccagatcgctgacctttttgaccagcgccttttggtcagggaaccgggctcagggaccaggaagatcctggaggacagcttaggcgccgaggggcaggaactgagcgacttcaagcagtatgtccaggtcggcaacatgcagatgatcacccagttgcttttggccaattgcggggtctctttcttgtaccagactgccgttagtgaccttttaaaggcaggaaagctgcggaagttgagtttgcgggacttccagatccgccatgacttcacctttatctgggagaagaacagcctctacgcggaccgccaccagcagatctgcgcggaactgaaggcaagcagataagaaaagacttttacttgttttgggtaaaagtcttttttgcatattctacttggttaattcgtaaatcgcttcagcgtagatggccatgcttttttccagttcagccaggctgacggattcgtcgatggcgtgggcggtgtccaggctgtccgggaaggcaggcccgtagccaaccccgtttttaaagaagcggccgtagttggccccagcggagataacggtcgcaccggcttggccagtctgcttttcgtagacggaaaggagggtcttgacgaaggggtcgtcgctagcaacgaagtggggcttttcaaagtcctggtagggctggaaggtcgtctggcagaaagcgccgaacttgtcgttcagctgctggcacattttttccgggctggttccccggctgtagcggatgtcgctcttgatacaggcttcggcttggtccctttggtagcggaagacggccgggcagttgatggacttgcccatctcggagtcagtattggcgatcccgattttttccccgtagtagtcttccagctcaaggtcaccggcaaagtccaggaaatttttagcccggccggtgaaaggaaagtcccgtaagaagctggccaggaggcaggccccgtttttcccttcccagggaacagaggcgtgggcgctgacgccttccaaactaatctttaagcaattaccattttcgctagctgtttctttgatttccccagtcaagccctttttggccaaaaagtccgggaaagctgccgtaattttctcaagattctcgccagagacgacggcggtcgcggcggcgggaatcatgttggtggcctggccggcaaagaaggactcaagggttaagccagtagcttccttgccaataaaatctgtcttcaaaaccgccagaccagcctggccagtcacgatcggaaaagaggagtcaggggagaagacccagtcaggagccgggcgtttttggaggtagtacttcatccccacccagtcggtttcttcgtcagtgccgataatcaaggaaatcttcttttttggctgaaaaccggcttcctttaaagccaggagggcgtagtaggcagccagggccggacccttgttgtcgcttgttccccggccgaagactctgccgtctttaacccagggggtaaagggatcctggctccagccctcatccggtgggacaacgtcgacgtggacggccacgcctaattcctggttgccttggccaaaagtaacgaccccggcatagttgtcgatgttttctgtttgaaagccatcccggtcagccagagccaggaatttctccaaggccttgaccgggccgggccccactggaaactcaggagtcgccaggtccatgttgcggacagagtcgatggcgatcaggtcttttaagtcagccaggagggctggcattttttcacgggcgaattcttggtagggaaaagtcatcttatgctccttagtagttaattacttgctgatgtaagcacccttgaagttgtaagcaaggcctgcgcctttgagggtgatgttcttaaccttcgggttgatcaaggtcgcggtgttgccgtagtaaagcggggtcacgccctgctgggtaaggaggatgcgttcagccttgaccagttctgcccagcgcttcttgcttgaagtcgtggtcttggaagtttccatggccttgttgtaggccgcgttttcccatgacccgtagttgttgacgttggtcttttggaacatttccaggaaggtgttcgggtcagcgtaatccccgctccagccgtccaagatgacgtcaaagtcaccggcttcttctctggcaaagcggttcttgaaaggcatgttggtgacttcgaccttcatgcccagggtgctttccagggcgctttggatgaattccgtggccttcttggcgtcatcagtgtcatcgcctaaaagcttgatggtgatctgctttttgcccagctccttcaaagccttcttgtagtaagccttagcctgggccttagtcccggactggatagccctggttcgcttggttacgacttccttgctgaattccttgccggtaaccgggtcagtgatcccgcttggggttaaagaagtagcggcgatgtcagccaggttcagggtcttggccagggattccttgttgatcgcggcggcgatagccccgcggaggttgacatttcgcaagttctcgtcagtcttgaagttgtacatgaggtactgggtccggttgctcttcttgatctgccagcccttttggtttttgagactcttgctttgggaagcggacagggtggtcatgtccagtttgccgacctggtagaggttgtaggaggtgctttgggacttttgcacgctgaagttgatcttggtcagcttgacattcttcttgtcccagtagtacttgttcttgaccagcttccaggtcaggttggacccggtccagcccttcatgacaaatggaccgtctgagagggtgtatttagcggccgtgccatattttttgccagctttttcaatgaacttctggttttgcggggcaaaggctgagccggctaaaaggagctggaagtaagggatctttctttccagggtcacgaccagcttgtacttgcccacggccttgatgcctaagctggggacaggctttttggaagcgacgatggcgtcagcgtttttgatgccagagtacttgttggactgggttgaggcggtcttagggttgacctgccggcgccaggcgtagacgaagtccttggccgtcaaggcttccccgttggaccacttggcattttttctaaggttaaaggtccaggtcattccgtccttgctttccttccaggacttggcgatgccgggcaggatcttggagttgttgcccaggcggaccaggccttccattgtggcgtccagctgctcgccgccgtagacgtcattgttcaaagctgggtccatggtggagatttctccggcggagaaccagtttaagacttgcttggtctttgagctgctggcagaggtgttggagcaggcggaaagcaggctggcggacagggctaaagtgatgatggctgattttttcatgatcttttcctcggtgttttctaaaaattgaatcgatctagaactaacttgttttcttttttaaaaagcagcgaggggatgtcggccacttaaggcagacggggtgtttttgaacatgtttgactcttccatggcggactcctttacaaaatcatttttaaagctggcagaaaaagaaagattaaaaaagaaagagcaagaaacggagagaaagaaaaaatcgcccccaaggaattgcttccttgaagacgattgttagtcgtggtcccacttcatttcatcagctgtctcacggcaactgaccttacactgccgctgactagtcgccggaaagggcaaagaaggccagtttccaggaacacccagggcagccgtggtaacgctcgctagcgggaaggcctactttatttcggccaaccagttcttagatatgtttcgccaggcggcttttgctcaatcgcaccaacttgagctctctggaaaaagccggacctggttactcttctaatcgatacttttcttaaaatgctttaatttttaattaatgtaatcttaaagcgtaaatgggcttctgtcaagcggctttttgaaaaaactttttcttttttgctttttctatttacctagccggataatccttgagtttggcgttcagcttggagtagatccggtcgacaaaccagggctcggttgacttttccagggcttcatccaagccaaaccaggcaacagccttgttttcgtcttctttaggccggataggcaagctgtcgtctgcttccaagaggtaggtgacgtttaagtgcaagtgcgacgggacgtatttgccttttttctcatgcccgtccacggtcaaaatctcaacagaatagatctggtccgtgactggagttgctttaaccccgctttcttccgcgacttcttttaaggccacatgcaaaaggtcctggtcgccgtccgcgtgcccgcccagccaggcccaggagtcgtagatccggtggtaggccatcagggctttgtcccgggccggattgactacccaggctgaagccgtaaagtgctcggccaaattggaccgcaagaacagttcttccccggtctccagccggtagatcatctctttgacgtcggctgcttcttgctcgttaaagggttggtaattttttaaatcagtcagtaaagtcattcttctcttctctctattttttctgtttcctcagattttaccacgggcggtgattgtctgttaaaatgtagagtgttaagtactgaattattgcaggtaaggaaaacttcttaaagaaagcaggaaaatatcgtgaagcttttcaacactttaactaggcagaaagaagaattcaaacccctggttcccggccaggtcagcatgtacgtctgcggaccgacggtctacaactacatccacatcggcaacgccagaagcgccatcgcttttgacaccatccgccgctactttgaatacaagggctacaaggttaactacgtttccaactttactgacgtcgatgataagatgatcaacgaagctagagccgaaggcacgaccgtgccggaattagccgaacgctacattcaggccttcctggaagacacccgggccttaaacatcgaagaagcgactctgcacccgcgggcaacccacgaaatcccggccatcatcgacttcatccaaaccttgatcgacaagggctacgcttatgaaaccgacggggacgtctactaccgggctaaaaagttcgctgactacgggcacttgagcgaccaaaacatcgaccagctggaagaaggggcctcccagcacgtaaacgatgaagaacaaggccgcaaggaagacccgatcgactttgccctctggaaggggcagaaggttgcagacgaaatcgcctgggactccccatggggcaagggccggccgggctggcacattgaatgctcagtcatgtccaccaagtacttaggtgacaccctggatatccacgggggcgggcaggacctggaattcccccaccacgaaaatgaaatcgcccaaagtgaagccaagacgggcaagaagttcgtcaactactggctgcacaacggcttcgtgaccgtgggcaaggatgaggaaaaaatgtccaagtccctgcacaatttcgtgaccgtccatgatattttaaagactgttgatccccaggttctccgcttcttcatggccagcgtccagtacagaagccagatcgactactcggaagaaaacctggagcaggccgctaacattctgggccgcttcaagaacaccctggaagggatcaactaccgcctggctgacgcgactgaaggcttgccggacccggacctggccaagctggtcactgaaaccaaggcaaagtttgaagccgccatggacgatgacttcaacgtgcaaaatgccttgaccgccatctacgaagccctgccagccgtcaactccaacgccaacgctgaaaaagccgacaaggaaagtctgcggctttttgctaaaaaattagctgcctggctcagcgtctttggcctggatgttgacaagctcctggctaaggaagccggcgatgatgacgctgtaatcgaagaattggttgcccagcggacggaagccagaaagaacaaggactgggccaagagtgacgaactccgcgaccagcttaaggaaatgggggtagtcctcaaggataccccgcaaggaaccaggtggagccgtgaataaagcacagaagttaactgaaaaaaagattgatcccaacaccttgagcgggcagacgctggcctacttgggcgatgggatctatgaagccgccatccgccggcacttgatcaagggcgggatgttgaagccgcagaacttgcaaagagcagcaacccactatgtctcagccaaggcccaggcgggcctgattgctaaaatgctggacaccggctttttgactgaagaagaagaaacagcctaccggcggggcagaaatgccaagacccataccaaggccaagaacaccagcctggccacgtatgaaatgtcaactggctttgaagcagtctttggctacctggacctggccggtgaagaaggcagggtcaaggaattgattgcctggtgcattgatgaggtggaaagtgaagggacaagggaatatgtcttcaactaacaatgattttgtcttcggccgtcatgccggaatcgactttttgaaaacccaggacagcgaaaagatcaacaaggtcttcctggctgaaggggttcaggaggactttgccagagaagtctaccgctatgccaaaaagaagcatttgatcatccagcgggtgccgaaaaacaagctggacaagctgactggcggggaaaaccaccagggcctggttttggctgtcgcttcttttgaatacgccgactttgaccagctcttggataaactggaccaagaagaggccccccttttgctcatgctggacaatattgaagacccccacaacctgggctccatcctccgcagcgccgacgcgaccggggtcggcggggtgatcatccctaagcgccgggccagcggcctgaccagcgtggtggcgaagacctcaaccggggccattgaccacgtgccagttgcccgggtgaacaacctggttcaaacctgccaggccttgaaggaccggggttactggatcttcgggacggccatggaaggcgatgactaccggaagtggaatgccaatggcaagaccgttttagttatcggtaatgaaggcaaggggatctccccgcttcttcttaagcaaatggaccagactttgaccatcccgatgattggccacgtccaatccctgaatgcttcagtagcaaccggggtcttgctctaccaggcctttaacagccgccaccctttgtaaagcaaatcgtttacagttcaagaaaagtgattgaatcaaacaatggttcgattctgtcaaggtaaaaagtcctttattctgtgggcaaacagaatgaaagggctttttataatgggattgacaaaggaaagagagcgcctgctgatcagccggattcaaaaagatgacgatgagcaggcccttaaagaactgtattacagctgcctgcctgtgatcggcggcaccatcaagcagtattttgtggagctatatgacaaccaggactgggagcaggaggccttgatcctctgctataagaccgccaagcgctttgacttaaagcaaggaaagccttttgtcggcttttataaggtcagcctgcacaatcgggccatcaacttgatcagacggggcaagcggaaaaagcgcctggctgccagtgaccaggtctattgggaagatgtggctcccgaacttgagcaggcttcctgcttgatcgcgagtccgccggcgcctgttttggactggcaggatttggttgagtccttgagcatgctggaattggaagaattgcttttggaactgggctataagcaggccggggagatcaagcgccagtaccaggtcaatgagatggggctcagacgggccaaataccgggtgaaggaaaaaatcaagctaaaattgcggataggtgcgtaaacattttagccaaatgggactataatatagttgtaggatgaaaaaattatttaggaggtaatcaaaaatgtcagaaattgttaagacagcttttctggatcgttcaatgaaagaagtttttgattggagtgactcagacacccctgtaagagatgccctttgggactacttcatggagtcaaacggccacaacaccgacaagactgaggaagccatgcttccattcatgagcgactctgacgacaagatcatcgcatttgtcaacgaaaaccttaagaaataatcttttccctacattcctgacctcttgtctcccataagggaggggaaggggcgaaaaacggcggctcgcttgagccgccgtttttttctgttaaaataataatctggctataaatctgacaaggagaaatttggaaatttggaagagaaacaagaaaaaacggagaaacagaaaaagcaaaagaaacaaaagaataagatggccaagaagcaaaaagggctgctggctctggcggtgattttagccgccttgctgcttgcctttggtctgtattttggcaattactatcatgctgacaagacggcccagcaggcgatgaagagcagtcggacagtcaaggtcaagcagacagctgagggatacctgtttgatgggcctgcaaagaagaatgccattattttttacccgggagcgaaagtggaaactaccgcctacgcgcccctcttaaagcagatcgccagccaggaggcggatgttttcttagtcgccatgcccctgcacatggccttcttcggcctcaacaaggcagacaagattcgggccagctaccactaccaaaactggtacatgtcgggccactcgctgggggcggccatggcggctatgtatagcgcggaccacttgaaagactaccggggcttgatcatgctggccggctacccaaccaaggacctgcacgcggctaatttttccgtgctcagcatctatgggtcaaaagacgggaacgcgaagatgctgcaaaagaatccccagtacctgccaaatgactacactaagcaagtcatcaagggcggcaaccatgcccagtttggcaattacggcctgcaaaaaggggacgggcaggccactatttccagaaaggcccagcagcaggcaaccgcccaggcggttcggcaatatttacttgctcatgacaagtaatgagttaaatagtaaaaaagagaataaaaagaaatatgatagtacagaaaaagctggtcatcttgcgtgatcagctttttacttatatctgcttcttagttaaataattgcttgacgctggcaacgatttgctcagccgtcaattggttgcggaccaggatctggtcatagctttggtcaacgtcggtgtattcccgcttttcgccaaaagtcttgaccaaaaccggccggtcagccaggtagccggccaccttttgcccgaagcccccgtccagaatattgttttccaaagtaattacagcctggtagtgccgggctaagtggtccaggcagtcagtatccaggatgttagctgacaaaggattgtagagggcagcattaagttcttctgccacttggctgcctaattcctgcatgtctcctaaagccaggatggcgatcttcttgccggcccgccgcttttggtagtggatgtgccggtagccttcaagcacagccccgccggctggaactggccggactggcagcttgatagctacagggccgtctttttgcttcaaggcccagttgatcatggccgcttcttcagtcaagctggtcggggccaggtacttccagttaggcagattgctgaccatgacctggtcaaagacgcccacgtgggtcttggagttggcctggatcccgccgccagccacgatcatgacgactggcaaattgttagccgccacgtcatggctgagctggtcgaaggcccgctgcaggaaggtggagttttcaaaaaggactggctggccgcccgccttggcaaagcccgccgcgaaggccacggaatcctgctcggcgatcccgacgtccaggtagtggtccgggtaagattctttaaaggagtcaaggccaaagacgccagggatagcggcagtgatcgccatgatgttttcctggcccccgtcaatagcgctagccacggtcttaatggcaatttccgctggggtcgagcccgcagtaatgttctttggcgaatcatcgcttaagttgaaggggcggacccagtggtgcttttcttcatcctcaatagctggctgataacccttgccctttaaggtattgacgtgcaaaaccagggggtggtcgacatcgcggatttcgctgaaggcattaatcatgctttccaggtcattgccatcagcgacatagcggtaatcaaagccaaaggccttaaaaggattttccggatcctgcccctggctgtctctcagcttcttcagggccgtggtcaagccgccgacattttggtcaatggaccactggttgtcattgatgacgatgaccaggttgcccttttccagcgcggcgttatttaagccttcataggccatcccgccggttaaggagccgtcgccgatgacggccatgatccgctcgctgccgcctaagaggtcccgggccttggccatgccggtggctaaagagatagaggtagaagtgtggccaaccgcgtagtagtcatagggactttcatcgggattagtgtaaggagtcaccttgccgtaggcttccgggtccagccaggcataagcccggcctgtcagcatcttgtgggggtaggtctggtgggagacgtcccagatgattttgtcgccgggggcgtcaaagacgtagtggtaggcgatggtcagttccacgatccccaggtcaggacctaggtggccgccaaccgccgcgtctttctcgatgatcaagtggcggatttctgaagccagctgcttcatttcttccagatccaggaccttaaggtcagctggtgacttgatcttgttgagcaggtattcagggtgttgattcatttcttttcctcatggccggctaaccggcaatcttgtaaactgtgtttttgctagttctattatgacacaggggccgcttaagatgtgaaaataaagcccggcaaagtcagtcatataatagttgcttttagggcggatttttgctaaaatcaaatgaagtttgaaggtgaatattatggcagtaaagaaagcagctttggcctgcagcgtttgcgggtcacggaactactcaatcactgcaaacagcaaccgcaccaagcgcttggagctgaacaagttctgcaagcactgcggcaagaagactttgcacaaggaaacgaggtagacagggatgattaagttttttaagagcgttggtcaggaaatgaaactgagtcattggccaagtgctaaggaaaaccggcgcgacacggcaaacgtggtcgtaacttctctgctttacgcgattttcttgggcgctttggattgggcctttgcaaaattgattcaattagttctgtaagagcgacaaagtatgttataatcatgctagtttcaaggaaaacctctttagcgaggtttttttgtttgccaaaaaggagattaaagaaattatggtagaatccgccaagaagcaatggtacgtcctgcacacttactctggttttgaggacaaggttagatccgacttgctgtcccgggcccagtcactggggatgcaggactacatcttccgggttgtcgttccgcaagaaccaaagatcgaagacgtgcgcggcaagaaggaagaagttaacgaaaaggtcttccctggttacgttttggttgaaatggtcatgactgacgaaagctggtttgttgtccggaacactcctaacgttactggtttcgttggcagccacggcggtggttccaagccttccccgctttacgaggaagaagtcagagctatcctgcagatgcaagaaggcgaagcaactgaaaaggttgactacgactacgaagttggcgaaagcgtcatgattaccgcaggtgccttcaacggcatggtcggcaagatcgctgaaatccaggacgacaagcaaaagctcttcttgaccatcgacatgtttggccacgctaccacggctgaactgggctttgaccaagtcaagaagatggaagactagtaatttaagtgcaaatcagcattttgttgatttgcacttttttgttcctataattcgtgaattgctagtaacttatgtatttctaggtgtctccttgtaaaatctttaaaactataattcttagcctaactattgacatgcctctgtaaaaaaaatattatataatcgaattctttttttacaaatagaataggtggtttgtctaatgaaaagaagaacattatttgcgttgcctgttgttttgatggccttgatgcttacagcctgtggtggttcaagcagcaaagtatacacgaccaaggttactagcattaaagtaatgcccgatagtgatgaatggaaaataactggtacaaccgatgcaccagatggttctaagattgctgtaaccgggctctcccacaatccggacgatccgcttgatatggagaattccagtgagggcatcgatggagaagatggtacagggaatgattcatggccgaaggtaaagaacggaaagtttaccgcacttgtggatgcaattgagttagttagtgatccagataattacactaaggtaggctatacgcagaaggcagcggtagtggctataagcaactactccaagagtttgcaggatggacttaccaataaagcagcagaagccattaacaaagcgaacccaaagatggttaaatttaccttgagctccagccaggtaaagtatattgattccttacctgttgacgattcaagtgataagtcgtcaagctcaagttctagttcatcttcatcaagcaaagctaaaaactatcgtacagatgtaagctatgactcattagctagagaccctaagacatacaagggtgagtacttgcaatacactggtgaagttatgcaagtcttagaagatgattcttacactgatttgcgtattgccgtaaatggcaactatgatgatgttttgtatgtagaactcgataatagcgtcttacatggcaagcgaatcttggaagatgaccttgtcacggttaaaggcgtaagtgcaggtattatcagctacaaagcaacgtcaggcacaaagatcagtatc

SEQ ID NO: 2338 - DNA, 1097 bp, Unknown
  gut microbiota DNA sequence
gtttgatacgtgcatccgaagttctaaactgccagtttaccaaagcatagctattattccgctcactttcccaagcgatcaattcttcgcgtagtgtctcaatattcgggattcttcgagaaagacactgtctggtcatcacatttagctcaatttcagcgatatctaaccagctgccgtgcttgggagtatagtgaatctcaagcttcttgatgattcgacgtgcttgaaagccttatatagtgaggatggcttgtgcgtattaagattgtccatgacaagaatgatcttctcggcttcagggtacatctcatcaaccatatatttgatttcttcagcccagtcaactgcagttcggtgttctctgacgcttgtgtgatgacgacctcctagcggttctacgaaggcaaagatactgcatgtacctttacgaacgtattctgaatcgactttcttattgtcacccggacgcatagcccatgagtctctggcttcgcctaacaactgatatggcttttcatccatgcaaactaccggcacttttggattgtaaggaagctcataaacatccagaacatcttccatgcaggctatgaattctgggtcttctttctttgggaggcaccagtagtcgctgcggtgaggtcgaagttggttttttttagagttctacggatggcttcgcgactgattggctcatcaagaattatcttcatttgtgcttcaagaagacgcaaagtccaacggctatgccccttgggaacaggtccacaggccacttcgagtagtttcgcttctacacgtccatcaactttgcgttgtgcgttatcagaattaacactgcgcttaagcttgatggtggcgtcaaggctttcattgacgaactttttcacgacattggtgatagttggctcactgatttcatgatctgaagcgcactgcttgtaggtcttaactggcgggtgattggcatccatgtctttaagaatgcgaattctgttggccaccgtttcactcgtgtttttctggcgaagaattttgttaagtcgcttaagttcgtcatcggtcaatttgacaatgtattttttagaagtagg

SEQ ID NO: 2339 - DNA, 6579 bp, Unknown
  gut microbiota DNA sequence
gacactaaggtaggctatacgcagaaggcagcggtagtggctataagcaactactccaatagttcgctggatggacttaccagtaaagcagcaaaagccattaacaaagcgaacccaaagatggttaaatttaccttgagctccagccaggtaaagtatattgattccttggatgatgacgattcaagtgataagtcgtcaagctcaagttctagttcatcttcatcaagcaaagctaaaaactatcgtacagatgtaagctatgactcattagctagagaccctaagacatacaagggtgagtacttgcaatacactggtgaagttatgcaagtcttagaagatgattcttacactgatttgcgtattgccgtaaatggcaactatgatgatgttttgtatgtagaactcgataacagcatcttacatggcaagcgaatcttggaagatgaccttgtcacggttaaaggcgtaagtgcaggtattatcagctacaaagcaacgtcaggcacaaagatcagtatccctggtttggcagctactgaaattacggatagtggtaccgcgccggacgactacggagaataaagtcaagaaaatggaagactaaacataaaaaagtcttgcattctgccggttttcagagtactatattaaacgtactttattactgtgggaggagagtgtggaaactctccattttaaccgcatcacggaatcaaggaggttttgaccgtggcaaagaaagttattaacgttgttaagttacaaattccagctggcgctgcaacccctgcacctccagtaggtcctgctttgggtcaagcaggtatcaacattgttggctttactaaggacttcaatgctcgtactgctgaccaaaagggcatgatcatccctgtagtcatcactgtttacgaagaccgttcattcgacttcgtaactaagactcctccagcaccagtcttgttgaagcaagctgctggcattcaaaaggcttcaggcgaacctaacaagaacaaggttggttcagtaaccactgctcaagttaaggaaatcgctgaaactaagatgaaggaccttaacgctgcctcaatcgaagctgctatgcgcatggttgaaggtactgctagaagtatgggtatcgaagtgaaggactaatttgttaatttttaccaattaacaagtcaggtgggagagcaaagggaaagctcgtttgaccacacatacaaggaggatttttcatgccaaagcatggtaagaaatacgtagaagctgccaagaaggttgacagcaacaagttgtactcagtagaagacgctatcaagctggttaaggaaacttcatacgctaactttgacgcttccgtagaagtatcttacaacttgagcgttgaccctaagcaagctgaccaacaaatccgtggctcaatcgttttgccaaacggtactggtaagtctgttaaggttatcgtatttgctgaaggcccacaagctgaagcagccaaggctgccggtgctgacgaagtcggcgcagacgacctggtagaaaaggttcaaaacggttacctggacttcgacgttgtcatcgctactccaatgatgatggctaaggttggtcgtttgggtcgtgtgcttgggcctaagggcctgatgccaaaccctaagactggtactgttactatggacactgccaaggctgttcaaaacgttaaggctggtcaagtagaatatcgtgtcgaccgtcaagcttcaatccacgctgctatcggcaaggtttcattcactgaagaacaattgactgaaaacttccgtgctttgcaaaacgctatcctgcgtgcaaagccagcttcagctaagggtcaatacatcaagagctgcgcagttgccgcaacctttggccctgggatcaagttggacccaatcgctttgatggcctaattttccctaagttaagcaaattaagctcctcgccttttggcggggagtttttctttgccctaattttaccttaagagatttttagtcttggaaaaggctttcttttaaaaaatcttgttatactagtagagacaaatagagaactgaaagaagtgtatcaaggtggaaaaattactaactctcatcgttccctgctataactcagctgaatacttgaaccgctgcgtcgactcccttttgcccggcggtgaccgggtgcaaatcatcttggttgacgacgggtcaactgatgaaaccggccggatgctggatgactaccaagctaagaatttaaacttggacctggaagttgtccaccaggaaaatgccggccacggcggggccatcaacaatggcctgagactggccaagggcaagtacgtcaagatcgtcgacagcgacgactggctggaccaggaggcctacaaagaggtgctggattacctggaaagtaatccagaggtcgacctctttttggccaactatgtttatgacaagccagctgccggccgccagcgggtgatcaagttcccgcatctgccggtcgggcggaccttctcctgggatgaggtcaagctgcggatgggccagtacttcatgctccactccgttatctacaaccggaaagtcctggaccgggccaaggtagccctgccaaccaaggtgtcttatgacgacaatatccttgtctttgagccgatggtgcaggtacagaccatgcgctacctgccggtcaacctctaccactactttatcggcagagatgaccagtcagtcaacgaaaaggtgatgctgaaaaagatcgaccagcagatcctgatcaacaagcagctgatcgtcttctacgcctcccaggtcaacaagcgggcgccttacgccaaatacatgaaatacttcttagaagccgttacaggcgtgactagcgtcatcttgatccggggcaagaagaaggagtatattgccaaaaaggacgagctctggcagttcctgaagacttatgacctggagacctacaagtcctttaaacgccgcctggtgggccattttgtctcccgggacgtcctgcctatgcggcagatggtcagcggggcctacttgatcctgcagcggttgtattcgtttaattagggcaggggaaaaaagatacaatattcgacaaaaaagctttggcaagaaggccaaagctttttgatttgatgaataggatgttgagaaaaaatgctgctacttgccgaagatggcctggcttgcgctgatctggcagtcggcgaattcgccgtgctcgctgaggtccaggccgacttcttcatcacgggcggaaacccgcatgttgacgaagcgcttcaagactgctgtaattaagctgaccatcaagagagtaaagacaatggtgaagagggtgccggctgcctgcttgcctaagagttcccagctgcctccgtagaaaaggccgctagtggaaatccccgggtcaactttttgactggcaaagaggccgacggttaaagcgccaacaataccggaaatgccatggcagccaaaggcatccagggggtcgtcaaagctaagccgtcctttaacctggctgataaagaagtagctggccagactgcagaggataccggtgaagagggctccagcgcaggtttcatagccagcccctggcgtgatgccaactaagccgcagagggtaccggtgcagatcccgtctaggctggctttgccgctaaaggcttcttccagcaaaagccaggtcatcatagaggccgctgccgcaaccgtactggtcaagcaggccgtcaaggccgtttggttcatgccgaaggcactgccggcgttaaagccgtaccagcctagccagaggattgctgtccctaagaggacccagggcaggctgtagggccgggtctgcttttggtagcggggccctaagaagatggataagaccagggctgtgatcccggcgttgatgtgaacgaccgtgccgccggcaaagtccagaatcccccagccggctaagagtccgccagtcccccagaccatgtggaccagggggtagtagaccaacactgaccagaagaagacgaagaccaatagaaagttgaaccgcatccggcccaccgtggccccaacgaagagggcaggggtgatgatggcaaacatcatttcaaaaagcaggtagctggcggcggtaattccctgctcttttaaaacgaccttagtcaagtcactgccggagaggaagatgtgctggactctgccaaaaattccagctacattgccgttgaagcaaagttcatagccaaaggccacgaataagacgatggctaaagagcagatgataaaaaccgagatcatggtgttgaccacgtttttcttcgagaccaaccccccgtagaaaaaggccaggcccggggtcatcatcaagaccaggatggcggcgataattaagaagacggtgttggctgtgttcatccttatttcccttctgcttcttctctataccaattatttgctcagatttatgttcttagttataccatgccggtgaattttgtaaaactctagaccaatttagaaagagaagaaattgcctggaaaagttgggaaaaaagggcaaaaaagggcctgctttttcaaaaagcaggctgcaagcgtttgctaaattattttattaaaaaatgctaaaaaagagatttaatttttgtcatcaaaaccggtctcgtcccggcgcttgacatggaagttcttgtcgttggcctgctcgggcacgacgaaagagcagagcaggaagaggacgaagccgccccagcccagaccgtggatgcccagcttgtagccggtcaaggtcaagatgacgcccaagaggagcaggcaccaggcgatccaggagaggatctgccagttcttgctcagcttcttgttttcagattcgatgtccaggaagccgcggacaatgaagtaggcgctgatgatgaggaataagacgtccatggcgatgctagcggcggaatggtccttgaacatgctgaagacggccagggtgccggaaatgccggctaagaagaagtagaaaatgtcgatcagtttactcttcaaaattgcacctcctaaaagtcattacagtaaattttagcagatttttgcaaaaagtggcgaaaaaggtttgacagatcttgtttcagatggtaatctaggtaaagtaaatttctaacctaagacgtgggtggcgtaaagcctcaatacaatcccaccgaggccagaagataatgaagattattaaactctccatgtctttcttggcatggagttttttaggccttgtagaattttacaaaattttatggaggtgaataattttgagtcaagctactatcgctgctaaggctaaattcgttgaggaatttgcagaagaacttaagtcagctaagtccatcgtagttatcaactaccttggcttgactgttgaccaagttactgcgttccgtgcagaattgcgtgaaagcaacgccaagatgaaggttgtcaagaacacttaccttcgccgcgctgctgctcaagccggcttggaagatttggcaccagtattcgttggcccatcagctgtgatctacactgatgatgaagacaatgttactgcacctgcccggatcgctgctgactacgctaagaagttcgacgttgttgaaattaagggtggtgcacttgaaggtcaagttgctaccaaggaacaagtcgaagaactggctgcaattccaggtcgcgaaggtctgctttcaatgcttctttctgtattgcaagcacctgtacgcaactttgcatacgttgttaaggctgtcgctgaatcaaaggaagaatcagctgaatagtctggtcattttaaactagatattaaattccatattttcggaggatattacaatggctttggatactgctaacatcattgaacaattgaagggtgcttcaattcttgaattgaacgaccttgtacacgctatcgaagaagaattcggcgttactgctgctgctcctgtagctgctgctggtgccgctggtggtgctgaagaagctaagtcaagcttcgacgttgaattgacttcagcaggtactgaaaaggttaaggttatcaagatcgttaaggaagttactggcgcaagcttgctggacgctaagaagactgttgacggtgctccagttgttcttaaggaaggcttgtcagaagacgaagctaacgaacttaaggctaagcttgaagaagttggcgcaactgttacccttaaataattacggccttcgggcattaattattaacgaagaacgcgtttgtggacatccacaggcgcgttttttgtttggcttttttaactttttgcccaaaaagaggcctttaggcctctaacgcaaaatttttctacaggcgtctgtaaaagcctgggtcaagtccggggatgcctctccttgaacagaaacagtgaaagaaatggtcatggctgccactgtctggttaaggcaggttacagtcataatggccactagctttctttagcctgggtgatggcgttttgcagggactgggtgaagccctcgtaagtgacgg

SEQ ID NO: 2340 - DNA, 209 bp, Unknown
  gut microbiota DNA sequence
aggctgtatggctcatgtaagacggaaattccatgattccttgcctaaagacaaggccagagaatccgacgcaacttcggtggctaatcaagggatccactactataatcaaatgtttagcctggagcgcgcctgggaagacctttccgctgaagagagatacgagaagcgtcagtccgaattaaagcctctgctagagaagttttccg

SEQ ID NO: 2341 - DNA, 209 bp, Unknown
  gut microbiota DNA sequence
gagctgtcaacccagatcagctgagccttttcgaagaagacaacgcctcccaagatgacgaggacttgccctcgcattaccgaaactattacctataagagacgcaagcaagtcggcagaaagcaagatatcttagactctctgccgggcgaggaggttcatcatcgtttggatgatcttacttgtccagactgccagcacgaactgaa

SEQ ID NO: 2342 - DNA, 8760 bp, Unknown
  gut microbiota DNA sequence
ctttccaaaaatttcttaccgatgctggtggttcagcttcttggccaggaagtcgccaaccacttgcacgataaagatcatgatgacgaccaggacagtggccaggaaggtcacgtcgttagcgaagtcgcggtagccgtactggatggcggtcgtacccagaccaccggccccaacggccccggccatggcagtcaagccgatcaaactgatgatggaaacagttgacacccggatgatttctgaccgcgtttccttgaggtagacgtcaaaaataatgtcccagttgcttgcgcccaagctctgggctgcttcaaccttgcccggatccaagctttccaaagcgacctggacctggcgggcataaaatgggaagatccctaaagtcagcgggaccaaggcagccgtgtccccgatttccgtcccgacaatcaagcgggtcaaaggtgaaatgaaggccaaaaggataatgaaaggaatagcccgcaaaatggaaatcagcttgtcgcagaagttgaaccagaacttgttttccaagatcccgcctggctcggtcaaaaccaggatgaccccgaagaagaggcccaggaccccgccgaagattgacggccagaaggtcatgtagatgatctgcagaatggaggtgccccacccggtgtccccggtccagcccaagttgtaaatattcgggaagttctgcgcgatccagtgtaccaaaccattaatcataagcggttacctctttcgtctaattccgttaccgtgacaccctcatcgtttaagaacttcaaggttgccttttgcttgtcagcatcccccttgaccatgaccagcagggtcccgaccggttcgtcagccaggacttccacattgccgtagagcatcgaagcttccacgccgacttcccggtaaagctcgatgatgattgacttggccacattgttcaagctgtagaccagctggtagagggcttcgttttcagccaggctgatgttgaggctcttcaaggtgtcaactacagccaaagaaccgccgacgaacttctgggtcaattcagcctttggagccaggaagacatcccgcaagttgccgttttcgacaacccggccgttttccatgaccgccaccttattggcgatcttcttgaccgcggccatttcgtgggtgatcaaaacgatggtcaagcccagttcccggttcagtttcttcaacaggtccaggatctggatagtcgtctgcggatccagggcactggttgcttcgtctgacaaaaggatttccggatcgttagccagagcccgggcgatcgccacccgctgctgctggccgccggagagctgggccgggtaggcattggccttgtcttccaggtcaaccagcttcagaagcttgtggcatttttcttccagctcatcgtcagacaggtctgagtgcttgagggcaaaggcgatattttcaataacggtcgtttcattaagcaggttgaactgctggaaaatcatcccgatcttccggcggcgggcctgcaggtccttgccgctgatcacctgtttgccgtctttgacaaagtcaacacccccaaccacgacgtctccggccgttggcttttgcaaaaggttgatggttctgaccagggttgatttcccggccccggaaaagccgacgatcccgtagatgtcgcctttttcgatgtgcaaagtcacatcctgcacggcctgcacatcggcagcctttttccgcttaaaagtcacactgacgtggtccagttgaataatgctcatatgatcaaagcttctttctaggttaagttaaaaatcttagaacttggcgtcccaagccgcaacttgcttgatgccgtagtacttcttgtacagctgcttggtcttttcagtctggtaagccttaacgacttccttgtaagccttcttgttcttgtccttcttgcgggcaacgatgatgttgatccattggtatgagtccttgttgattggttcaacgtagatggtttgcttgtcgcccaggccggctgggttagcgtagtcgttgttgacaacagcagcgtcaactgacttcagaactctggcagcttgttcagtcgcaacttccttgatcttgaagttcttcgggttactcttgatgtcagcaactgagtacagcttggtagcgctggtccccttcagggtgatcaggccagcgttcttcagaaccagaagcgcccgggcttcgttggtcgcgtcgtttggaatggcaatcgttgcccccttaggcagggacttcagtgacttgtacttcagtgagtaaaggcggattggagcgatgtaggtcttgccgatggcaaccaggttgctcttgttggccttattccagttgttgaggaagttgtagtgctggaaggcgttaaggtccaggtcccctgacttcaaggcgctgtttggctggttgtagtcagagaagttcttggtcttgacaatgataccatacttcttcttggcagttgccgccacactcttccagatggcccgttcagccttggttgccccgacagtcccgacggttaccgtcaccgtcttggcgctttgctggctgcccttcttgccaaaggagaagaaggcgataacggcaaggaccacaacggccacgacagcgataataatgtttctttgtttcttttttctcatgattaatacctccagaaacacagcagcaatcccgaaaagcggcagtcaaattcgaacagaaaagaaaaagcgtccgtccttgataaaggacgagcgctcgtgataccacctttagttcattcattacttgcgtaataaatctcaccagctgtctctgacaaatagaaacagcttgcttgtttaacgagagcaaccccggcagcggctaaatatcaccgcggcatatcattccaagcccatgttcaccggaactctcctggcggctttcaccatctgccgcctctctgtaaaggatcgtcacccgactactctgcttttcgagataacttttcttaacttgacgctctaaatttatcattattttttaagcaagtcaagcccttttctaaaaaaaactgttaaagctcgtcccggtccttgccataagcggctaaaaggtcccgcagcttggcgtctttccccttctccgtcagcacgttgctgacttctttgattccgtcgcagatccgcgacatgattctgaacagggtcatgccggcaaagaaaaggacgacaaccgtgaagacagcccggcctgacaaaggactcagcttgaagaagccagggatgaagatgattgacaagatgatgcagaccaccgacagggccaaaacgcccagcttgtacttgttaagtggccgggagatccagaagaggaccatcaagcccaccaggaccaggagagctgttgacgcggtagcgacttcattgtccccgatattggtaaacttgttggtcaagaccaggatgctgacggccagccagtcggtaatcccgcctggaatcgacttggtcaggatattgaccgtgaaattgccccggatccgggaatggttcttttccagggccagaaggaaggacggcaggccgatcgtaaagctggagatcaaggtgatctgggccggcttgatcgggtagttgatcgtcaagatcaaggaaaagaccgccatcagcaaggagaagatgtttttgactaaaaagaggccagctgagcgttcaatattgttgaccacctgccggccttcattgaccacctggggcattttggcaaagtttgagtccagcaagaccacttgggaagcctgaacagccgcgctgttgcctgaagccatggcaatgctgcaatcagcttccttcatggccaggatgtcgttaaccccgtccccggtcatggccacggtcttcccgatcttctgcagggcctggacgaattctttcttctgctccggcttaacccggccaaagacattgtattcagccatggcctgctcatattcgcctggcttgatcgtctgggcatcgatgtacttctctgccccggcaatcccggcctggccggccacccgggaaacggtgaccgggttgtccccggaaataaccttgatttccaccccttgcttggcaaagtatgcaaaagtctccttggcctctttccggatcggattggacaaaaggacgtagcccaggacttcgacctcctgggtcaggcgctctttttcatctgccagttctgctggatacttggcaaaggccaggacccggtagccttcttccgggtagcgggcaaattcttcctggcaggctttcagctgcgagcgaaggatcatttccggcgcccccagcaaaagggtgtagcctgcaaaaaccgccccgctgtacttgttgactgaggtaaaaggaataatccttttggcattgaccaggggctggtcctggccaaacttctggttcaaggcttcagcggtgatattgtcgacaggcatgttggaaacgtaggcggcaagccggtcttccaaatcatttcccgggtaattttttgccgggacgactttttccaccgccatcttcggctcagtaatcgtccctgtcttatcaacgcagaggacattgacccgggccagggtttccacgctcttcatgtcgtgcagcatgacctggttgcgggccaggcgcatggcggccagggctaaggcaaccgttgtcagcaggtagagcccttccgggatcatgccgataatggctgcttccatggaactgatggattcagcaaaagacaggtggttgaggaagtaggcctgggcaaaaagggctagccccattggaataatgatgatgccaacccacttgatcaagcggttgatggcccggatcatctttgactcttctcccccgcccatggccttggcttccgccgtcaattttgcgatgtaggattcgctgcccaccttgaccagctgggccatgacttcgccggaaacgacgaaagaaccggataagagctcgtcaccaacttccttggcaatttcatcgctttccccggttaaaagggattcatttacccggacgctgccgtcgatcaccttggcgtcggccgggatctggtcaccagctttcaagaggactaggtctccttcaaccagctggtcgattggcacctgccgcctttttccgcctctcagggctaaaagcttggtctggtttaagacctgcagcttgcttaaaacagattttgcccggatttcctggacgatccccacgatcgtgttcaaaatgatcaccggcaaaaaggtcagatcccggatatccccggcaatcaaaagcaggatggtcaaaactaggaagatcaagttgaaataggtaaaggtgttttcaacgatgatctgccggttggtcttgaactcatcatcaatggtggtgttgaccttgccggccgcgcttttctgcgcaacctcctcctcggtcaagcccgtctccaaatttgttttcataacactcacatctcacttttcactgcttgcctgctattttttacgcaggtaagtctcaaagacatagtcatacttattcttgccgtctgcctggtgggcttcactctttaccagggcaaaagccgcccagtcaaggtttggcatgtaggtgtcagcgggaaaaattcccttgatccgggtcacttccagcttgtcaacctggtcagccagcagggcaaagaggctggagccgccaataacgcagacttcccccgcctgctccttcagccaggcggaaacttctttttcgcttttcagctgcagaaccccagctggcaggtctaatttcctggtggaaaggatgacatgctgccggccaggcaacaggcccggcaaggactcaaaagtctttcttcccatcagcatggggtggcccatggtttttgccttaaaatgggctaaatctgccggcaggtgccagggcaggcggccctggtagccaatggcgcctttttcatcttctgcccaaacgtagctaagcatttcttcaccctttctaaacggcgaccggggccttgattgtagacccgtgctggtagttgaccaatttaatatcagccatttcaaaatcagccacttttttcttctctggattcagccacaaagttggcgcgtcaaacggctttcttttcagctgctcttccacttgggcaaagtggttcttgtaaatgtgggcatccccaatagtatgcacaaactcgcccacttccaggccggtctcccgggcaatcaaggataagagcaaagagtagctggcaatgttgaagggcacgcctaagaacatgtcgcctgagcgctggtaaagctgcaagctgagcttgccgtcagccacgtaaaactggaagaggacatggcacggcggcagggcgctggaaggaacgtcttccgggttccaggccgttacgatcaagcggcgggagtcgggattggtcttgatctgctcaatcacgtccgcgatctggtcgataaagccgccgtcccgcttaccccagtgccgccactgggccccatagacgtcgcccaggttgccgtatttttgggcaaaagcttcatcatccagaattcgctggcagaacttttgcatttcttcgtcatagactgccttaaaccctgggtccttttgactcctaaggccaaaatcagtcatgtccgggccctggtattccgggctggtcacccaatttttaaaggcccattcgtcccaaatgtggtttttatgttcaagcaagaagcggatgttggtgtccccccgcaagaaccacaaaagctcgctcttgatcaggccgaaaggcacccgcttggtcgtcaggatcgggaagccctggctcaagtcaaagcgcatctgggctccaaagaggcttctggttcccgtcccggtccggtcatttttgtcattgccttccgtcatgatcttttttagtaaatctaaatatgcttggtcttgatttgccatttccttgtcctttgcaaaaactttttacttcacttcaccttaagtctaacagaatttttcaccgggtgttaatctttacaaaaagcttaacagatggaaaaagccccggcaggattagcctgccagggcttgtctatgttcttcatttttcgctttattttactgctttttcgctaattcaccttgaaaaaggcctttttcccggacagggtccgctcgatatcggtcatgctctggaagaacatattcttgaccgccatcttggtatagtaggcagagtgcggggacatgaccacgtttggcaggttgatcagctccgtgtactcgtccggcagggaacccacatcctcaaacttgcggccgaagattttttcttccccttccaaaacgtccagggcggccccgccgatttcatggtacttcaaggccacgatcaaggccgcggtatcgaccagttcgcctcttgactggttgaccaggatcgcgtcgtccttcatcttggcaaattcattggcgctgaacatgcccttgttttccggagtcagcggaatgtgcacctggacgatgtcgctttccttgatcaaggtctcaaaatcgacgaagtccaaaaagggctctaaagaagcattgtaaaccgggtcatagccgataactctggcccccagggcatggtacatttccgccgcagctgccccgatccggcccaggccgacgatgccgaccgtctggttgaagatctcatcgctcatcagttccgttgaccgggtgaagtctccccgccgcatcttccggtggtagtaaccccacttgcgcaagaggtacatggccccggtcaagccgttttccgcgattgcccgcggcgaataagccggcacattagcaacggtaattccgtatttagctgccgcttccaggtcaatattatccgcccccaccttccgcaaggccaggtgcttgacgccgccagccgccaagggcttaaggtcagacgccgtcaagggctccgcctgctgggtcgaaaccgcctcaaaacccttggccagctctaaattatcggccgtcaaagggctgtgggtataagaaatttcatcatctgggtgctggtcctgccactcttttaaaaaagcttcttccaccggcgtaacgccaaacaagtatgccttcatcttttttctcctcaataactaacaaatttcgtcaaacatcttctcgtttatgctgattctggtatcctaggttaaaagcctcatgctttttatatattatgacaaaaaaattaaaatatggctagagtattttctagatatcgcattttttaacactcctgtaatttttaactaaaaagctagaaaaaggttgtgactgttaaaaagtattaatttcatccagtactaaatagtaatttttcttaccaattcatgatataatgccggtatcaaaagattggaaggaagaaacgatgagcgaatacatgtccatatcaaaagcagctgagtatcttaacgttgccaagtcaactctccgcaattgggaagcagagggattgattactccgcttagaactgcctccaatcaacgtcgctacactaaagaaatgctagatgagcttctgcaaggcaatgcgaaagcagctaagcctaagaagctgctgaccatcggctattgccgggtttcttctagccatcaaaaagaagacctccaaagacagaaggatgtagtgtccagatattgtgaagtcaatggctatcagtttaagatcattcaagacgttggatctggtctc

SEQ ID NO: 2343 - DNA, 2029 bp, Unknown
  gut microbiota DNA sequence
tgtaaattaccaagacaggcttgtccgttttggctttgaaatgattgagacaatctgccaggcaaacgatgtggagctagttgtcatcaatcagacagacaacgttgctccaaattcagaacttgtagaagatgttttatctataatcaccgttttctcagctaagctgtatggaaagaggtcgcatcggaatgcaagagtcatccaagaaagcaaaaagctcttcagtcaagcagacagtgaaaaagactcaacccaagacagttagagtctactccaaaaagataagcgatgaagaatttgccagaatgtccgacttttttgaaagatacggcaggtgccggcatttctttttgaaccgctactgcggcatcaattcgatgctagcggttaataactggcaggctctgcgcaaccaagttcgcaagtgggacaagccggttaaaggctcaaaaggcaagctagaaacagtctacaattttcagaccaagcactgggtaggcgctctccgtgaggcatgtgccaacataaaaagcatgtggtcgaatctggctaaccgtttgaagaagctgattcaaggaaatgaaaatctttctgctgatcagcgccaccttctgttctttattttgaaatttaaaagcgcatggcaagccgttcttcttcacaagccaattgatctgccggaagaatacgccgaagctcttgccgagattgaaactaagctgaaacacaaacaaatcaagcaggcatatagctatctacgccgaattacgtatcgctaccactaccgggcacgcaagtcgggcaagcttagctctagcatgaagtgtgacttgaattgggcatttgaaggaaatactttttcattcaattccgatgtgcctaggaagcagttttctgtagagatgaccagttcgtggagttatccacgcaccggcgatatcacagtggtgcttgaccgcatcaagcagcgccttgaagttcataagctgatctctagcaagcgttacagcaatgattcaaagaaggcaattggcattgacaaggggcttgccaccctgctttcctgcagcagcggcaatgaatatggtgaaaacttcagtaagcttgccaatgccatcgttgacaaatacggcaagcaaaacgcaaatcgccagccatatatgagtttgcgctggcaactcaatcagcagcttgagcaactggaaaaggcaaaccaacctttgtctaagactgctttgaggaagaaaagaaaactgcttggcaagctcaagaatctggagcaaaacaatatcggcagaaagtcgtatgaaaagagttatcgctcagctcaagaaaccatccgaagctttatcagctgtgcgataaacaggatgattgagaaagagcatccggcggtcattgccaaggaagacttgacgttcgtaaaagaaaaaggcgtcaaatcagataatagcagattcgtaagaaagatgcgcaagcgcttgaattcatggactaagggccaactggatgaacgcattgaatatctttcaagcaagaattcgattgaaactcatgatgtcaatccggcatatacttctcagtactgttcaatctgcgggcagcattttgaggaaagatacggcagtcatcatgaactgaccaaatgcaagaaatgcggcgagatgaatgcgaacatcgccgcagccaaaaacatattgagtagattaactgacgaagaaatcacgctttacacgccttacaagcgagttaaggagattcttgccagtcggataaaagaagcataagccaagcaatactacaaagttgaaggctctagcatgtaagagcagtcagctttaacaaactcagttcggggtattaaaatcgcggcttgactgcttcgagaaggcatcacgatatgcttgcctgctttttgcgcacaagatgcctttccgactgccaggctaaaagtttccagtggggcagataaaaagctattggataatgccatttggcgttatttgacagccaaccgtactcactg

SEQ ID NO: 2344 - DNA, 803 bp, Unknown
  gut microbiota DNA sequence
gcatcaagcttatcggtcttgttctggtgcaggtcatcctttgtctttcttttggcttctagcggattcatcatgacatagcgcaattcgtgcatgtccaagaatgcctggagtcttctggaatagacgccagttgcttcaaagataatctgtgggttagtaacctgcttaaggtcacctagcagctgattgaagcctaccatatcgttggagatggcatagtcattaactttttggccattgaccataatgcatacgttagactttcggctgctaacatcaataccgaaaacagttttcaataaatccataagaataaacctccgctttactcggagatgagctacctccacctaatccaatcagatctaattttctcaacaggactttaacagccaacatacttagacgagattcacaattgaatggtgaagctgcccgttttgcctacgacatcgtgtgtccaaaaaaggaacggcattggcttcatctccactttacatagtaaaagaaaaagtgttgaacgactactccgtcgagtaatcatccaacactaggttagtatgttttttatggctaaagtaagctatcatgacacttattgaagtgaagcataatacaaaaacttaccagtccggtgacacgacagtttacgccaaccgggacatcaacttcacgattgaaaaagtccaacatcaatgttgaggaaagaatcagagagctgtcgaccatcaaggtgctcggcttctttgaccaggaaaccaccctctacatttaccgggaaacgattatcctctccatta

SEQ ID NO: 2345 - DNA, 209 bp, Unknown
  gut microbiota DNA sequence
cggaggtctccgaatgggggaacccagcatgtgcagacatgctatccttaagtgaatacatagcttaaggaaggaatacgcagcgaactgaaacatctaagtagttgcaggaagagaaagaaatatcgatttcccaagtagcggcgagcgaacaggaaagagcccaaaccggcagatttatctgccggggttgtaggactgagtcatgg

SEQ ID NO: 2346 - DNA, 258 bp, Unknown
  gut microbiota DNA sequence
cttctgttattttctttgtgacaactgcccgtccatcatgtcatagatgtggtcagcgtatttttccagccgcgggtcgtgggtgaccaaaatgatcgccttcccgtcatccttggccagcttcttaaacaagcggccgacttcttccacccgttcactgtccagtgatgccgttggctcatcagccagtaaaatcttcgggttggcgtacatggcccgggcgattgccacccgctgcttctgcccgcctgacaagtt

SEQ ID NO: 2347 - DNA, 1105 bp, Unknown
  gut microbiota DNA sequence
tcaagcgcttgcgcatctttcttgcgaatctgctgttatctgatttgacgcctttttcttttacgaacgtcaagtcttccttggcaatgaccgccggatgctctttctcaatcatcctgtttatcgcacagttgataaaacttctgacagtttcttgcgctgagcggtagctcttgtcatacgactttctgccgatattgttctgctccagattcttaagcttgccaagcagttttcttttcttcttcgaagcagtcttagacaaaggctggtttgccttctccagttgctcaagctgctgattgagctgccagcgcaaactcatatatggctggcgatttgcgtttcgcttgccgtatttgtcaacgatggcattggcaagcttgctgaaatttttaccatattcattgccgctgctgcaggaaagcagggtggcaagccccttgtcaatgccgatcgccttctttgaatcattgctgtaacgcttgctagagatcagcttatgaacttcaaggcgctgcttgatgcggtcaagcaccactgtgatatcgccggtgcgtggataactccacgggctggtcatctccacagaaaactgctttctaggcacgtctgaactgaatgaaaaagtatttccttcaaatgcccaattcaagtcacacttcatgctagagccaagcttgcccgacttccgtgctcggtagtggtagcggtacgtaatccggcgcaggtagctgtgcgcttgcttgatttgcttatccgtcagtttagcttctatttcagtcaaagcttcagtgtattcttctggcagctcaattggcttgtgaagaagaacggcttgccatgcgcttttaaatttcaagataaagaacagaaggtggcgctgatctgcagaaaaattttcatttccttgaatcagcttcttcaaacggttagccagattcgaccacatgctttttatgttggcacatgcttcacggagagcgcctacccagtgcttagtctgaaagttgtagactgtttctagcttgccttttgagcctttaaccggcttgtcccacttgcgaacttggttgcgcagagcctgccagttattaaccgctag

SEQ ID NO: 2348 - DNA, 414 bp, Unknown
  gut microbiota DNA sequence
gtcactgtctgcttgactgaagagtttcttgctttcttggatgactcttgcattctgatgcgacctctttccatacagcttagctgagaaaacagtgattatagataaaacatcttctacaagttctgaatttggatcaacgttatctgtctgattgatgacaaccagctctacatcgtttgcctgacagattgtctcaatcatttcaaagccaaaacggacaagccggtcttgataatttaccacgactcgctcacactgcttcttgcagatcatgttgatcagctctgtcaggccctttttcttataattgagaccagatccaacgtcttgaatgatcttaaactgatagccattgacttcgcaatatctggacactacgtccttctgcctttggagatcttctttttgatg

SEQ ID NO: 2349 - DNA, 774 bp, Unknown
  gut microbiota DNA sequence
cttgtaaggcgtgtaaagcgtgatttcttcgtcagttaatctactcaatatgtttttggctgcggcgatgttcgcattcatctcgccgcatttcttgcatttggccagttcatgatgactgccgtatctttcctcaaaatgctgcccgcagatcggacagtactgagaagtatatgccggattgacatcatgagtttcaatcgaattcttgcttgaaagatatacaatgcgttcatccagttggcccttagtccatgaattcaagcgcttgcgcatctttcttgcgaatctgctgttatctgatttgacgcctttttcttttacgaacgtcaagtcttccttggcaatgaccgccggatgctctttctcaatcatcctgtttatcgcacagttgataaagcttctgacagtttcttgcgctgagcggtagctcttgtcatacgactttctgccgatattgttctgctccagattcttaagcttgccaagcagttttcttttcttcttcgaagcagtcttagacaaaggttggtttgccttctccagttgctcaagctgctgattgagctgccagcgcaaactcatatatggctggcgatttgcgtttcgcttgccgtatttgtcaacgatggcattggcaatcttgctgaaatttttaccatattcattaccgctgctgcaggaaagcagggtggcaagccccttgtcaatgccaattgccttctttgaatcattgctgtaacgcttgctagagatcagcttatgaacttcaag

SEQ ID NO: 2350 - DNA, 245 bp, Unknown
  gut microbiota DNA sequence
tggtacgtaatccggcgtagatagctatatgcctgcttgatttgcttatccgtcagtttagcttctatttcagttaaagcttcagtgtattcttctggcagctcaattggcttgtgaagaagaacggcttgccatgcgcttttaaatttcaaaataaagaacagaaggtggcgctgatctgcagaaagattttcatttccttgaatcagcttcttcaaacggttagccagattcgaccacatgct

SEQ ID NO: 2351 - DNA, 209 bp, Unknown
  gut microbiota DNA sequence
ataaatctgccggtttgggctctttcctgttcgctcgccgctacttgggaaatcgatatttctttctcttcctgcagctacttagatgtttcagttcgctgcgtgttccttccttaagctatgtattcacttaaggatagcatgtctgcacatgctgggttcccccattcggagacctccggatcaaagcctacttacggctccccgaa

SEQ ID NO: 2352 - DNA, 252 bp, Unknown
  gut microbiota DNA sequence
gtttctggctagaagcttttctcggcagtgtgacgtcgcaaccttcgctactttaatttcgctcctcatcacgccttgtccttatgaaagcaagcatttgactcgctctcagacttgacgcttgaacgtggtatccagcaccacgcgttgctagcctcctgcgtccctccatcgctcataacgattcggtgcagtacaggaatttcaacctgttgtccatcgactacgcctctcggcctcgccttaggtccc

SEQ ID NO: 2353 - DNA, 221 bp, Unknown
  gut microbiota DNA sequence
cggtagctcttgtcatacgactttctgccgatattgttctgctccagattcttgagcttgccaagcagttttattttcttcctcaaagcagtcttagacaaaggttggtttgccttctccagttgctcaagctgctgattgagctgccagcgcaaactcatatatggctggcgatttgcgtttcgcttgccgtatttgtcaacgatggcattggcaagctt

SEQ ID NO: 2354 - DNA, 344 bp, Unknown
  gut microbiota DNA sequence
cagctccacaaatcttggtaccgcaagggatcgatcaactttttgagaaacagcgcaagctttagaaccatcacctcacaaaagcttccagaagattctaaaggcggcatcagaattgaggacaagcatacagacaaccacaccttcttaacaatagccgactttggtactctcgaagtcattgaagacttgtccgaattaaacttgaaggacattgctttgacaaagataaagaagctcccagatggttcttacagactgcagctgaccttttctctgccccgcaagaagcagaagtcaaaaactattcaaggctttgactggaacatggctggcaatgaggc

SEQ ID NO: 2355 - DNA, 209 bp, Unknown
  gut microbiota DNA sequence
tctgctctgttgttggatagttcaaggcgaccatcttttagaacgttcatgaacttgtccatgtgctttatgcaatactggaaggctgtccccaacttgccggaaggcaacacggagattgatttcttggagcaccagtcggaaaacttctctagcagaggctttaattcggactgacgcttctcgtatctctcttcagcggaaaggtc

SEQ ID NO: 2356 - DNA, 209 bp, Unknown
  gut microbiota DNA sequence
tggctgggggttacggtggccaacctttctccggcctgccagggcctggaagaaaagctgatcaagctggagcgggaaatgtatgaattgcaggctgacctggtagtcaagcggcaccatacgattaccttggctgaagtgacttacatggaagagcaaatcgatgcctggacggaagaattgccggaaatgaaggaattcatcctgcc

SEQ ID NO: 2357 - DNA, 383 bp, Unknown
  gut microbiota DNA sequence
tactcagagtgtttaggttagtttcacaactgcccaatgtcatctcgtcttcgttttgactcgctcagaagattacgcagataacaccgtctagtgctaaggacgattgttccgtttcgcccaggctgtttttagtgctttaatcttagacttccgtcaccagtgacgaagggctaagatttttcccttcttcggccgctctcttcagctttgcgtgatgctctggatgaatcccccaatctaatatgtttcttgccgcgtttaaatccctgtctaccatcttcttgcagcttggacactgccattctttctgaccaactttgagatctttgttgatgtatccgcagtcgtggcatgccttgcttgtccaaaatgaatccact

SEQ ID NO: 2358 - DNA, 209 bp, Unknown
  gut microbiota DNA sequence
gaccatctcgcaaggctaaatactaaccagtgaccgatagtgaaccagtaccgtgagggaaaggtgaaaagaaccccgggaggggagtgaaagagaacctgaaatcgtgtgcctacaagtagtcagagcccgttaacgggtaatggcgtgccttttgtagaatgaaccggcgagttgcgttagtcagcaaggttaagtcagaaaagacg

SEQ ID NO: 2359 - DNA, 272 bp, Unknown
  gut microbiota DNA sequence
aacaatatcggcagaaagtcgtatgaaaagagttatcgctcagctcaagaaaccatccgaagctttatcagctgtgcgataaacaggatgattgagaaagagcatccggcggtcattgctaaggaagacttgacgttcgtaaaagaaaaaggcgtcaaatcagataatagcagattcgcaagaaagatgcgcaagcgcttgaattcatggactaagggccaactggatgaacgcattgaatatctttcaagcaagaattcgattgaaactca

SEQ ID NO: 2360 - DNA, 540 bp, Unknown
  gut microbiota DNA sequence
gggaaatactttttcattcagttcagacgtgcctagaaagcagttttctgtagagatgaccagtccgtggagttatccacgcaccggcgatatcacagtggtgcttgaccgcatcaagcagcgccttgaagttcataagctgatctctagcaagcgttacagcaatgattcaaagaaggcaatcggcattgacaaggggcttgccaccctgctttcctgcagcagcggcaatgaatatggtgaaaacttcagtaagcttgccaatgccatcgttgacaaatacggcaagcgaaacgcaaatcgccagccatatatgagtttgcgctggcagctcaatcagcagcttgagcaactggagaaggcaaaccaacctttgtctgagactgctttgaggaagaaaataaaactgcttggcaagctcaagaatctggagcagaacaatatcggcagaaagtcgtatgaaaagagttatcgctcagctcaagaaaccatccgaagctttatcagctgtgcgataaacaggatgattgagaaagagca

SEQ ID NO: 2361 - DNA, 512 bp, Unknown
  gut microbiota DNA sequence
agcatatacttctcagtactgtccgatctgcgggcagcattttgaggaaagatacggcagtcatcatgaactgactagatgcaagaaatgcggcgagatgaatgcgaacatcgccgcagccaaaaacatattgagtagattaactgacgaagaaatcacgctttacacgccttacaagcgagttaaggagattcttgtcagtcggataaaagaagcataagccaagtaatactacaaagttgaaggctctagtatgtaagagcagtcagctttaacgaactcagttcggggtattaaaatcgcggcttgactgcttcgagaaggcatcacgatatgcttgcctgctttttgcgggcaagatgcctttccgactgccaggctaaaagtttccagtggggcagataaaaagctattggatgaggctatccggcgttatttgacagccaaccgtactcactgaccttaacttcaaaaggttaaaaatctgatttcttttgccaagttgaatctac

SEQ ID NO: 2362 - DNA, 6795 bp, Unknown
  gut microbiota DNA sequence
ggctttttgcgggcaagatgcctttccgactgctatgctaaaagttttcagtggggcagataaaaagctattggatgacgccatccggcgttattcgacagccaaccgtactcactgaccttaacttcaaaaggttaaaaatctgatttcttttgccaagttgaatctacccatagatttaactagaaaggaatatcaaaaaaacttaccaatactgatgtgattatcaagatttagcaagttttatgattcggtaaaggattagatgactttttatctgggactgaccggcgggattgccacgggcaagtcgaccgccagccggatattaaaagagctgggctgccaggtcatcgacagcgacttgattgcccaccagcaggccgaagtgggccaggtctcctggcaaaggatcttagaagaattcgggccggacttcttcaatgaagatcggagtcttaacaggaagaagctgggccagtatgtctttgccaatcctaaggctttagccaaattgtctgaaattacccaaggcgaggtcttaaaagaagttcaaaagcagatgaaagacagccaggcttctgtttgcgtcatcgatgttcccctgctctttgaggctggctggcaggactactttgacgctgtcctcttgatcgcggccccggaagaagtggaactggaccgcttgatgaagcgggactctttaagtgaagcagaagctaaaaggcggatgcaggcccagctgcccttaggggaaaaacgtctgttggctagctatgtccttgaaaatactggtacaatagaagaattaagagataaattgagcaatctgctgaaaactatcgcgtgaaaggagcttcacaatgctttgtccaaattgccatcaaaacgcctcccgggttattgactcccggccaactgacgaagggcggaccatccgccggcggcgggaatgcgaaaactgcggctaccgctttacgacttttgaacgggtggaacagtcaccccttttggtgatcaagaacgacggcaccagagaggccttcagccgggaaaagatcctgaacggggtggcggctgcctgccagaagcggccggtaactagcgagcagctcaacaagctggtcgacaatgttgaaaaccggatccgggctaaaggagtcagcgaaatctactccaaggaaatcggggaactggtcatggaccaattagccgacatcgacgacgtggcctacatccgctttgcctccatctaccgccagttcactgacatgtccagcttcatgaagaccatggaggacatgatggaccggcacagcaaggacaagtagtccatgtacgaaaattccaatccccgcctcaggtacgtcgttttaaatgagctggccgaccagtcagggcaagggcaggtcttaatcaagctctaccagcccttgatcggggctttaggggttgccctctaccagaccctggtccaggactttgatccttaccggtctttgtcggcttcaagtgccctgtacagcctgcaagaagacctggactgcagcctccgccaactctggcgggccctgcataagctggaagctgtggggctactcaagacctatgtcagccacaatctccgcttgggggatattctggcttttaagctgcacgccgtgccggaggccagtgagtttttcaacacttcgctgttagccagcctcttaaaagaaaaagttggcggggtccgcttcagccagctgtcccgggaatttgccaagcaggcccaggtcaaggagcggcagctggacaacctagaagaagtttccgcttccttttttgaagtcttccgcctgccggaaaatgaggccatcaatccttctgaagacgtccaaaaggcggctgaggaaaatgccggccagaagacggaagaagcccaggtcaacttaaagcagatcgactggcagtatttgaaagaccgcttcgcgacttaccagatcccggaaagcgagatcgaccgtcagaaagacgaaatccggtccatcatggaactttacggcttaagcgaggaagagtttatcaacgaaaccctgccgaccctgcatggcagctaccagctggacgccgcggcgatcagaaagagcctcaactacaactacaaggctgaccaccgccgcaagcaggtaatcaagcgtcaggaagaaaagcaggatcggccgagcgtggaccagcaagaccagcagcttttagacctggtgaagagcaagtccccggtcaacttcctggatgacatgaagcgggaaaagggcggctttaccacggccagagagcggcagatcgtctatgatttgcgggaaaatgtcggcctggaaatggacttgatcaatgttctggtctacacctgcctcaactaccagccggttttgacccgggatttggcctaccggattgccaacgactggctgcaaaagggaatcacgaccccggaagccgctatcaagcacctgcgcgctgggaagaaacaggcccagtcagggcaaaagaagaactacccggcatattcaggcagccggcggcttgaacaggggactgactggaacaagaagcagtttatccagccggtcaatatttctgatgaagacctgcggaagatgctgcaggggccggacaagaaagacaagtaagggtgattagatgagagcaattggcgacatgttgagtgacgcggctaaggccgcggcagccaagaacgggcaggatttttcggcggaatcatttgaaaagatgaaaaaacaggtcttcgctgaccccgacgtccgggccttcctgacggcccaccaggaccagctgactaaggagagcgtggacgccagctttgccagcctctatgaatactgccggcaaaaagacagccacgacaaggtgatcagcggctatttgccccagcttttcatggagggtcctttaatcgggatccgttaccaggccagccaggacaagcagcgccgggacaaagaagcagcagccaagcggcggattgagttgattgacctgccggagaaattgcgccgggtcaagttggctgacttggacatggccgatgaccgcaagcaggccttgtttgaagtgggggcctttttgcaggcttaccagagcaatccccatgccaagggcctctatttaagcggggacttcggagtcgggaagacctacattttagcgggcctggccaaccgggtagcggaaatgggcggcagggtgatctttttgcacatgccgacctttatcgctggtttgtccagccacttcggcgacaacagcctgcagacggaaatccagcgcctggcggcttgcgatgtcttgattttggatgacatcggggccgagaccctcagtccctggtcaagagacgacgttttaggcgtgattctccaggcccggatggacaatgacctgccgaccttcttcagctccaactttgacatgaaggccctggagagccactttagcgcgaccaagaacgcggatgacccggtcaaggcggcccggctgatgcaaagggtccgctatttggctaaagaagtggtggtttacgggaacaaccgccgcctgccttagattttttgaaaaaaatggcaaaaaatccttgtcttatttgggcaagggggtataatcgaaaagtaaatagaagacatgattcctcccgcttcagagagaggggcccagttctgaaagcccccatttgggaggaaccccaccttctattaccccaaaagataaatgacaaggttggacgccgttatcagtccaataagagaggccgctttaggcctgaattttgggtggaaccacgatgattaatcgtcccgagcatgtatttgtgctcgagacttttttgtttttggaggatttaaaccaatgagttttgctttgactctgccagatggctcaaagaaagaatttgacgcagctgtttccgttgctgaccttgcttccagcatctcaacttccctggctaagaacgccgttgccggcaaggttgacggggaaatcaagccccttgactttcagctggacgctgaccacgaagttgccattttgaccaacaaggacgctgaaggtttgagcgtcttgcgggcaactgttgccttcgttttggaagccttggttaaggacaagtacccggaaatcaagctgggccaggctgaagtttcagaagacggcttcttcatcgaaactgacaaggaagaccaaatcaaggttactgaattgccagacttggaaaaggccctgcaaaaggctatcaagaacggcgaagccattgaacacgtacaagtagctaagagcgaactggctgaagccttcaaggacgacccatacaagagcgaacttttgaccaaggaaggcgacgtggttgacgcttacaagctgggcgacttcgttgactttggctttagcgcgattttgccaaacactggcaagatcaagaagttcaagctcttgtcagtagctggtgcctactggaagggcaagagctcaaacccaatgctgcaaagaatcttcgggactgccttcttcaaggaagctgacctggaagctgaccttaagcggcgggcagaaatcaaggaaagagaccaccggactatcggccgggacctggatcttttcttcgttgaccctaaggttggggcaggtttgccatactggatgccaaagggtgccactatccgccggatcattgaacgctacatcgtggacaaggaagtcgcagccggctaccaacacgtttacacgccagttttgatgaacctggacgcctacaagacttccggccactgggctcactaccgggaagacatgttcccgccaatggacatgggtgaaggcgaaatgctggaattgcggccaatgaactgcccatcccacatccaaatctacaagcaccacatccggtcctaccgggaactaccaatccggattgctgaactggggatgatgcaccgctacgaaaagtctggtgccttgtcaggtctgcaacgtgtccgggaaatgactctgaacgacggtcacacttttgtagctctggaccaagttcaagaagaatttgctagaactttgcaaatcatcatggacgtttaccacgacttcgacatcaatgactactacttccgtctttcataccgggatccaaagaacactgacaagtactttgccaacgatgaaatgtgggaaagaagccaaagcatgctgaaggcagccatggacgacatgggcctggactacgttgaagctgaaggtgaagctgccttctacggtccaaagttggacatccaaaccaagactgctttgggcaacgacgaaaccatgtcaaccatccaactggacttcatgctgccagaacgctttgaactgtcatacatcggcgctgatggcgaagaacaccgtccagttatgatccaccgcgggattgtcggtactatggaacgctttatcgcttacctgactgaaatctacaagggtgccttcccaacttggctggctcctgttcaagctgaaatcattccagttaacctggacgctcactcagactacgctaagaaggttcgcgacgaactggtagccaagggcttcagagcagaaatcgacttcagaaatgaaaagctgggctacaagatccgtgaatcacaaacccaaaaggtaccttacactctggtgcttggggatgatgaaatgaacgccggcacggttaacgttcgtccttacgggactgaagaacaaaactccgaaagcctggctgagttcatggacaagctgagcaaagacgtagcaagctactcccgcgaagactaattccttccttacaaaattgaactctttctgacataaaaaaacatcctgtctcaactctgaggcgggatgtttttgcgtaagaaatagaaaatgagattttattgcttaaaagcgataaaaccattatttactggttgaagacttggcagtatcataaaagatgaaataaattcggaggaagaatgatgaaaaagtgtaaacgatatctaactgtcttttttgttgccatgattactgtaacaatttttttgccattcagtgctgctagcgtaagtgcgaaaactaacttgaatgaagcgatgagtttacctgacaagaatattgagattgacaaaaagtattggtctgatgaacgaattgatcaacttgctgataagttcagaaaagtctcaatcgtgccactttcatacatgatgtatagtccaagtggaatgaatactaagggcacaatgattcgctggtatttttcaattgtctcggatattaacggaatagaagatagcacccgactaagctcgcaaaagataattatgccgattgcaaacacaagcaacgccacgagggtctgtgaccaatctaacgaagcaaaataaggtatatagatacctaaattatctccgccagacgcaattgtcagcaatgtaactgtccaaaacagttgatttgccttgctttgttctaatctttcaataatttcttcctcttcttcttcctcaccttctccaacaattgcaaagcgaatccctaaatagatagggattaaaccaagcaatccaaccatccatggttcaggcacgaaattgacgacataagcagcaactaaactcgcccctacaagtaagccagtgcctagatactgccccgcataaatatgccatttctgtttattctgtgatagctgtgcaaataaaataattaaaataattaaataatcgatactggtggaaatataaacaccaa

SEQ ID NO: 2363 - DNA, 50814 bp, Unknown
  gut microbiota DNA sequence
ttttactcctcctcaaaacatagttacaaagtaatttctaactggaattcggtgaccacttccatgtaaagtataacccactatactttacttgggctcgccgagggttcttgcagacggctctttcggctcttttgagccgagtatcagcgaccccattgggtcaattagctgatgcctgtctgacgatttgctaccctaccaaaatggtaggtatgcaaacctcaaacctaaataaaaacccacttcgacttttgaagtgccatagaaaagttagacattttagaaaatcttaaatagttgctattacacgatctctgtattttacaggggtcgtgtaatttagtttattggaccgtctgatgttgttaaaccaatatatgtaatcttcaagttcttgttggacttcctccaaagaatgcagtttaactcgatttagtctctcacgtttcattaagttgaatatagtttcacccggtgcgttatcgtgacagtttccctttctggacatgctttgaactagttccatctctttcaagcgggcttggtaggttggactttgatactgagaaccttgatcagaatggataactgggtgggagtaagccggtagtttggtttccaattcatcttgcatacccaatactaactccatgtcgggggagtagctagcagtacatgcaaggatctccaaagaagcctcatccactacaggcgagatataaactttcttaccgttagttagtgcatattctgtaatgtcggtatggagaacatgatatggcctttcttcatcgaagtgctgctgaagaaggttatcagctacttttcctacagtacctttgtaggagctgtattttgcagttctcttgtgatatagctcggtcttcagcccgatactgcgcatcagtttacgcactgtttccatcgctaatttaacgcccttgtcacgcagagcagcccacatcggacggtagccatacgtgccttggccttcgttgtggtagatatctttgataagatcttttacttcggcgtacttatccttcttagcgattcttttaaggttgtcgtaataagtcttacgattgagattaagagctttaaataactgttttaactgaaattctgggtggtctgcccggatatcataagttatctgtgtcttttgtcgattggatagcgtggataccgggcggccactttttttgcgatgatgagctccaattctaattctttgattctggcatccttttccagaattttggcctcatatttctgcttatcagttagagtacctatttgcttattacgcttggctttctcggtcttcttaggcattttagcgggtctacctttcttgacaggaaggagcgcatctggaccgcctcgctggaacttcttagtccatgaatacacttgtgacggactaatattgaatttagcagctaccagattacgtcctacatcggattttagatagtagcttaccacatccagtttaaagtcaacagaatattctcttttggttcgcttaacttttaagctttccaatccattaagttcagcggctttcacccacgtacgaattattgacgcagcgatattatacttttggcttaatccattgtatgagtctctgccgtaaagataatcagaagcaatttgtacttttagttcagatgaatatttggtcataaaaataccccacaatcgttagatgtctatgtctaacaattgtagggcacttcaaagcggcgtgatattgaacaagtttttattcagaaccactttattggtcaatgtcaatcccttaacttaatgacattgtctcaactctgaggcgggatgtttttgcgtatgggattctatttttggacttacatcatgtcgaaggtaattaagtggcagtcgacttgctgggcaagctgctggcatttatcagtaaagccggtcttggagaacaggtagtaatttttcttaggagtggggaagaggctgcttcggtagatgagagtttcgaggatatccgcggagatcggttcgtttttccacttgcattcgccaaagtagccgttcagcttttggtcatcgaaaccgacaatgtccatttcgacttgcttcttttccttgggatccggtccccaccagttgcctaagttgacaaaaggctctggcaccaggtctggatcaaacagtttggaccagaggtattcttgggagagtttttcaaattctggtcccatgaagtgggggagctgcttaatgatgtagtctaaaattggctcggtaatcccccgttcgataaagctgacccgtttgccgacgaaagtataccagaagcggaacatgccatctttgatggcatagatggtctttcggcttctggctttatcaagttccgtaaccggcaaccgtttttcgacaatgcccaggtcgatcaaattgtccaggtaagggctaagggctccgctggcaataccagttttagttgagatctctgactgccggctggccccggacgcgatggcactgatgatggagctgtagcttgccggctcgcggagttcttgattgagcagactcatcggctcggcatagagcatggcgctggtggttaagaaattgtccttgatgttctccctaagggattttttgggagacatcagggagaggtagaggggaattccgccggtgatggcattgagttcaaaaacttcttccttatttaattgcgggaaaaattctttggcatcatgcaggctgaagggtttcagcttgaactgggcagttctgcggccataaagcgggctcttgtagccaaggacctgtttttccatgaaggacatggagctgccgcagaggataagaaagagtttgttctgtttaaaataatggtcgatgtaggattgcagcattgaactgattggcggataggctttcgccaggtaaggaaatttatcgatgactaagattaagcggtcatttttctcagagagatggacgagatatttgaaggcctgctcaaaggaagcaaaattaggtccatccagatagctgggatcttcgtaggcgtgaatcgcgtcagaaaaacgggccaggttttccaaggcgttttcttcaagaccagtaaaatagatggcccgcttgcctttaagaaattggttgatcaagctagttttcccgatacgacggcggccatagatgaccgcaaattgaaagctgtcttcttgatagatcttattcaaagctgtaagctcttgatttctgccgataaacattgaaacacctcgttagcaataacacagtttgcaatattatactttacaagtttacgatatataagtttacgatattgttaattgagggatgcaccttgtctcaacactgaggcgagattttttgcgtatacaaggacatatttcagatgaatgattgataaaagcaaatggagagtttccttgatcagcatggctatatatgataatttcaaaagaaagcgaattaaagagatgagaaaaggagagggaaaagtaaatatgaagcagattgttgtgaaagttcttgcgaatacgttcctgttgcgattggcaaaattaagctttaagcaattgggctgaaagtgaaattagcccttgacggacaatcttagacctagtacaatagtagaagttgagaacaagaagaagcccccgcttctcgcctaagttatttaacctctgggcaaatcgatattttctgttgattttaaaggcgggtgctatatgcccgcttttttcttgtcctcgaaattaacatggaggtgaacagttataccacagaaacaaaacaacatgatccttaacgaaagcatccgcgctcgtgaagttcggctgatcaacgctgaaggtgaacaagttggggtcgtgtcaagaaatgaagctctgcgccaagcgagcgatgctggcctcgatctgactttgatttcaccaaacgccaagccgcctgtagcaaagattcttgattatggtaagtaccggttcgaacagcagaagaagctgaaggaatcacgcaagaattccaagcaggtcagcgttaaggaaatccgtttgagtccggcgattgaaggcaatgacttcgaaaccaagttgaagcatgcacgcaagttcttagaaaaagaaggcgccaaagttcgtgtttcgattcgtttcagaggccgggcaatcacgcacaaggaattaggacaacaagtgctggaaaagatggccgaagaaacttcggatattgctgttgtaaccagccggccaaagatggaaggccgtcaaatgtttttaatgctcagtcccaagagcgataaagacaagaacaaacaatagttaattggaggaattttaccatgccaaagatgaaaacccaccgcgcttcagctaagcgttttaagagaactggtaacggcggtttgaagcgccaccacgccttcactggtcaccgcttccacggtaagactaagaagcaacgtcgtcatttgagaaaagccgctatggtttcacgcagcgacttgaagcgcatcaagcaaatgctttcccaaatgcgttaatttactattttttaatacactaacgatattaggaggattttcagatgccaagagttaaaggtggtaccgttacacgcgcacgtcgtaagaaggttttgaagcttgccaagggttaccgtggctcaaagcacgttcaatttaaggccgcaagcactcaattgttcgtttcatacaagtacgcattccgcgaccgtaagaagcgcaagagcgaattcagaagactgtggatcgcccggatcaacgcagctgctcgtcaaaacggcttgtcatactcaaagatgatgcacggcttgaagctggctggtgttgacatgaaccgtaagatgttggctgacattgcctacaacgacgaaaagacttttgccgctttagcagaaactgctaagaaggctttggcttaattctttggaagaaacgcatctagcttggctaggtgcgctttttctttgttaaatgccggctttcagatataattaaggaagatgaaatttaaggaggaaaactcagacatgagtgaagaaattcgctgcatcggctgcggcgcggctctgcagagccaggacaagcagctgccaggctacctgccggctagtgccctggccaaggtggaaaatggtgaaagagaagaagtctactgccagcgctgcttccgcttgcgccactacaacgagatcatgccggtctccctggacaatgatgactttttagcacttctgaacaccatggcggaaaagaaggccttgatcgtcaacgtggtggacctgtttgacttctccaactcgctgatttcttctttgaagcgctttgtcggcacaaatgactttatcctggtcggcaacaagctggacctcttcccgaagaactccaaggaaagcaagatcaaggactggatgcggcaggaagccaaccggatgggcctctacccaaaggacatcttcttgatctccgcggccaagaagaagaacctggacactttgatcgactacttgaacaagcacagccaggaccgggacgtctacttcgtcggcacgaccaatgtcggcaagtcgaccttgatcaacgccattatcgatgaaatgggggacgtccaggacttgatcaccacttcccgcttccctgggaccactttggaccagatcgaaattcccctggacaacggccacttcttggtcgacaccccagggatcttgaccgacaagcagctggccagccggctggacccgaaggacctggacctggcttctccaaagaagccgcttaagccggccacttatcagcttttgccaggcaataccatcttcttggccggcctggggagaattgactacctgaaggggccgtcaaccagctttactatctatgctgcccggggcatgtacatccaccggactaagacggagaaggctgacgaattttaccaaaagcatgtgggcgaattgctgtctccgccagggccaaacagcgacctgccgccgcttaaagggcaggagtactccatcaagtaccgcagcgatgtattgtttgccggggtaggcttcatcactgtgccggaaggctgcgtgatcaaggcctacacgccgggcggaatcggcttaggaaccagaagagctttgatttagaggttgtaacatggattcattggtagatttcagtaaagaaacgcaagtaaaagtgcagacggctgagagccagcggaaaggcaagcagatcggcatcatgggcggcacctttaacccggtgcacatggcccatttggtcgccgctgaacaggccatgaccaagctgcacctggatgaagtctggttcattctggacaatattcccccgcataaggacgctcccttaaacgtgtctgcccgcgaccgggccaccatgctggatttggctacccgggacaatccccgtttcagggttaagctgctggaactcttcagaggcggcgtttcttacacgattgataccatgcgctatttaaccaagaaggcgccggaaaacacctactacttgatcatgggcagcgaccaggtcaacagcttccacaagtggaagaatgctgaggaactggccaagttagctaccttggtcggtatccgccggccgggctacccgcaagatccgcaatattccatgatctgggttgatgctccggacatccgcctcagctcaactgctatccgccgggctgtctcaaccggaacctcaatccgttacctggtcccggacaaggtccgcgaatatattgaagaaaaggggctttaccgtgactgatccagtttttaaggaaacatattcccccttgtccagcagtgaattggtggccaaggagaagagcatgatggatgaaaaacgctttgcccactgcgtccgcgtcagtgaaacggcccggaccctggccaaattgaacggctatgacgaagacaaggcggctttggctggttttgtccacgactatgccaagcagattccagttgaagaatacatcaaggtcatcaaggaagaaggctttgatccggatcttttgaactggaaccgggctatctggcacgggatcgtgggcagctggttcatcaagcgcgacctcggcatcaccgacccggaaattttaaccgctgtctaccggcacaccaccggggacgtggaaatgaccaccctggaccagatcgtcttcgtggctgactatattgagccgggccggacttttgccggagttgaagaggccagaaagaccagctacgcggatttagcttccggggttggctatgaactggctcacactctggcctttttagtccaaaagagaagcaagatctacccaagaactctggctgcttacaatgtctgggcagctgagtaataacagataaattaagagtaactaaacattaggagaaaaatttgaagagcgaagaattacttgacttagttttaaacgcaatcagcgaacggcacggggaagacaccgaagcctacgacatgcgcggcatcagcatcctggctgactacttcttggccaccagcgccacttccagccgccagctgcacgccattgccaacagcatcatcgaagcctgtcacgaagctaatttctacgactaccgggttgaaggcaatcatgactcagaatggctcctggttgacctgggcgacgtcgttgtcaacatcttctcagaagatgcccgggccttctacaacctggaaaagctctgggctgacggcaagcgcgtggaaatcgaggaagactaggcaatgagcgttgtcgggattgtagctgaatataaccctttccacagcggccatgaattcctgatgaaccaggcccgcttgatcgccggtgatgaccccattatcgcggtcatgtccggcaattacgtgcaaagaggggaaatggccatcctggacaagtggtccagggcccgcagcgccattgaggctggggctgacctggtctttgagctgcctttttcctatgctgtccaagctgccgacatgttcgccaccggcggggtcgacctcttaacccggctgggggccaagaacctggtctttggggtcgaagacgccaacttgaattttgaatatttcggcgaccggatctccaagatcccccggcaaaggcaggaattcgccgactacagccagacttattccacccagtacaaccagatggtggcccgggaagtcggccatgaagtcagtgagcccaacgcgattttgggcctggcttatgccgtggctaatgccaatctgggctcgcctttaaagctcagcccggtcaaccgggttggggccggccatgatgacatcctgcaaagagaagcagctgtccaaagtgctagcgctatccgcaacctccttttaaacgggaccgagcgctcagaactggagcaatggctgccaaaaggggaaattgtcgcttttgaccaggaaaaggtcctgcccaactgggaactgctcttcccgtttctgaaataccggctggaatcagcctcaatcaaggaattgcagcagatctaccagatgagcgagggcctggaatacaagttcaaggcagaaatccacctggctgaaaatttcgctgacttcctccgccgggtcaagtccaagcgctacacctattcaaggttaagaagactgagtctttatactcttttgaacgtgactgaagccgatgtcttaaacagctatgaccatgtttccaccatgcttctggcttacagcaagcggggacggaaatatttgaagcagcagcggaaagactttgagatcgatatcgtttccaaagtggaccgcaagaatgcccaagaagggaccctgggcctgcaggtcagggttgaccgcttatttgaacagattgttggcgctgaccagaactttggccggcggccactcgaggtaaattaatgctagaactttcaattttacaaatcaagaacagccgggagccattgacccagatctcagctgatttgacttttgctgatggcttttaccagcgggccaaggacctggtctatgaggtgaaaagcgcccacgtggaagggcagctcttttatgacgaacccttcgtgactggcaatttccaagtggaagccgacctcctggttccgtcctcccgcagcctggaagcagtgcctttgaagcagaaattcagcttcgtggaaaattattccgaccatgaaccgacccaggaagaaaaggaactgggcttgatgatcattccgctggacgatgaccgcattgacgtgcagacggccgtggaagacaacatgctcttgaatattccaagcacggttttgactaaggaagaagctgaagaagacctgtacccagaagggcagggctgggaagtcatgtctgaacaagacttcgccggccagaagaaggaccaggtcaacccggccttcgcccagctgcagggtcttttggacaagatgcaggctgaagaagacaaagataaagccgaagacgaagagaaataatcttccctaaaaacaagtctttttccagagaaaattaatctggcgggggacttgcttttctttgggacttgttaaaaagctaattttgggctatcctagaattattaaaatatactttaagattatacttggattcagcagacccaaattaaatcgataggatatgaggggataaaaacatgccgaaaattttaattgttgaagacgaaaagaacctggctcgtttcgtcgaactcgaactccagcacgaaggttatgagaccgtagtggaaaacaacggccgcaaggctttggaccgcgctttgagcgaagacttcgacgcgatcttgctggatttgatgctgccagacttgaacggtttggaaattgcccgccgggtacggcagagcaagaccacgccaattatcatgatgacggcccgtgactccgtgattgaccgggtatcaggcctggaccacggggctgacgactacatcgtcaagccatttgctattgaagagctcctggcccgcttgcgcgctgtcttgcgccgggtcaagatcgaaaaggacgcctcaaaggacaaactgccgcggcaaaaggttgtcaagttcaaggacttgaccatcgaaaccgccaaccggatcgtccaccggggcgatggcaagaccgttgacttgaccaagcgggaatacaacctgctcatgaccttgatcgaaaacaagaacaatgttgttggccgagaccagctcttgaacaagatctggggaccggaatcaaacatcgaaactaacgttgtcgaagtttacgtccgttacctccgcaacaagatcgacatccctggccagccatcttacatcaagacggtgcgcggaaccggctacatggtcagagacgaggacgacaatgcttaagcaaaacgccgccagcggcaagaaggggaccagacacgtttcactgatcgtgagatgggtcagcatcgtcgcgatgacgatcatggtctcctttcttgttttctcagctgtcgtctacaatacggtcaagcaggaagccctgagccagcaaaaggatacgtctaacgaagttgtcaacgtcctccgcaagcgtctaattgacatcgatgatgaactggagatcaccaacgtggtccagcaactatcaccgaacaccagacggattttaacgggcgggccggctctgtcagaaaataacaacagcaacagcagcgtttttggcgactcggtcttaagcaccgtgaccaaccctgacatgaccgtggcgatctataatctccgcaatgagatcgtcttccacaacggcgacagcgcccctaaactggtcaagttcaccagtgagagcaagagtgtggtcaaggaaggcaaggatgggcaaagttctctttatgtctaccggaaggtcagaaaccggaagagccataaattgactggctacattgtcgtcaagaaccagatgaccggctacaaccgcttgatttcccggacattgaaggccatgctctggctctcaatcctagggatcagcctggcgattttaatttcctacctggttgtccgcagcgtcgtcagaccaatcaacaagatgtccaaggtggccagggaagtcaacgccgacccaaacagtacggccagaattcccgagctgcacagaaacgacgaactggaagagttggccctatctttcaacatgatgctggatcggatgcagaagtatatcgagcagcagaagcagttcgtctctgatgtctcccacgaattgaggacgcctgtagcggtcattgaaggccatctgagcatgcttaagcgctggggcaaggatgacccgcaggtcctggaagaatccattgacgcctcgatttcagaggctgagcggatgaagcacttgatccaggaaatgctggacctgacccgggctgaacagatcagtgtccactacccgaatgccatcgctgaaccgatggaagtcttgacccgggtagtcggggacatgggcatggttcacccggacttcaagatctctctggaagttgaggacctggatccggatactaagattcagatcttccagggccacctggaacagattttgattatcttgatcgacaacgggatcaagtactcaaccgaccgcaaggaaattgccgtggctgccggccagtccggccaggaaatgcagatcgtggtccaagactacggggaagggatttccgatgaggacaagaagaagatcttcaaccgcttctaccgagtcgacaaggccagaacccgggaaaagggcggcaacggcctgggcctgtcaattgcccagaagctggtggaatcctaccacgggaccattgacgttgaatcagtcttagggcaggggagccagttcagaatcaccttcccggtcttgactgatgaagaagtcaaagaattggaaagccgggaagagcaaaagcaagctggaactgagagtccaaagcaagatccgacaatttaacagaatttagagcaaagtaaaagccgcttttcagcggcttttacttttttcttgtttatcttattatgtttagtttctttttagcttgatgaattacttccgcttctgcttgccctggttgcgcttgcgcaggtcgccggacttcggctggctggttggcttttgttcaggggctggctttaagatctggtcaagcttggcttgggtaacgacttccacgatcgggctgtctgccagttccttggaaacccgcttcttggcccgcggctgcacgatgaaggtggtgatcagctgctggatgaccatgaccaggttaccgactgcccagtaaagggccagggcgccggagaaggacatggagaagaagaaggtcatgattgggttcatcagcatggtggcctgcatggtcttcttttgctcttcagggatgccgatcatggccacgtagctttgaatcaaggcaaaaacagtagcgatgatggccaggaccatggacttgctggacaaggaaatgccgaagaaggtggacttggccagggcgtttgagtaagccacggcctggtagatcccgatcatgattggcatttggatcaagaggggcaggcagcccatcccgccagtcatggagacattgttcttggaatagatctctctttgcagaccggtcaaggccatctgctggtcaggagtcatccctggtgtcttcatggccttttgcaaaagctgcatttgcggctgcagaaggtgcatcttttcttgctgcagggtagccttgtgctgctggctcagcatgagcggcatcaagatcactctgacgcccaaagtgatgatgacgatggcccagccggccccgctggctccgccgatggcgtgggcgatgttgacggtgatatgctgcaaaggcaggccgatccattcatagatccagtagtaaggaccactggtcggggcctttaagctgccgtttttgctggtctggctggcgcaggccgtaaggaaaagcggcaagagcgccagcaggctgacaggtaataaacgttttttgatttttttcattgaatagtttctctccaaattcttaggatctgtctaatataatacatgaaaagaatgcatttgttccatttcaggcagaacttttgtgtccaaacgtgaaatttgggcatatggcgccgcgtttggcaactcagctttaaacttgaccagatcagttggcgtcccttgaatgacaatggtgaccgtcccgtcagggttgtttctcacgctgcctggcagcttcatcttctgggccagcatctgcacgctccagcgaaagcccacgccctggacgactccatgcgctaatagttcccatgtttgcattttgactaccttctttattttttgcaaaaaatcattaaaatagtatttctaaggagtattttatcatgcaagaaagaacatctgtcaacaatccgcaaattaaggccatcggcaagctgcagcagaagaaataccgtgaagaaagcggctattacttgatcgaaggcttccacttggttgaagaagccttaaaagcaagcgtcaagtaccgggaaatcctggctactgaagcagccctaagccgcttggcgcaactgggcctggcttatgatgagagcaagctgatcaagatcagccaaagcgtggccagtcacctcagcagcaccaagaattcccaggatatctttatgaccgtcaagatcaaccagtctgagcattttgccttcagctacggcaagtgggtcctcttagatgacctggctgacccgggcaatgtcggcaccatcatccggacggctgacgcggctggctttgacggggtgatcctgtcaaacaagacggttgacctctacaacccaaaggtccagcggtccatgcaggggagccagttccacttgaacttgatcaaggctgacctgccagacgccattgccagcttgaaggccgcggacattccagtttacgccagccttttggatccagccgctaaacaattgggtgactttgccccagtagcccaggttgctttgatcatcggcaatgaggcgcacggggtaagcccggaaatcgcggctctggctgacgagaagctctatatcccgatcaagggccgggctgaatccttgaacgccgctgttgctgccgggatcatgatctaccacttcagctaggaaaaggctttttgcttgtttttcgtaagtaaagtgtgcttaaataattaacatggaaactaatttgaggaggatttctctatgacagaattagctgaacaggacgtgccatgctgtaaaaacgctgaaaactacgaaatgtgtgcccgcttcgtcaaggcctttgagatcatcggcaagaagtggaacggcttgatcatcagctccttgtgcgacaccaaggccatgcgcttccgggacctggcccacgcggtcggtgcctgctctgaccgggttctggtcgaacgcctgcgggagctggaagttgacgggatcgtcaagcggtccaaggatgcggaaaagaagatcgtcctttacactttgacgccaaaaggggccgaattaaagccggtcttcaaccaggttcatatctgggctgacaagtgggcgtaaagaacgacttgcatttaagcaagttttagcctatgattttaattaattactaagaacaagactagtagcaagtccggtctttgacagggaggtttcttggcaactgaaaggaaaccaaagagcggcttgcgaatttcatcttgcgagtaggatctaatcaattccggctgccaccgttatcggtatagagcgtaggcctttttgggcctaaactagggtggtaccgcgaagcttcgtcccttttgggggggcggagtttttttgttgaaaggaataagcaaatggatttatttgatcgattgaaggacctgcgggagcaggggcttgctgaaatcaaggaagcagaaagcgaaaagagcctgaatgacgtccgggtcaagctggtcggcaagaagggggaactgacgcaaattctgcaccagatgaaggacgttgctccggaaaagcggcgggaagtcggccagaaggtcaacgaactccgcgacctctttaatgaaaacttggcttctgccaaggataacttgatcgaaaaggccattgaggcccgcctggaagctgaaaagattgacgtgaccctgccagggcgcagaaagcatgtcggctccaagcacccgatcagaatcattcaagacgacctggaacgcttcttcatcggcatgggctaccaagttgtccaaggcccggaaatcgaaagcgaacactacaacttcgaaatgctgaacctgcctaaggaccacccggcccgggacatgcaggctactttctacgttgacgctgaccacctgctgcggagccagacttcaccagttcaagcccggaccatggaaaagcatgacttcgataaaggggacctcaagatgatctccccaggcaaggtttacagaagagacgatgacgacgccacccactcccaccagttcatgcagatggaagggctggttgttggtaagaacatctccttgagtgaccttaaggggaccttggaactggtggctaagcacgaattcggccaggaccgggaaacccgcctgcggccaagctacttcccatttactgaaccatcagttgaaatggacgtttcctgctttgaatgcggcggcaagggctgcgcgatctgcaagaacaccggctggatcgaagttctgggtgccgggatcgttcacccgaatgttttgtctgccgccggcattgacccaagcgtctactccggctttgcctttggcctgggcctggaccgcttcgccatcttgaagtatggtattgacgacatccgcgacttttacagtgacgacgtgcgcttcttgcaacaattccgtcaggaggaagattaatgttagtttcttacaattggttgaaagatttcttgaacatggacggcgtagacccttacgccttggctgaaaaactgactcggtccggggttgaaatcgcctcaacggttcacccggaagacggcttgagcaagctggtcgtgggccatattttgacctgcgaaaagatcgaagggacccacctcaacaagactacggtcgacgttggtgaagatgaagcccgccagatcgtctgcggggcacctaacgtggctgctggccaggacgtgatcgtggccctgcccggggcccatttgccaggcgggatcaagatcaagaagggcaagctgcgcgggattgaatccaatgggatgatctgcggcctgcaagaactcggcttcagcgactcagttgttccgccgaagtacgccgacggcatctgggtcttccatgatccggaccttaagcctggtgactctgtctttgcagccttgggcatggacgactacgttttggacttcgacattaccccaaaccgggccgacacttcctcaatggaaggggcagcttatgaagttggtgccttgattgaccagaagccaaagatcgaagacgttgtccttaaagaagacggggcagactggactggtgactttactgccgttgctgatgaaaagatcgcgccgaagtactacttgagaaagctgaccggggtcaagatagctgaaagtcccctttggctgcaggcccgcctgtggaatgccggcatccgcccaatcaacaatgtggttgacgcgaccaactatgtcatgctcttgactggccagccaatgcacgcttacgacgccaagctttttgacaagaccaagaagatcgaggtccgcctggccaaggaaggcgaaaagctgcagctcttgaatgaaaaagaaatcgacctggacccgcaagacatcgtgatcactgatggtgagcaggcagtcggcttagctggcgtgatgggcggcttgaacagcgaagtaactgaagaaactactgatgtgatcctggaagctgctgtctttgacccggccttgaccagaaaggcagctctgcgccacgacaaccggactgacgcttctgctttgtttgaaaaggggatcaactgggacaacacccaaaaggccctggatatctgcgccttgatcttgcgggcaaatgccgacgccactgtcttagctggtgaaatcaaggccagcgacctggacaaggaagcagttgttattacgaccactgcttcccggaccaacaagatcctgggcactgacctatccatggacgaaatcgtcaagatcctgggcaagctgaacttcccggttgcagtaaatggcgacgaatacgcggtaactgtgccaaaccgccgctgggacatcttcattgactccgacatctttgaagaaatcggccggatctacggctacgacaacatcaagtccacccacccggcgaccggtgaacttactggcggctatgcggctgatgaagtcaaggtccgtcacctgcgccaattgctggaagggcaggggctcagtgaaacgatcaactactccctaacttctgaagaactggctacgacttttgtcaaaaaggccctggccccagtcaaggtcaactggccgctgaactcagccagaaccaccatgcggcaaaacttgatctgcggcctgctcgacacggttgcttacaacttcgcccgcaagcaaactgaactccagctctttgaaaacggccgcgtctacgacatggaaggcggcgactaccacgaacatgaacacctggcagccgcttacgtcggcttagctggtgaaagcaactggcagcacaaggacgaagtcgttgacttctactacgtcaaggggcaactggaagacgtatttgaaatgattggggtcaaggacgtggaataccgggccgaagcaatcaaggggatgcacccgaccagaacggctggcatctacgtaaatgatgaatatattggtctgatcggccaaatttccccagttttgaccatgactgacaagaacttcgccggcaaggaaatctacgtttacgaactgaacctggatgccctgctgccgctgatggctaagggggtcaagtccaagccggctccgaagtacccggccgtgcagcgggacctgtcaattttggttgacgaagatgtcactaatgcccaagttgaaagctgcatcaaggaaaacgccggcaagtacctggttagcgttgaagtcatcgacgtctaccaaggggcccacctggctgccggcaagaagagcctggcttatcgcctgaccttcttgaatgaggcagaaaccttgactgacgcggttgtcactaaggcaactgacaatgtgcaagccgctttggaagaaaaattagaggcaaacattcgttaatggttgactttcccggaattaaattctaatatttaacattgcataatgtgttaaataaaggagaatcaaaatgcctgaaaaaacctatgaaatgactgccgaaggcaagaagcagctggaagaagaactgcagaccctgaagtttgtcaagcggccgcaaatcgttgaacgtttgaagattgcccgttcatacggggacttgtctgaaaactcagaatacgacgcagctaaagatgagcaaatgcggctggaagaaagaatcgatgccgtcagcgaacaattgaagtatgctgtcattgtcgacactgctgccgttgaccccgacgaagtaagtattggcaagaccgttacggttactgaagtcggcgaagacgaaccggaaacttacgaaatcgtggggagcagccagtctgacccattccacggcaaggtttccaacgaatctccgatcggcaaggccctgcttggccacaagaagggtgaaacggtcaagatcaacgttgactcagccaacgtcagctacgatgtcgtaatcaacgacgttaagacgaccgactaaaaaggcgctgtccacccggacagcacctttttttgctctctattttactgtttaaattctctgtttctttttcaaaagcaggtagacagccaaagttaccaagctgatcaagctgccggcaatcaggctgaccggcaaatagaccagggtcagctggtgcttgcccccctttaagttgaaggccaggaggctggcagcgtatttgctggtcttgacccgtttgccgttgtcatagaccagccagttcttggaatatggaatagtcgtgatccagagcttctttttgctcttaaaagtctggctggaaatttgcaagccagtctgctttaacttaagttccggcgctttcagctgcttgatcccggccttgaaggcggaattgttaaagtgccagaagataatgccagttaagtccagggtcgaattggtcaagttaaaagtgaccttgatcttggactttttattttggctggcgatgttgaccaggcggatctgcccgtcccggctctcgtagttgtagaagatctcgttgacgcttaagctggcggtcttgaagtcaaagccgtccgggagctgcaggtaataggagtcattgctctttggcgtcaagctgaaggtgacggaagccggcttggcagagttggcttttttaaagaccaggggattggactggttcactttcaagttggtcagcttgatctcgcttttgaccttcttgaaaagctggccggacaagcccaggctttcccagagcttttgctggttgtgaaccgggtcattatccaggaacttgacctttttctgcccgctctggctggcaaaaatcaaaggcagggcctgcttgttttttaaaatgctgatctgcttgaactgctttattggataatagctgttcaaatcagcccggtggttcaagttgtcataaggcatccgctgggcggctgaaacgccgtcataagaataattcggctccaggtagtacttgactcccaggaaggcgtcagtcaaaagcgtcccgccctggttggtgtaagagttgctgttgtggacgtagcctaagcggctgagcaggttggaagtgctggagttgctgatggagttaaaggtcgtgattccgtaatagttgccagtgaaggggtcatcgtctgaccggctgaagctcttctccgtccggtagaggctggagtcggtcttggccaggtagctggtcgcctggttgacgttggcttcaaacttggcatagttcttgttttcctggtaggaaatcgcgtttaaggaaaaaatcaagttgaccgtgacttccgaaacgaccaaaagtagggcgtagtggcctgctaaatagtgctggccgtaaataaagagaatgaagagcaggctggccaaaaggaagaggccggtcgcgacttgtccgtcttgccggataaattccagcttgtccgggttgatagccaggtaaatggagacgctggcccccaaaagggcggccaggatcttctgctggagattgaagccgggttccctgtccatgttttccagggccaggttcaaggcatagaaggagaccaggaagctgaaccgggccgggtaccagaccgggaactggcccaagtgccagatcaaaaccaggggggtaaaggacaaagacaagaccaggaaggccaaaagcagaccccgggccagtttttctcgcttgctgaactgggaattaaagataaagagcagggccaagagggcaaagcaggagctgatgaagatgttgggcaggccgtccgacatttcatggaagctgtaggccccgtcgataaatttagcgattagctggtagggcggaaactggaagttcagcttccagctgatgtcggcatcagttttcccagctaaaagttccagaaaagtcggccagaggttgaccccggccaggcagctgccaaagaagctgcccttgaagtaggcccaaaaacgcttctttggctccctgttcgtggccaggcccactagcaaatagagcaggccaaagagcagggtcatgtagccggtatagaagttggtcagccagagcaggaaggtaattaggaccaggtgatttttctccccggataaaaggcggtcaatagcttcctgcagccagggtaaaaggaccaggctgtccagccacatcaagttcaaattgttggcaaccacaaagccgcagagggcaaaggccaagctggcggccagaacgtattccttagccagctggtacttctttccccagaccaggtaggtggacaggccgatagctccgatcttgcaggagatgaccaaaaggatcccctggggcaggaacttctgcgggaaaaagagcaagagcaggttaaagggactgagcaggtagtagctgtccgtccccagcatggagccgcccaggccgctggcaaaactgtaaatcaacttgcttgggtccttaaagagattttgctggtagtaggccagaaagtcaacgtactgctggcccaggtcgacggtcagaatattgcccttcttgctgaggaagtaaccggcgaaaatcaaggccggcagggcgaaggccaggcaggcataaagctgcttaaggccgaatttttgaaaaaaacgttttattttggacatgtacattaagaattggctaactcctcttctgaatgatagaattgcgcaggtctttttgctaaaattacttgttagtaaggatggttttatcatgagttattttagaaagaatagcggaactggcaacagtagtcaaaccgcaaacacccctctcagaatgaagattctggtcggggtcatcgtaattttgttcgcggccttaatcggccaattagcatacttgcagctcttctacggttcgcgcttttccgcggaggttaacgccaccgacgaaaacaccatgaccaagtctgtcccccggggagtcatgtacgactcccagggccgggtcctggtcggcaacaaggctgagaacgcgattacttacatgcgcagcctgtcaacgacttccaaagagatgtacaaggttgctaatacccttagtaattatataaaaattaccgacgaaaagccgacaaaaagacaaattgccgattattacctggctgacagcagccgggccaagaaagtcctggctgccttgcccaagtcccagaagaagtccagcctgtcgacttcagaaatcaacgacaatgaagtggcctacgtcgaaaacacccttaagccgtctttaaccagccaggaaaagacggccgccctcttgtataacatgatgtcaggggccacaaccttgtcgacgatcaacttaaagagcagcggcctcagcaacaaggaaatcgcccaggtcggcgagcacctgtcttccatgccgggggtcgggatcgggactgactggaaccgctactacccgaacgggtcttcaatcaagagtatcatcgggtcagtttccacgaccaagactggtttgccgagcgacaacctgcaatactacctggtcaatggctattccagaaacgaccgggtcgggatttcctacctggaaaaggaatacgaggccctcttgaaggggaccaaagccagctacaaggtcaccagcaactccagcaacgaaatcaccaagaccaagcaggtttacaagggccagtccggggccagcctgaaattgacgattgacgccaagtaccaagcagccgtaaccaaggccctcaagcagcagtttaactctgccttgagggccggggcggccagcctgtccagcggggcttacgcgatcgccatgaacccgaataccggggcgatcctggctatgtccgggatcagccatgacccatcaacgggcaagatcacggacaacgccctgggcaacatcaaccagtccttcgttatggggtctgttgtcaagggggcccaggtggccgggggcttgatcaataaggtcatcaccccaaccaacaacaccctgccggatacggccatctacctgcctggtactccggtcaagaagtctgtttacccgaccgggactttcagctccttgacggcggccagcgccctggaagtatcttccaacatctacatgatgcagttgaccctgcgctgggtgaaggccagctatgtggccaagcagtacattcacatgccggagacggcctttgagaccttgagaaacaactttgccatgtttggtttggggcaaaagaccgggatcgacctgccaggtgaaagctccggtatccaaggggcatcaactgactccaacgggatcatcctgtccgggtcagtcctcgacgaatcctacgggaactatgatgcttataccccaatccaactggctcagtacatttcaacgattgccaacgggggctaccggatgcagccatacgttgtccagtctatcggcagaaccagcagcgacggcaagcacttctatacttactataacaagaagccgactgtccagttcaagatcccttggacagcggatgagatggctgtcatcaagcaggggctctaccaggtcgttcacgggtccaacgcttgggggacagcgcatgccttgaagaatgtcaagccgtcgatctccgctaagaccggtacggcccagacattctactacaacactaagaccaagaagtcgactgataaggaactgattaacgaaaccatggtcggctgggcttcgtccaaccacccgcagattgccttcgcggttgtttttgtcggcatcgatccgaataaggaaggcaactacaacaaggacatggccaagtcgatggtgacgacttactacaagatgtacaagggaaagttttcaagcacaaattaatagttaatttggcaagataacttgctctttgcccttggaaatgttatgattgtacagtcagatattaattgtaggtggtgaaaataatggcagacaacatcattttagaatgcaccgaatgtggcgacagaagttacttatctaagaagaacaagcgtaagcatccggaacgtttgaccttgaagaagtattgcccagttgaaagacaggtaactcttcaccgcgagactaagtaataaaagacagcaggtcgaaaggcctgctttttttatcttgcaggaagtgagggcgtgactgctttgatggacaagaagactttccgctcctggcaaaggcagcggctggcggatttcgccaagactccggctaaaaaaaggcaagaccaggaattgacttccctggccctgcagcatcccctggtccaggaggcggaaaaaattggcctgaccctacccatgccgctggaagtggacataaatggcttgattaaagagctgcggggagagggtaaggagctctatctggctaagtgccatcccggctggcagctggactttttaaaatgggacgaaggcgctcccttaatgcagaccaagttcggggtctgggagctggcggaagaaaaagaagctgataacgccttggacctgctttttgttcccggcctagccttcagtccggcgggcaagagccggattggttttggcgggggctactacgaccgctttttggcccaaaattccgtccagaccctggccctggtcaactcagccatgtactttaagactccggtatggccaatggaagaccatgaccaggccatggatgatttgattattgtaaaggaggccggtgatgaataatctgcggcgtaattatatgacaaccgcgctggttgtggtcctctttgccgttttcctggtggaaacctttatgggtggctctgagagcacttctgttttgctgaaaatgggggctatgttcaacccggccgtggttatggagggacagtggtggcgcctgtttaccgcccagttcctccatatcgggatcatgcacatcgcttccaacgcgattatgatctactatatcggccagtacgctgagccggttttcggccactggcgctttttgctgatctacctgctgtcaggggtgggcggcagtcttttaaccttggcctttggcaatgaccaggccatcagtgccggggcctcaactgccctttttggcctctttggggccatgacctgcgccggctttaaggataaagacaatacccttttgtccttcctgggccggcaggctttggccttagcggtcatcaacctggtcctggacgtcttcatgcctgacgtggatatactgggccacttgggcggtttgatcaccggggccttgctggcggtaatcctgggtgacgcgacctataaaggctacggcaagggcggccggctattggccgcggctggcttgattgtctatgtggttttgattttgcgtttaggaatggcagtgacggtataatgactgttttgaaaaatctttacgatgtccagcagcttttgaaaaaatacggcatcctggtccacttgggcaagcggaagtgggacatcgaattaatggcgattgaattagacaatttgtataaggcaggcctcttagagaaaaaaatctatttaaacgcgaaactggtcttaaagcatgagcacgaatacgaagaacggcttgagcgggaaaaaaggctggactagctagccccaggctgaatttagcgttattatgagataagacttgcaagaaggagcttttttacatgaccaattttttaatcgttcttgacgtcatcttgggcgtcatcctgctgggctttctgggcttctgggcctacaaccggatccaggccaagcgcctgggcggggagctgaccaacgaagaattcaaggccgggatgcggaaggcgcagatcatcgacgtccgcgaagccaatgagttcaagcatgaacatattgatggggcaagaaacatcccatataccatgttcaagtaccaatacaccgaactgcggccagacctgccggtctacctctactcggactctttgaccatgaccatgcgctgcgccagcatcctgcgcaagcacaattttgccaaggtcttttacctcaaggacggcttctcccaatgggacggccgcaagaaggcagccaagaactaagctgaaagcttgctgagaaaatttctcaagcaggcttttttggtttatgatgatagaagagaaaattgcaggaggattttatgcagaaagtagtggccatagtcgggccgaccgccgtgggcaagaccagcctggctatcgagatcgccaagaaactggacggggagatcgtctccggggactccatgcagatctacaaagaagtatccattggcacggccaaggccagccgggaagagcaggcagaagtcaagcactacctggtggatgcccactcggtctttgaggatttttccgtaaaaaatttcgttgatgaggcccggtccgccatcggagagatcgcgggcaaggacaggctgccgattatcgcaggcgggactggcttttacgtcaatgcacttttaaatgacatgcagctgggggacaaggaagaagaagcagccagcgtggacccggaatgggaagactttttagcagctaacggcccccaggccttgtgggaggaattaaacaagaaagacccggaagctgctaagaagatcccggtggccaacagccgaagaagccttagggccctcagcgtgatcagccggacgggcgggcttttttccaagcagcaggcagaaattaagccccgctatgactacttgatcatcggcttaaacagtgaccgggaggccatctaccagcggatcaaccagagagtggacttgatgatggaggccgggctgttagaagaggcccgctttgtctacgagcaccggacaggcgagcaccaggtcctgcaggctatcggctataaggaattttttccttattttgcaggagaggccagcttggaagcctgcgtgacggcccttaagacggcctcaaggcggtatgccaagcggcagctgacttactttaggaataaattgccggttgagtggtatgatcccttgacggatcccaactgcgctaaacggattgctgtcagaatagaagaatggatgaagaaagaaaaatgagaaaattaccagaagaattaaaggcaatcctagctgaagttgaccagaaaattgccccccgcctgcgggaaattgacgaccaggtggtctataaccagggaaaggtcctcaaggcctttgtcgaccaccaggtggcggaagctgacctcaaggggaccaacggctacggggacgatgacatcggccgagaaaagctggaagccatctatgcccaggttttccagactgaagacgccctggtccggccccagttcgtctccggtacccacaccctggccgtggcgttagacggcaaccttttgccaggtgaaactttgacctacctgaccgggatgccttatgacaccatgcagcaggtgatcggcctggccccgaagaagcgggggacattgatccagaaggggatcaacttctcctacgtgcctttaaacgaagaaggcggggttgactacgaagaagcggaaaaggtcctcaagcgcgaccagccccatatcgtggtcatccagcggtctaggggctatgacacccggcagagctacacggttgaccagatcaaggaaatgactgcttttgttaaaaaggtcagcccagaaagcttggtcttcgtcgacaactgctatggggaattttctgaaaagcatgagccgactgaatacggggtcgacttcatggccggctccttgatcaagaacgccggcggcgggatcgcccagactggcggctacatcgtcggcaaagaggaactggttgaaaacgcggctatccgcttgacggctccggggatcggcaaggaagaaggggccaccttgaccaacatgcacgagttttatgaaggcttcttcctggctccgcacacaaccggtgaagccatcaaggggatgatcttctcagcagctcttttggaaaaaatgggctgtgaagtcacgccaaaatggcatgaaccgcggaccgacctcattcagacgatcatcttcaatgatccggaaaagatgatcaattttactaaagaagtgcagaaaaattcgccaattgactccttcgttgagccaattccaagcgacatgccaggttacgaagataaggttattatggccgccggcaatttcgtctctggttcaaccatggaattctcagcagatggcccggtccggccgccttacgccctctacatgcaaggtggtctaacttatgctcacgatagaatagcagttacaaatgccgtaaatcatttgttttttaaggaaaatggctaaaagtccttttttattaaaaaagtctttagaccaatttgacctcacgcggttagagtggtatctttaaagcatcgattagcacagagccaattgattagttgatcgtaaatttattcttgatttttaaaggtgagaacatgagtaaggtaattactgaagaagaaatccgcaaagatgtagaagagaagaatgttcgctttttgcgtttggccttcactgacattaacggtacgctgaagaacttggaagttcctgtcagccaattggacgacgtcttgggcaaccaaacccgttttgacggttcatcaatcgacggcttcgttcgtctggaagaaagtgacatgattctgtacccagacctggcaacttggttagttttgccatggacgactgttgaagaaggcacgatcggccgcctggtctgctcagttcacaacgtagacggcactccatttgaaggtgacccacgcaacaacttgaagaaggttattgcggaaatggaagaaatgggcttctccgactttgaaatcggctttgaagctgaattcttcctcttcaaggaaggcaagaacggggaagaaaccaccaaggtttccgaccacagctcatacttcgacatggcttctgaagacgaaggcgccaagtgccgccgggaaatcgtggaaactttggaaaagctgggcttccgcgtagaagctgcccaccatgaagtcggcgatggccagcaggaaatcgacttccgcttcgacaatgccttggcaactgctgacaagttgcaaaccttcaagatggttgtcaagactatcgcccgcaagtaccacctgcacgcaagcttcatggctaagccagttgaaggtttggccggcaacgggatgcacaccaacatgtccctcctcaaggacggcaagaacgccttctacgacaaggatggccaataccacctgtcaactactgccttgaccttcttgaacgggattttggaacacgcccgcgctattacctgcgtggctaacccaacggtcaactcctacaagcggctgatcccaggctttgaagccccagtttacatctcatgggctagccggaaccggtcaccaatggtccggattcctaacgccaacgaagtcggcactcgtttggaaatgcggtcaactgacccaactgctaacccatacctgcttttgtcagcctgcttgaaggctggtttgaccgggatcaaggaaggcaagctgccaatggcacctgtaacttccaacctgtttgaaatgactgatgacgaacgcaaggaactgggcatcaagccattgccatcaaccctgcacaatgctatcaaggccttcaaggaagacgaagtcgtcaagtctgccttcagcgaacacatcgttgacagcttcctggaaatgaaggaaactgaatgggctctgtacacccaatcagtttcagaatgggaagtaaagcgctatttcaactactaaagttcagaatacgatatttatcattgactaatcagaaagtctgccttttgggcagactttttttcttatgaagaaatcaggcttaattatcttaagcaagcagtcgcttgctagcgctttactgctggataatcgaaaaaaggcaaagagatttttgccagccttagcgaagaagggcgaaatatggtaaaatctaatttgtttttaagcaaaaaacattgattgaattgattgagactaaagaaggttttacagtgagcagcaagagcgcaagtatttccccggccaaagcggggcggatggagcaggaaaagggcaagtcgatttattccaaagacgtcatcttggtcatgaccgcctccttcctgtttttgttcgggaccatgttcaacaacccattgatcaacggctatgctgaaagcctgggggccagcagcattttatccggggtgatcgtggggattatgagcttcgcggccatgtttctccggccaatcgccggcaacttgactgacaagttctccaagtaccagctgtcttttatcggcggggtgctgatccttatcgggatcgtgggctatattgtttcgcctaacggggagctcttgctcttgtttagaattatcaacgggaccggcttcgttctttgcaccgtctgcatgaccacttggatcgccttcctggttcctcgccagcacgtcggggcggcaatgggcttgtacgggctgatgaacgccttggccatgtccattgccccggcgatctccatcaacctctacaaagtgattggctaccggaaaaccatgatgctgccagccgcggcaactttgatcatgatcatcatcatccagttcgtcggcaaccgggctgttcctagtcctcggcaaaaagaaaagaagcagttcaagatgatctccgtcaacgctttgccagtagcacttttgacgacctgtttcgggattccatacttcgtcacccaggccgacatcgtgacttacgtggccaagatgcacatgccagtggcggtagggagctacttcttcatctacgccatcgtcttgctcttgatccggaccttcctcaagaactactttgacacggtccgcttcggggtctggttctggctgagcctggtggctacggccatttacctggtccttttggcctacatgagcagcaactggatgatggccctgggggcggccgggatggcggttggctatggcttgatctactccgtcctgcagtcaacggccctgcttttgtcaccggctaatgaacagggcctgggcagctccaccttttacctgggcctggacatcgccatggcctttgggccgatgctggccgggattgtggccaaggctctgccgggccgctggttctacctggtccagctgatcgtggtacctttggccttgatcgtttacctaatttggcgcaagcacttgaacggggcaattgataatcactaaaatacaaaaattaaaccagccgccaggctggtttttcttttgcctcttaattggctataattgatgatagcgtaaattttttggaaggaagaaaagaataatggaaatcgagaaattgaagacagattacatcaattggctggcggggcagacagtttttaagccctggtcagacacggttttccaggtagaaaacgaactggttgatgcttacggccgcaagccttttatcctggtcgaaaaaagcggggacaagtacacggtaactgatgacggctacctcatgtacaagtacaacccattggaagaaaacgaggatttgaacgagcacgcggccgagatgattatggacgctggttttgactttgatgaagaccatgccgttattgagcagacagtcagtgaagaaagcttgcctggtgccatcgatgccttgatgcagctggaaatcatgatttcctttattgcttaaaaagtagggaggaagaatataaaagaaaaaatagatattctatgagaaggtaagaagccttgcacgcttgtgcagggcttttttataaaaataaaggtctgactccgaaatatggaatcagacctttgtagtttaagttgctgtttgttagttgtttatatcttaatttgcctactcaagcaatttggcttccttaagcaattcttccagccaagtgccctggatcttcttcatggcccccttgaccgcgatctttggcagcggcaggtccatctggtcgattggcttcttgtcgtttaagtagtaggttgccttcaaaagctcccggatgtcgtagactgagtcaaagacttccggtaccccgcggtcaacgttcagcagggtgtagacagcttccatagcggtccggactgagtattcagtggtgaagacagtgtctctggtcggagattcagcgaagttgccgataaaggccaggttgactgaaccagctggcacgactgccggccggtcgcccttcttccgcatttggaagtaagcagtgatgtaaggcatgtaaaccggaacagtgttgacatagtcatcgccggcatacttcttgatcaaatcgtctggcacgcccaggtggtagaggagttcttccgtgatttcttcacccgtgcagtcaacgacccgcttcttgatgtagttgcctggcgtgtctgagtaaagggcatagatccagacaacggtttcgttttccttttggtccttgaagtgtggctgacggtggatggtgaaggagagcatccagttggagtcagttacggtgatgatcccgcccgtgttgacccgatgctggtggatgtcccgcttggtcaagcgttcaaagtatggttccagagtagcatccttcatggtcatggtcgcggaaacgaaccaggctctttccgggatgttttcgcagaagacttccgggtggccaaaggcctcgtcttgttcagccaggttctgccacaagtgccaagacccgcccagcttgtgggtgattggcgctggagtgtggtgggtgccgtaagttgagctttcaacgattgacccgttggtcacgtataccaggtcgtccggggtcaggtcgatttcctggtgttccccgtctctggtgaggatcagcttcttggcaaccttttcgccgttgctggtatcaactacgacattttcaacctgggtgttgtagcagatgtcaacatcgtggctttccaggtaggccaaaaggggcttggtcattgattcatactggttgtacttgttgaacttcaaggctgacaggtccggcaagccgtcgatgtggtggatgaaacgcatcgcgtagcggcgcatttcaatgactgagtgccacttttcaaaggcaaacatggttgcccagtaagcccagaagttggtttcaaagaattcatcagagaagaaatcttcaattgagatcccttccagcttgtcttccggtgtcatgatcagcttgacgatttccctggcgcacttgcccaggccatactggccgtcagttggcacccggtcgccccggtggtggatcaggcggcagttggatgagttagggtcatccttgtccagccaggcatactcgtccaggtaggaagcgccaggaatttccaaagatggaattgaccggtacatgtcccaaaggcattcaaagtggttttccatttcccggccgccccggatgatatagccgtattccggccgcttggtcccgtccagagaacccccggccagggcttcttcttccagcaagtgaatcttcttgccattcatgtggccgtcgcggatcatgaagacgcaggcagctaagccggccaggccgcccccgatgacataagcgctcttcttgtcagcgtcttttggctttctagcgtcagtaaatgcttcgtaattaccgtttgaataatacatctcattcacctcatattaacttgctaactgttttctgattatttttcttttttcaccttgcattctagcatttatcaaaagcgctttcaaataaagtttttcttaaattaatgggtacaggtatagaaaatggtgattggataagaaaaataaagttgaggcgtggagagctgaaaaagcgttcaagttaccggggaaatttgttatcatggaatgatgcagattaaggattggagaggatattgaagatgaagaggttgaaaagcctggcttttgtttacgccagcatatttagtttactgattggtttaggagcagggatttttttgacaatttccagtgaattaatttcccttttctggtcaaagcggaccttgacccatccaggtcttctgctgctccagtgcctcttgtccagctacctgctctggtctggggccttcaccatgtgggacctggttgaccaggcggccaagctgggccctgatcagcttagcctttggcaagtgcctcttgaccaactttggctttggcctgggctggagaggggggaccatcttcccggcgatcttctgctcagttgccttggggatgtgtcttgaccgcggccagcgtgagcgtgatcgtgggcaagccgaaactggtggccctgttgctggtctttttgtttagccttcgcctggctccggtgattatcttggtttgtcttttgtgtgagaaaattccccagggtaagccactatttccccggaaataattgccttgcaagcaaggcttgcttgtttacagaccaagattctcctaagctgaaggagaaagctgaacagaaagaggacgactgatggaatttagtgaacagatcaaaaaactccgccgggaccagggcttgacccaggaagaattggcaggcaaaatccatgtgacccggcaggcggtatccaattcggagaatgagaagaacctgccagacctggagaccttgatcgtcatcagccggacttttcagctttctttagaccaactgattttaggaggaactgaaatgactgacaaattaatcaatgacgcaagtgcaaccaagcgggccaagttcaacttctggtcggccttgatcggcgggggcctgatggttatcgtgcttcatcatcaaggccaactcggttgaatacatagacaagcagggctttttacacgagaacttctatcttttgcctttgggctatctcttcttactttctggtttgcttgtgattttggtcagcggggtcagctatttgtgcaagttgcataagctgagaaaaagtcaaaattaattttgcccaaaaggattgacagggcctggtaaaagttttaagattgtggcaattagattaatgattgctgagaaaagatgagtagctgctaggagtcttctacagagaaccgggattgctgagagccggcgagggtaaaggcagtgaagatggtcttggagcataaacaagtggtgagcttaggcaagccgtttgcgggtagcgcccgatacagcgctaggctttcattaggaagcttttgagggtttggccgtgaggccagactgaagaagagtggtaacacgcaaggcgcgtctcttgactgactggttcagttgggggcgcgcctttttagtgcccggcaatcatatcttagtgttttctattgttttggtatctgctttgatacttgattttatttgattttaatttttgccagaggggaattacttatgactaaattatccgcaccataccattacgacattgttggctccttcttgcggccgcaggaattgaaggaggcccgggccaagttcagggccggggaaatcagccaggaagaactgaccaaggcagaagacaagtggatcagcgacctggttgaaaaggaaaaggcagttggcttgaaagccgtgactgatggtgaattccgccgcagctggtggcacctggacttcttgtggggccttaaaggggtaatcaagtacgactaccagcaaagctataagttccatggggccaagacccggactgacaatgctgaattgggcggcaaggtagcctacaacccggaccatccattctttgaccacttccttttcacccaaaaggcggccggggacgcggtagccaagcagactattccttcaccaaccatgctcttcagagataaccggtctgacaactggccagaattctacgctagctgggaagactacctggctgacttaggcaaggcctacaacgaaaccatcaagcacttttacgatctcggctgccgctacctgcaaatcgacgacaccacctgggcctttttgatcagcaagctcaatgaaagccaggacaatccagaagaacatgctaagtacgtccacttggctgaaagcgcggtaacggttatcaacgctgctttggaaggcctgccggaagacttgacggtaacgacccacatctgccggggcaacttcaagtccaccttcctcttctccggcggctatgaaccggttgcgccttacctggcccagctgaactacgatggctttttcctggaatacgactcagacagatccggtgacctggcgccaatcaagcagatctggaacggccgggaaaatgtcaagctcgtcttgggtctggtaacttccaagtttggccaattggaagacaaggacgcggtcatcgcccgcttaaaggaagccagcggctatgtgcctttggcaaacctctgcctcagtccgcaatgcggctttgcgtcaactgaagaaggcaacaccttgactgaagaagaggaatggaacaagctgaagttcatcaaggaagtcgctgacgaagtttggggcgaataaacaaaaaaatcctgtgctgatttgcacaggatttatttttgtctaatttaaaacttttcgccgacttccgcagattcgatatctggcagaggctggccgtcttggtcaaagtagctgtcgatgtcccggcaccaaatgatggcgatggcgtttttcccgcagtgaacgccaacaacggggccaatgatggaccggtcaaacttgtcctttgggaaagcagcctggtaatctttaatccattcgtcgccccgatcggggttagccgcgtcaaaaatcgtggcctggattgggtagtccttgttttccgtcaattcgcggaagtcgttttggacatgcttgtaggcccgcttatattggcgttccttggcaatggcggagatgtggccagtcttttgcacgtccatggccaggattggcgtaatgtggagtaaggtgccgataaagctggccgcgtttgacaggcggccggtccgcttgaggtggcccaggttgtcgaccaagaaacggacgccgatcgtcttgcgcaggtcttccaggtccttcatgatgaggtcgacgccggctccggcattaaccaggcgggcagccaaaatggcgcagtcagctaggccggcacaggtagtacggcagtcaaaaggatggatcttgatccggtcttcttcagccgcgtagttgaccaggttgttgtaggagctggagatcccgctggacaaaggcaggatgattacgtcggtgtagccttcttccacgtagcggtcgacgaattccatgatctgacccaaagatggctgggaagtggtcggcagagtctggctagtagagattttttcataaaattcttcatagctgatgtcgaccaggtcgtagtaggtcttcccgtcccaaatcaagggaatcggcaccacgtcgatatgatacttctcttgttgctccttgctcaggtaagcagaactgtcggttaaaacagcaattttcatattttttcctccgagcattattattctaaaaaattttatcctaatcatattttagtgaaaaatggacaaatgagcaagatggggagaaaatgcttgccgccggataaaagcaggattatagttaagatagaataatattttgcaaaaaactacaaaaacttcttgactatatgcgcgaatagaggcgagcggtatggaagacattttctttacggtaacgggctgcaaccactactttgggacggaagctttgagtgaaggtaaccttgtacaaggaacctgacaacaagtatgacaaggaagccattagggtggaagcccgggctttaggcaagatcggctacatggccaacagcccgtatactgtcttgggcgaaagccgcagcgccggccgcctgtacgacttgatagacgacggggcgacaggccgggtgctctacgtcctgccgcaagggctggtctgcgagctggaagagactggttttgaaaaagttaaaaagatttataaaaaacacaggcattattaatttgccgtgaaaaatcctgcttgagacagcaatgttgctttcaagcaggattttgcttttttaaagaaaatatatttcaacaaatcccgaacaatagagtaactatgcttggcttgtgttaatggcattaaagtttttagcaaaaatccacctttaaaaaagtgaaaatgctgctagaatagtaacaattattttcttacaggggtaaaagacactatgaaaaaactgattgacctccacctgcacttagatggctccctaccttaccaaaccgtccgtgaactgctggctaaagaggggagaagcctgccggaagctgacttgcgaaaaagactttcagtcagcccggactgccggaacctggacgaatacctggacaagttcgacttccccttgtccttgatgcagacagcagagaacttgcgtctgattgtcagagaactcttagcagagctgcgtggacaaggcctggtttacgcggaaattcgctttgccccgcagaagcacacggaaactttgacccaggcagaagctgtccaggcggttctcgatggcagagacgatttttacgcctggcaaaaagggcaggaaggagacgacctgcacgccaacttcctcctttgcttgatgcggctagttggtcaggatgaagcaaactgggaaactttaagagtggctaaagagtttaaagatcagggagtagctggcctggacctggcgggcccggaaaacgaagaagtggccaaccgcaagtacgcgccctttttccagcaggcaagagaatgggggattccatacaccatccatgccggtgaagccatggggccagagtcgatgagagaggccctggccttagggaccaagcggatcggccacggcatccgctgccaggaagacccaagtctggttaaagaattggctgaagacgggattactcttgaatgctgcgccagctcaaacctgaacaccaaggtttttgaccagatcgccgaataccccctctgctccatgctggggcaaaatctgcgggtaaccttgaataccgacaacatgacggtctcagcgaccaacctgccccgcgaataccagctcatggaagagcagagtttgactaagtctgaagaaaagcagctctacttaaactcggttagagccgcttttgccagcccggaggaaaaagaccgccttttggccttgctggaaaaataagcctaaagattttagaacgaagaaaactgcatccctggggatgcagttttttgattagttgttgatgttaagctgtaagctgtaaagtgttaagtactaaattagattgatttggttgttttgtttattgccttttattgtatttttttacttttaattctgtctattatctatcttattggtacagagccgttgacaggtagcgttccccgttgtccggcgctacagtgactaccttcttgccggcacccagcttcttggccagttcgatggccccgtggatgttggccccagctgagatccctggcaaaaagccttccaggcgggcaacttctctggctgttgcaaaggcatcatcgctggaaacttcgacaatcccgtcgtagatagactggtctaaagtctttggaatgaagccagcagagatcccctggatcttatgcgggcccttcttgccttccttcaaaagcggggattccgccggttccagggcgtagaccttgacgtcgccggccttcttcaaggccgggccaatcccggtcaaagtgccgccagtaccaaccccggctacaaaagcgtctggcaaatcgccggcaaaggcgttgacgatttcctggcccgtggttagttcgtggatttccgggttagccggattttcaaactgcattggcaggaagtagcccttttctttaaccagcttttccgccaaagcgatagaacctggcatcccgtccttgcccggggttaaaagcagttcagccccgtaggcccgcatgatcttctttctttcctcgctcatggtttccggcatggcgatgatcaagtggtagcccttggcgctggcaacagcggccaggccaatcccggtgttgccggaagttggttctacgatggtgtcgccaggcttaagcttgccttctttttctgccttttcaatcatggccagggcaatccggtccttgatcgacccgcccgggttgaagaattccagcttgacgtagacgtcggcagctccttccgggacgacccggtttaacttaacgattggggtgtggccaatagtttccaaaatgttgccgtaaatgcggtcagttgacatagttttttcctcctgaaattattcgctaaaaaattctaaatcttatttgatagtttgcagccagtttttaaaaaagtgctgctggctgctttcccaggtaaactggggcagggacatggcggcttcatccgcgaaataccgctgcggtttcgctagcttccggtcatcacctcctatagcggataattcccgctggtattccttgctaaaagcctgggggccgtactccaggtggctgaagagaaagacctgctggccaggcccagtgaccagagtaaggtggccatctggtgtggccgcgttgatggttaaagctttttcttgctcaatctcgctcctgttcatctcagcgtagcgggcatgcggggcccgaaagcctgtgaccaggccacttaacaggggggcgggagccaggatctcctgggggtagatgccgaaaatcttctccggcaggggatgcttgccgatcccgtagaaatagtagagagccgccatggcgccccaacagacatagagctggggaatgttttttgcctttaagaggtcaaagagcttggtcaattcctcccagtagtcgacttcgctaaagggcaggagctcgatcggggcgccggtgacgatgaagccgtccagcttggcaactgtcttgagatttagcggctcagccggccagttttggggccggggccggtttagatagtggctttgggggtaaaaataagtgatttcagtttccgggctggcttctttgatcacatggctgaaccgtttctgggtgtcaatcttgtcatgcatcaaattgagaatgccgattttcttgctcatcttgtttgtcagtccttttttaaaaaatagcaggtaaatctgagaaaacaaaaagacgcgcgagccaagctctacgcgtcttaaacaatcaaagttatttggatatttgggaattctggtctgctcctagctttccagtccaagccaaatagtggattgcttaagacacaatccacaacaacaagcagtcatgtttacgttgaacaggttcttgttgaacatttggcttacctcctaaattagttacttgaagtataaccgctattttttgctttggcaagaaaaattagaaaaaagttacagaaaactaatttcctttatttttctgctcctgcaggcggaagttctgccagatggctaaaagggtcaccaaagctaggcagctgaacatgataaagtcgtatctcccgccctggtagcttctttggcccaaagtcccttgccccgttttctgggccagggagatcaggggcgtggccagactgacgccgactgaaccggcaaactgctggagcatgttgaaagaggagttaacgtcagccacgtttttccggtcaaccaaagttgaggcgttaaagatggtgttggcaaatctcaagttgaagccggaccggatcacgatatggcagacaacgatcaagaccggggtcagcaagggctgcaggaccaaaagcaggcagttgcccaaaagaaagaggcagccgcccagggtcagcgggaacttgaagccccgcttgtcggccagtttcccggcaaaaggcgagatgacggcccccacgcaggagcctggcaaaaggaccaggccgctgatcaagctgctggtcccgattaaagacagggcatagataatggcaaaaagggccagacccagcaagagcaggtaggcggtagttcccatgacgatgttcactgtcaagagataggcggtagtgatctactggacggttgccaggggctggtggaactctttgactaaaagcgggtaggtgacgttcatggaggtttcattcagaataccgatgaaggtcatcaggcccgcactgaaaatagcgaggttgactttgcttgatttttccataaggacctttctaagaacacaaaaaggctgtcagcggtagctccgcgacagccttttactttgtttgcgataaagttattttagcataaaccgccaatttttgcccaggcattatttccggtagagcaaaagagcagttccggctaagtcaactgtgtagtcttcggtctccagcggccgcttggtcatcccctggtcggttgaatagatgatcaggcccaattttgctccggctggcagggtgtagtaggtcggctgcagttcaaattccaggtcgacgaactggccggcttccagcttgcttggctgcttcatgtcctggtagttctgcaggttcatgtgggccttggtaatcagcttggccttagtggccttgtccgggacgaattcctgcaaggagtctgccccgaagcggtagccaaagggctggtttcctctggcaaaaatctttggcgtagccgtcagccgctgccgggtccccaggtcaaccagggcaacagacagctggccgacagtcttattagctgctacccggacctggacctttggccggccgaccagggtagtcgggtggaggaattcctcgctttcaaagcggaggctggccttggcccattttttctccccgctgataaactggtattcccagtcagtttcactaatgccggccttcttgaattctgtcccgcccaagtcggtgaaggttagctggcctgtcccgttttcaaccgttgacaggtccccgtcagccgttggtgaatagaggctggcctgacccaggtcgttggcccagtcactttctgcgtgccacttgtcagcttccaagttgtcttggatcatgacctttggccattgctcataagccccgttttccacttccaaaagctcgtggacgaaccagagattcatgaggtcggtgaagtcgatggaaaccaggttgttcatattgtagtgcggaccctggtggaggaagaggtgggattccaccggcagctgcttgaccttttgccagatcttgtagacgttcttcggcttgacattccagtcgtttaagccgtgaacggagatccaggagcacttgatgccatcggcgtggtggcggtagtttctggactcccagaaatcagagtactggccggttgcccggtcctgggcggctaaaagttcagcttgctctgcttcataagcctttttagcagtgaaattgcccccgtcccagaggttggactggcagacttcagccagcttgtccatgtcttcgccctggcattcgcttggcgcgataaccaggccgtgttcccggtagtagtcataccaagaggaaatagcggcttcagaaaccaccgtcttcaagcccttgaccccggtcgtcgcgatggcgatctgcaaggtccccaggtaagagcggccagtcatgccgacattgccgctgcaccagctggctttggtttcaaagcggcgggtccggtcagtataagccacccggtccccagtcagccattcaatgacttctttttgggagatggtttcttccggtgacccggtgatccggatcccgtccccgtgccggttgccgatggccccggagaagacagaggcaaagccccgggccaggaggtattcgtttaagccgtaagaagattgcccggttgccagttcagttgccggcacgtcctggccacttggggcagggcttttaactaaaggcttggccacgtacttgggattggtccaagtggtcgcgtcagtcaggttctcgtcgacattgtggttagtcttgacattgtcgatgattccgccaaagtaaggtgaagccgtgtagagggctgggaccttcagctggtcctggctttcaactggccggaagaccgtgaccggcaagaggtcgcccttgccatcgccgtccgtgtccaggtcgctttgcacgtaaacgacctcgcggatgacctggcttgtgtcaaaaactggcagggacttgccgttgaagaacataaacttgccttccccccagaactgggtgaagtagcccttgccggccatgacgtccaagaggatctgcccgtttttgctccgggtgttgagcaggcggtagaaggtaaaaatcaattcttccttgctggtcaagtccttgaaggccggcagggcatgctttttcccgcaagtcaaaggatcagtcaggctgtagtcgtagtttgggtggtagcctaaaagctgcagggcaacattagcgaactggctggccgtgatggcagtcggcgtgtccaaaagaaaggcggccaggtcagtttggtcgtccacggcaaattccgccaatttggcgtctttagcctggcgggtcgtggcttccgccaggacattgccggtcaagacggccaggagctcactgaaggaaagagaagagtggttttccggcaagaagttgatcgccagcagctcttcagttgccttttccggactggtttcaacgtaggcatattgattgtatttcatgctttacctcatctttatatctttacatctatgggatattgtatctttttgctttatccagtttttttagctgttttttaagcaagttctcaagttaatgcaagcaaaccgcttcctttttgtcaagaaaaaatgaccaagaaaaaaagcaactttttttctgaaatgtgtttgacaatttatccctggtctaatatacttaatttgttgcgttggagtataacggttcggtagctcagctggatagagcaacggtcttctaaaccgtgggtcgtgagttcgaatctcacccgaatcatgattgcaaccagagaaatcactgaggcttgcctcggtgatttttttgttatatccgcagaaaatttgccaagccggcaaaagtaaactataatggaataaatattaaacgtttgttcgagcaatcctggccacttggccggggcctttttatttgctcgggatttttaacgcaaggcaggaaatgtaatgacgacggtaattttagcagagaagcccagccaggcccgggcatacgcggccgctttcgcccaaagccagaagggggaagggcaaattaaggtggcggacccgatcttgccggcagacacggtgatcacttatggttttggccatttagtggaaatggccctgccggaagcctatgacgccagctacaagcgctggtctttaaagaagctgccgatttttcccgaccagtacaagtacctggttcctcgggacaagaagaagcagttcaatattgtcgctaatttgctcaagcgggcagatacgatcgtgattgccacggacagtgaccgggaaggggaaaacatcgcctggtccattatgcggcaggcggggatcgatttgaaacagaagcgccttttccgcctctggatcaattcactggaaaaagccgcgatcagggaaggcttccagaacttgcggccaggctgggactactactaccgctataaggaagcccagacccggcagatcagtgactggctggtcgggatgaacggcagtcccttatttaccttgctgttaagaaagcagggggtcaaggggacctattcaatcggccgggtgcagacgccaactttgtacatggtctatgagcgtgaccaggagattgccaattttaagccggagaagtactggctgctcatggccgatttttggcagggaagaaagaaatttaccggccgcctgctgccggaaacgaaatttaagagcccggcagaactggagcagtttttgctggctaaaggggggagtctgggcacgcagactggccgggtggccaaggtggacaaggagcaaaagagccaggccagcccccgcctcttctccttgtccagcctgcagacggaagccaaccgccgctaccatgcttcagccagccaggttttacaggccgtgcagaatttgtatgaaaataagtttttaagctatccgcggacagactgcaattatattacggacaatgagtatgcctacctggcccagaacctggaccgctaccaggggcttttgccaaattctgcagaagtcaaagagcaaatgaagcctttaaaggcggagaagcgctatgtcgactccggcaaggtccaggagcaccacgccatcattatgaccaagaccgtgcccagccaggcacaaatgggcaaaatgtcgaagctggaagggcaggtctatgacctggtcttgcggcgaactttggagatgtttttaaaggcctatgtctatgagaagaccacggctttgattaatgtcggccaattgacttttaaagccagcggcaatgtcagcgtgaacctgggctggaagatcctggaagggccggttaaagatgcccagctgccgcccctggaagtcggccaggaactgacggcgaaattgaaagagcaagaagaagagaccaagcctccggctaagtttacggaagggagcctgatcacggccatgaagacggccggcaagaccctggacgatgaagatgcccaggctattttaaaggatgttgaagggatcgggacggaagctacccgggccagcaccatcgaaattttgaagaagcggggctacatgcaaagccggcaaaacaaattgtcggttaccccggaagggaccatcctctgcaaggcggcggaagctgagccactcttagtcagcgcgcagatgacggcccagtgggaaaaggccttaaagcaagtcggggccaaagagcggagccaggataactttttagggcagatcaagaaattcatttcaaagatgattacagaagtgccaggcaagatccaggttgatcagggcttgcaggaagaagcccggacccggcaagccaaagccgcggcaatcggcccctgcccggtctgcaagcaaggggaaattactgacaagggcaagttttacggctgcagtaattaccggggcggctgccatttcaccttgcccaagaagtttgccggcaagaatatgggcaagcggattgtgaagaccttgatcagcaagggcaagactgacaagctggacggttttgtctctaaaaagagcgggcagcggtattcagccaagctgcagctggaaggggacaagctctctttggtttttgactgatttttgcaaaagcaatatttcttaaaatgagttaacaaatctgttacaaatgaaatagtgcccaaaaactgtggtaaagtatgaaaaggcatttcgtgataaaagtgtaaattatctgggtgctttttgttaataaccgtagatttatgagttttgtatttttagaagtgaagggaagagtttgatgagacgttttgccctgggcatgatgaccagtgcggcactgatggccggcctggccagtcaggtgcaagcaagcagcaaagactatagtaagagcacgaagaccgatcttgtgaccaagatcatgggtaacaagagctaccaggtctattcttcgctcaaactggaagaggtaactaagaaggtcaagacaaagaccaaggaaaagaagaagtacacggtcaagaagaaggtcgccgtcaagaagaatagtaagaagggcaagaccaagtacaagacggttaagcaggtcaagtacaagtgggtgactaagacggcctacaagaacgtgaagaagaaggagtggaagttcggcaagaaattgacggcctcggctgacttcagatacgctcacgttcagtccaagtcctacaaggttaagggtggcaagcgctactactacatctacgttgacggccgaccagttggctacgtgaatgagaaggcttttgccctttcgaaagctaatgtggtttcccaggtcagcctggtcaacaacccgtctgactcagttggctttaatgccgaagacgcgattaactacgtgactgaccagcacggcagtctggttgacaatgattcagttgagatcagctgcaagtctgctaaattgaatatttctgatactggctatgtatccagccgcaaggccgggacggcggttttgaccttcaagtacggcaaggccaaggcgaccagcaagctgacggtacgcggggatgccaaagaagggatcagctcggccgatgtaacgccggtgaaaactgatttgccagagattgagacctggtcagccagcgacggggccagcctgtcctcatcttcaactattacttcaaaagacgcggtttccagctcccacaagtactgggctaccgacatgtccggcaacgctaagggcgcggatattgaaaccgtcttctatcatccggcagttttgagcgcgccaggttcaagcaacctggaggccaaggtgtcaagcgccgttcaagggatcgatttttatgacaatgacctggtgaccagcaaccttgacttaggccaggcagacaaccgggaagcccgggggcacatggtctactacaacatgcggggagtcaagaagtacaactggcagcttatcccaagcaagatgctgagcttcaacacctggctgagctatatcaagaacatcaaggtcagcccatatatgaagctgggccatggccagtcagtcggcagcaccaagaagtacgtttacgttttggccaattggaaccggtccaacaactggtctaactcccaggaactgatccgggttaagaagtccaccatggaaattgacaagatctggaccttcaaggtttggaacgggtcagccaagtatccgcggattttcctcaacgcggacgtgattgacgacaacactttgcttgccctcttccacaatgcttctaagcaccgctatgaatactggaagattaccagaagcggcgacagcttcaaggctaaggaagttggggctacgggcagcgacctcatcagcaattccactgaagtccagggctttgtctgggacagcgcctatgacgtttactacattgccttcaacgactacctctttaagatcggggcgggcttagatggcggaacggaagccggcaagcttttgaactactacaagtttgacactggccgggaatttgaaggcctgggcagctacaagggtgagctctacgtcaacttgaaccatccaacggaaactttgaaagtggatcatattacaaaatagttgagtttaatgattgtgggtataggaagactcaaattaaagaaggggctggccttttccgctgcacttctggcggttgcctgtttgtttgaaactggccagccagttgcagccgcgagtgagaagatggtcactacgaaagaattaaagttggcccatggccagtcccgatcctacaaactcgcccggggcagacggtattactatgtctaagttgacggccgcggggtcggctatgtcagcgagcgggcttttgccagaagcaagatgtctttagttaagagcgtcagcttggttaacaacgagctggataccaacggctttgtgacgactgatgccatcaactacgtgacagacaagcacggcagcgtggttgacgttaattcggtgaagcggtcggccgactggatttctgaaaagacgcctggccggtatgtggtgacttaccgctacggcaaggccagcgggaaggtcgcggtgacggtcagaagcgatgtcaatgaagggatttccaaggctgatgccaagctgggcaagggcggcaatgttggcaagacctggttcccgcatgaattggtttttagaggcaactacaatgcccaggttagctcgcacacttacgtggggactgacaagcatggcaagaagacggctaaattgaccactaagttttatgagccaaattcttttagcctgctggaaggaagccaggagaccaatgtccggggaaatgttcagggtttggatgtgtatggtcaggatatggtcacgaccaacttttatggcgggcttgaatcatccaaggacggagcccgggggcacatagtctgttgggtcaacttcccgctatatctatgagctggccaactggaaccataccaaaaagttgcggtcaaacgagcttttgcagattgacaagaaggacatgcaggtcaagcggatctggacttttgccgtcagcaacggcaagcgggaaaacaatcgctacttcttaaacgcggacgtgattgacgacaacaccatgctggccttgttccacagcaagtccaagcaccgctttgaaatctggaagatcacccggacgggcaacagcttcaaggttaaagaagcagccactactgacggtgacttgatttctaactccagccaggtacagggagggctttacttacaatgttgcccacaagtgctattacattgcttttaacgattacctgtttaagattgatgccaagggtaacttggtcaactactaccacttcaatgccaagcgggaagtagagggcctggcttcttacaagtcaaagatctatatagccatgaacaagcgggcagaagtttttgactcgaatatggcgaaacagcctcaagagtaggctcttaaaaaataaatattcttactgaaatgcactaggcggataactgcctggtgcattttttatctaaaaataataagtgaaagcttattttgcgcgggatgatgataaaggag

SEQ ID NO: 2364 - DNA, 240 bp, Unknown
  gut microbiota DNA sequence
gccaggatattgatcacagtgaaggtatccgctaaagcctgtgaggaaatcccatgcttcggtgccttttcgtgatccatggtgatacaggacaatcggctttttggcatgcttgcctgacaagaaggtccagacgtagtctttggctctttcgctgtctaagactcgatatggcgtctcatctgcgtgaatgacatccagctttagcagctcttttctcaagagctcgtaaaggctgga

SEQ ID NO: 2365 - DNA, 1098 bp, Unknown
  gut microbiota DNA sequence
caatgtcattaagttaaggcatttactttgaacagggagccgttttgagacacttatctatgttagataggtgtcttttctgttttttgggcatgacaaataagcagtcaattgactgtctttttacgaaattcgatagtttaaactaacagaaccttgaaaccgtaaaggtcttggatattttcggccttttcggactggatgatgatacgcttctatttcttcaatcatctgctttggatcatctttcatggacgttgtataatagcggtgaactatgttggccgcctctttaaagtctatctcatgaggccatttcctgtgagaatcagctacccggcaaagggatatgattctgttgaccacgttaaacataatcagttgagagtacaactcgatttcttgaaatgctggttttttcgaatgaaaacatactgcaccgagatcatactttagcttgcgaaatgagctttcaatatcccagcgcagatgatacagttttttcatttcactaagcgggaagtcgttcgagcttagattagtagctagtacttcccacttggtgcttcccgattgtgggtcgttgatcttaagcttaacgattctgcagtggaccggacaaaaactttcaaaatcccagtgcgctgtacggtacttgggtgaatatttgtccttatagcgacgatttggggcattgattttgtgatactccgggtgaagcttcttttgcttggcgctattggtgatgttaaacgtcatctcaagatcacattcttggtcgggaagagcactgatttcccgaatagcacctttatctttagttctgaggcgaacaacatagttgcagtcaggcagtcgattgccatgctcgaaaagattgaaggattcatagccacgatccatcagtacgatatagcggtgttgaagtcttaaggtctgaagcatgtgcacagccgcactgcgttcatccataccctttcgtgattgcaataagcagtctaggtaacaacaatttgcgatatcgtaaaggatattggcatgaatcaagcaagcacctttggtcgttaatttattatcggccgaaggtgtttttcttgt

SEQ ID NO: 2366 - DNA, 209 bp, Unknown
  gut microbiota DNA sequence
aatgacagctcattgggcagcttgtctagaagatagttgatatatttgaattgatccaagccattttgcttggcggtttcgagtatgctcattatgattgccatggacttggcgccggtactactctgtgaaaagagccagttcttgcgtcccatgacgatctctttgattgctcgttctgctctgttgttggatagttcaaggcgacc

SEQ ID NO: 2367 - DNA, 209 bp, Unknown
  gut microbiota DNA sequence
gacctttccgctgaagagagatacgagaagcgtcagtccgaattaaagcctctgctagagaagttttccgactggtgctccaagaaatcaatctccgtgttgccctccggcaagttggggacagccttccagtattgcataaagcacatggacaagttcatgaacgttctaaaagatggtcgccttgaactatccaacaacagagcaga

SEQ ID NO: 2368 - DNA, 544 bp, Unknown
  gut microbiota DNA sequence
gcctacgttcaaagcgaagaatatcaagaattgatggccaataaccgcatctatgagcaggcttcgcacgatctgataaccaacaagaatagactgcacaaagccgttcagctcactttcccagagattgagcacttaatggctaacccaagagggaaaaactactggagtattgttctcagattcccacatccagatatcgtactagaaacaaaagaagccgatatcatcgacttcttaaaaggcttatctggtattgggaaaaagcgcgctaacaacataatgcaaagccttattcgtttggctaaagtcgcatgcccagcggtcaaaaagagcagtgctcatgtccgtggcctcaaaatggctattaacaacattctgagcgctgaagaagagtgccagactgctttacaggagatggctaagctggctcctaagcaggatctagagatcctcacaagcattccaggcattggcgaaaacacagctctaagaatcattagtgagcttggggacatcagacgttttaacaaccctagccaat

SEQ ID NO: 2369 - DNA, 102751 bp, Unknown
  gut microbiota DNA sequence
accggcttgtcccacttgcgaacttggttgcgcagagcctgccagttattaaccgctagcatcgacttgatgccgcagtagcggttcaaaaagaaatgccggcacctgccgtatctttcaaaaaagtcggacattctggcaaattcttcatcgcttatctttttggagtagactctaactgtcttgggctgagtctttttcactgtctgcttgactgaagagctttttgctttcttggatgactcttgcattccgatgcgaactctttccatacagcttagctgagaaaacggtgattatagataaaacatcttctacaagttctgaatttggatcaacgttgtctgtctgattgatgacaactagctccacatcgtttgcctggcagattgtctcaatcatttcaaacccaaaacggacaagcctgtcttggtaatttaccacgactcgctcacactgcttcttgcagatcatgttgatcagctctgtcaggccctttttcttatagttgagaccagatccaacgtcttgaatgatcttaaactgatagccattgacttcgcaatatctggacactacgtccttctgcctttggagatcttctttttgatggccagaagaaacccggcaatagccgatggtcagcagcttcttaggcttagctgctttcatatttccttgcagaacttcatctagcatttctttagtgtagcgacgttgattggaggcagttctaagcggcgtaatcagtccttcagcttcccaattgcggagagttgacttagcaacattaagatattcagctgcttttgatatggacatgtattcgctcattatttcttcctcccaatcttttgataccggcattatatcatgaattggtaagaaatattactatttagcactggatggaattaatactttttaacagtcacaccctttcaagatctgcagcttgcctgcaaatcatattagaatacgggaaaaatagccaaaagtcaataagaatgacgaaaatgatggtaaaataaactacatgaatgattttaagtttagcaaaagagaaaagatttacctcctcctagccctggctgtcttggtcatgctcttcatctcaagctcgatgacctaccatgagcagaagatgaaggctggttttatccatacctacctggactggctggaagatttaatccaccggctcaatatctattacggcggggtctggcacaatgtcaagactgacgggtcagctggcttcacccagttcgtggtccggaaactggcccactttaccagctacttcttctatggcctttttgcctatttgggcttaagaagagttttcgttatcaaatggaccggccccctctttgtctgggccagtgcctttgccttcgcggctatggatgagttccaccagttcctgaccggggaccggacccccagcgtgcatgacgtgatgctggatgccagcggggccttgctggccattgttttggcggtgattttttatcaagttaagcagcgcagggagcgaaaaaaggcggccatttaggggctgaagccgttgaatttctgcccttcctgagttattataaaaaagttgattatattaattacagaaagaaggatcctaaatgtcaggacattcaaaatggcacaatattcaaggccgcaagaatgcgcaagacgctaagagagggaaggttttccaaaagctctcccgtgaaatttatatggctgcaaagagtggtggtcctgacccttcaggtaatccaagcttgcgtttggtcatggacaaggcacgggctgccaacatgccaaaggacaacgtccaacgggccatcaagaaggctgaaggcaactcagacgaacactacgatgaagtaacttacgaaggttacgcaccgggtggtgttgccatcctggttgaagccttgactgacaacaagaaccggactgcctcatccgtacgcgtggccttcacccgcaacggcggcagccttggtgctactgggtcagttgcctacatgttcgaccgcaagggctacattgtaatcgaccggtcaactactgacgcggatgaagaccaaatgctgatggacgtcatggaagccggcggcgacgacctgcaaaccagcgacgacgcttacgaaatctacactgacgccaagagcttcactgctgtccgcgatgctttggaaaaggccggctaccagctggcagtttctgaactgactatggtgccgcaaaacaccactccagttccagcagacaagaaggaacaatttgaaaagctggttgacgctttggaagacgacgatgacgtttccaacgtttacaccgctgcagctgacgaagaagaataattaagctgtaaataaactatacaaaacgcgactttctgaggaaagccgcgtttttttatgctcttttacgattttttggaaaaattttgccttttcagaaaaaaatcgccacttttggcgtactagtaagtggaggaggaaaaaagaaaggaggaccttgtggaagttgcagacaaagcccggcaaatgctggaagaagcagttaggatccgggccagtgacatctttttcctgccgaaaaagggcagctataaacttcgtctgcgggccggggatctggaggaaaggccgtccctgacccgggaggcgggaaatgaactgatcaactggtttaagtaccaagctgaaatggatattgccgaacaccgccgcccccaggtcggaagcatggctgtcaatttggcggggcaggactactggctccgcctctccagcgtgggtgattaccggggggaggactcattggtcatccggatcatctatgctttgggggagagccggtactttttcccggaccagttcagggacctggtggacctttgctggctgcgggggatgatcgtgaccagcgggccgacggggtcgggtaagaccacgaccatgtatgaactggccagaaagctcagccagacgaaaatggtgatgacgattgaagacccggtggaagtgtatgaagagagcttttttcaagcccaggtcaatgccggggccgggatcagctatgccagccttttaaaggcggctcttcgtcaccggccggatgccttgatcatcggtgaaatccgtgatgaagagacggcccatttagcggttgacgcggcattaagcggccacctggttttagccacagtgcatgccaaaagtacctaccaaaccatttcccgcctggagagcctgggggttaaaaataacgagctggttaactgcttgacggcggtttcctatcagcgccttctgccgggcaaaaaggggccagcctgcttgctggacttggccagccgggaggacttactggcggctctgggtcaatccgtcagaggtaatttcgcggcttgggaggaaaacttaagcaggctggtgcagaaaggagagataagcgcggatgtggcaaggcaatataaaggcggctaagttgaagcagagtgagcaggtggagctcttggcctttttggcaaactgtttaaaaaacggtttttccttgaccaagagcttgcagctcttgcccctgctttggcccaagcggaaaaagcagctggcccggctggatgaaaaaatgcggcagggagaagaactgggtcagcttttcgcgggcctgggctttaacaagacgacggtgacccagctggacatggcacttagccaagggcggctggatgaatccctggaccagctggcccttttggggcggatgaagaatgagcaagtcaagaagctggagggggaactggcctacccggtcgttttggcagggatgatgaccttgattttaatcttcatgcagaactttttgtcggtagaatttgctgacagttccgccaaacagggggacctgctcttgctgattttagtttttttactggttttggtcatcatgttagtcgttatcgcggcagcttacatgaagaagcaggactaccagtcttttaaaaagctcctgacctggccggttttcgggccagtggtggccttgtatggccagtatttgatctcttatgacctgggcatacttttggccagcggcttttccctgcagcagatgtgtgactttgcctgccggcaggcgccggggtcactgcaagaagaagtgggccggcgggcgcgagacgcgattctgcggggcaagaaagtggaagaggtcatccagaaggagccatttttgagccaggagctcttgatgctgctgcaggcgggcagtgaacgggaggaactgagccggcagtgcctgcttttgtccgggcttttgttcaaccgcctgcgccagaagctgtccaagctaatcgttaacgtgcagccggtctgctttatcttgatcggcctgtgcattattggaatgtatttaaagctgcttttgccgatttacgacagtatgcagcagctttagttttgcggaggaaaaaaggaaatgaaacatttaagacggttttggccaaagcgccagcgggcttttactttaattgaaatggtgatcgtggtcgcaattatcgcgactttggttcttttgatctcgccaaatttgctagcccaaaaggaccatgccgataagcggactaacgatgcttttaccacgaccattaagacccaggtggagctatatgaagaaaatacgggcaagaagccggcctctttccaggaattggtggatgcccactacttgacgcaaaagcaggaggagcaggctgaggataagaagctggcgatcggcgacttcgccaagggcggagaatgaggcagaaggccttcagcctgctggagacggtgataaccttggctatcgcggggatgctgctgggtatcggtgagatgagctttcaaggctttgaagacaagatcaattttgaccgcttctgccggcaggcggcgggactttttcaagagaaaatcagaagtgccgccattacgggaaaaagagtcgtgatctacaaccaaagcagccagggcaagctggaagtcattcaagacggccggcatgagagcctcaagattccagatggagttacggtttataccaactttaacaatacatcaggctggacaatcagcagcgacggaaccactagccaggccttcacgctgagaatcataaaaaatgatcaggggaaaaaagagtatgagaaagcatatacctttttgctgtcgtgggggaagatcaataaaaagtaaacaggaaggctttttggccctggaggcggtagtggctttggccatcgtctgtattgcgctaactgccatgttgacctgcctcagcgggctaaagaaactagagcaagagtcaagccagcgggccaaccaggccctggcctaccggatgctgaaggagtgcccggtcaagcgggtcaaggtcagggaccatgagtatgtcttgaccggcaaaggagacctgtatgatgaaacccagcagaagatttgccagaagtaaggctttcagcttgctggagaccatggtcgccctcttggtgacggtgatttgcctgtctcttttgtcctctagccttaagctttttaccctctttgaaaaagaccggcacgatcctaatgaactggtcttctcttatgtccagttcgccaagtttttgaaaaaggacagccagcggacctatattgatctggagaattccaatcctttgaagatcatgtttatcaaagaagagaaaaaggaagacaaggagggggaagaaaagatagacaaagctggctacgttctggaaatggacaatggcggaaataatcttcgggtcagaagatccggaccagacggcggcaacatgaccctgctgccaatctggggagcaacgttcgcggccagggatggcttgatggaggtccgtatcaatgaaaaggggaaaaggtcaattttgtattttaaagtcgacaaggcgccggaaaaagaaaaggaggctgagaaaaagactgaagatcagaaaacagaccaggctaaaccggcaaagggggagcgccctgctgaccagcgtgctactgctagtcacgacaattctgctgattgaaagttacctggatgcttatcagcatgtcattaaaatcaaccagctgctggcaagttacctctggggcgggtgaaatttcttgcacccttccttgtaaatcattagaattggtatgtatttcaaagaagggtggacttaagtcatgaatagaattgaagaactgtttgggcagactctggaagcagtcgaatgcctgcaagaagccttgaacgtgtccctggctgatgccttggtcgaaacttttgacaacctggaaagcgggaaaatccgcgtggaaatgggagccccggaccaaaagacggtggctgagcttaaagaacgctacgcggctttggactacaagaactggtccaaggcccagaaagaacaggtctatggcctcctggtccttaaggccgtcaacgatgacggccgggatgctaaccagatgccgactccgccgcttttagccacggtcttgaccctgtttatggacaagctcctgcctaagagaaagcaagtcctgctggacccggcagtgggcagcggcaacctgctcttttctgttgaccagcagctggccgcccagaatcattcagaagaccgctttgacctggttggcctggataatgatgaagaaatgctcaacttggccgacgtggccgcccacttggcggggttaaaggccgacttctactgccaggatgccctgaccggctggcctgtcaagccagacgtagtggtcagcgacctgccgatcggcttttacgctaacgacgacaatgccaagaactttgacctccggaccaaggaggggcacgcctacgcgcacgtcctcttcgttgagcagatcgtcaagaacctggctgaagacggctttgccttccttttggtcccgcagaacatgctgactggtacggttggggctgactttatgccctggctggccagtaaggtctacctgcaggcgatcgtgcaattgccaagcagcttattccaaagcaagataagtcaaaaaagtatccttatcttccaaaaccacggccaaagcaagccgccgaaggaagttttgctcacaaagcttgaaaatctgaagaaggaagaatctttggtagcccttaatattaaactgaacgagtggtatactaagaaagataattaagtttgtgaagtgagtaaaaggagttttttaataatggataagattttagcaatcaactctggttcatcttcatttaagtataagctgttctcattagctgatgagagtgtcttagcttccgggctgggcgaccgtataggtatcgatggttcaaccttttcaatgaagttggctgatgggaccaagcatgaagccgaagttgacttgccaaaccaggaagtagccgtgcaaaccctgcttgactggctgaaagaatatggcgttattgcagacgtcaaggaaattgtcggcgttggccaccggatcgtgaacggcggggaattgttcccagactcagcaatcatcgacaaggacaacatccacaaggtttttgacttgactaactacgctcctctgcacaacccggcagaaggccacggcattcaagccttcatgaacatcctgccggacgtgccgcaagtcggcgtctttgacacttccttccaccagtcaatggatgaagtacactacatctactccttgccatacgaatattacgagaagtacaagtcccgcaagtacggcgcccacggcacttctgtccgctacgtttccggcaaggcggctgaattgctgggcaaggacctcaaggaccttaagctggttgtctgccacctgggttcaggcgcttcagttactgcggttaaggatggcaagtgctacgacacttccatgggcttctcacctttggctggggtaaccatggggacccggtcaggtgacgttgacccgtcagttctgcagtacatcatgaagaaggaaggaatcactgacttcaatgaaatgatcgacattttgaaccacaagtcaggccttttgggcctctccggtatctccagcgacatgcgggacatcagaaacagtgatgacaagcgcgccaagctggctgatgctgtattcatcaaccgggtagtccgctacgttggctcttacattgctgaaatgggcggggcagacgcggttgtcttcactgccgggatcggcgaacacgatgatgaagtccgtgaaggggtcatgaagtcactgtccttcatgggcgttgactttgacgacgtagctaacaaggctgctaatgaaggcttcatcaccaaggaagattccaagctggctggtttgattattccaactgacgaagaattgatgatcgaacgtgacgttgtccgtttggccaagcttaagtaaaagtttttaagcagaatatttgaggacatggtcattttttgctaaaataatcatgttctctattttggggatgttttgggattcgacaggcgcagacccgcgctggttgcgattcgtaggttacgtctacgttaaaacgttaaacagtttaaattaactgcaaacgaaaactcatacgctgtagctgcttagttcagcccagctgccaatagactgcctacccgtggcggtcttgcggtatcaaccttacgggatacgcttgcttatcacacctgaataagcgagaagagactaacaggttagccgtggctgtttggccctgtcatatggcgttttgccccggtgaagtttaaataatatgactatgatcgtagagactagtgacgggatgcgtttggacaggggttcaattcccctcatctccatatgtctaaagaaggcgcgtgtgattgatgcacgcgtcttttttgtggaatttttatcttccaaaatgaaagaattctctaatatatgcaacgataagctggaaagagcggtatagtataagagataagtgtttataaggtgtaactaaagggggagaaatgaaaatgattttccgaagatggccactggaataaaataacaaatgcaataaatcgcaaaggaatcaagagtataattaaaagaatagaagctattgttttgactgtaagtacactttttagtgtgggaggtcaactatgaaactcaaagaatttttgctaggagcttatagctgccaaaaagtcaatgacaagggcaggaccaagctcaaggtcgacctttccccaggcctgctgccaacagcactttttgcctgggcggtttacaaattcttgactagcggcgatgattaaaagcaaagttttttcttgtagaaattaagtgaaaaactatataatttagtcaattagccccaaacttgtgagttaagtttcaagcttttttcacagaatgattggcggcttttgatacttttttgctacgattataatatagtgcggattgcacaatttttcggtaaggggttaaaacatgaagatcttaatggtagaagatgacaagtcagtttcacaaatgatggaattgttcttcaagaaggaaggctgggaacaagtttccgcctacgacggtgaagaagcagtcgaaattttccaaactcacccgcgggactttgacatcatcactttggacttgaacctgccaaagaaggacgggattcaagtggccaaggaaatccgccggatttctgagactgtgccgattattatgctgacggcccgcgacagcgaatctgaccaggttctcggcctgggtgtcggggctgatgactacgtaaccaagccattcagcccgatcgccttgatcgccagaatcaaggccctgcaccggcgggtaatgctggaagggcagccaagaaacctgccgaagaacatcccaagcaacgacttcgacttggaaaccaaccacatccggatctccaagagccggcgggaagtctactttgacgaaaaccgggttgaaggcttgacgccaaaggaattcgacctgctttacaccatggcccagaagccaaagcaggtcttctcccgggaacagctcctggaacttgtctggggctatgaatacttcggtgaagaaagaactgttgacgcccacatcaagaagctgcgccagaagctggaaaagtccggcccgcagattattcaaaccgtctggggcgtgggctacaagtttgacgattcacaggttaacgcatgaaactgatttatcagcatattctgagttttttgatagtcattttaacctcggtcatgatcattggcttttcaacgatcaactaccagaaggaacaggcctatcaaagcaactatacgcgcttggaaagttatgccgagaatctttcgaccctgcagctgtattctaaaaagacgcagagcaagaattcaccgccggttttttccgcggatttcctgcagaagttttccttcgtcatgcgggatgaaaatcttaaactgtttttgatggacaagaactttaagacgacttatccccttggcggctacgacatcttgaagaagtcagccaaatcgatgctgaaaaaggggcatgtggtccggatcaaggacgaccacagcagcgagcagcaggaccttgccccgaaagtccggggccgggtaaagcgcgatggcttaagaaagcggagcaaccgcctttttgccgctgaaagctatacctgggtcgtggttccccaggtccaaggattcgggtcaaataagaaggtcgtcggggccatcatgatcggttcccgggtcaaggatgtcctgcagaccgtgagtcaggccaaggcaaacctggccagagccctggtgatcaccttcgcggtcagcttgatcttgagctttattctggcctactaccaaactggccggatcaagaagctctccctggctgcccgcaaggttgctgacggtgacctggacgtccaggttgaccaccgccatgccgatgaaatcgacgacctggctgaaaacttcaatgaaatggtccggtctctgaaggcctcaaatgaagaagtcaaggcccaggaagagcggcgggaccagttcatgcaagatgtggcccacgaaatgcggacgcctctgacgacgattaatggccttttggaagggatgaagtatgatgccatcccagaagaatcaattccagagtccattgacctcatgagccgggaaaccaagcgcttgatccgcctggtcaacgaaaacctggactacgaaaagatcagaagcgggaagatccagatgatgaagtcccagttcaatgcccggacgatcatgaacgacgttcagcagcagctgacccagaacgcggctaagaacggggataagattatccttgacgctccggaagatttgccgatttatgctgaccaggaccgcttcaagcagatgctggtcaacttgacccagaacgccatccagtttaccaataacgggacgattacgctcaggggccggcgcttccagcatggggcgaccttcagcgtccaggataccgggatcgggatgacccaggagcagagcaagtatatcttcgaacgcttctacaaggctgacccggcccgggcccgctacggcggtaccggtgaatccggcctgggcttgtcgattgtcctctctttggtccgccagcacggcggggaaatcaaggttatttccaagccgcatgaaggctcaaccttcatgatcaccctctttgaccaggggcatgagaagcattatgacaagaaggacaagaaagagtccaaagataaagaatagcgactaaaaaagcttaccggctgctgccggtaagctttttgcttcttctatttagttttcttgctgctggctttacttgagctggaacttgcattagagctggatgaacttgaagtcatgctctcattcatggagctggatgaggacaggacgctttccgggatctgggtgatctcgctttgccgcttggccagctggctggcatcggtcttgtaaagcttgctggtgtcgcccttttggctgatgagggcggttgactgcttgcctaactgctcaatcaggtccatcatctgctggtagttggtgctgtagttgtaatcgctcgggatgaccgggctgaagccctttggcgtgtaatagcggagcaggttcttattgttgagggtgtctgagtaggccagggagtttttgccataagcagccagcttcttgacttcggctttttgctttttggtcagcttggtcaaaagtttgccgctggcgtcatagacattgcccttgctggtcttgcccccgatcaagacgtattttggactgattaccgtcccatttctgaagacgacaatttgcttgtgcttagctgacagcatgtccgtgccgaactggacatattgcttgctggagatgcccagcaggtggaggatggtcggcaggacgtcgatttcaccagccagggttgacttgatcccgccctttaaattggaagcgtggatcatgaaaggtaccttttgcatctgggcggtgttgtagctggaccagtcattcgggtccttgccgatcaaaggcgccagggtggtgtactcttcattgctcaagccgtagtggtccccgtaaatgacgatcatcgacttctcatagagaccggattttttcaagtaagtgaaaaattccttcaaggcctggtccaggtagtgggcggtcaaaaagtaattattaatcgtcatgtcactggttgagctggtcttgaagtttggatcctggtcagccgtggccagttcaaaaggcgtgtggttggtgactgtgatgaacttggcatagaagggctgctgcattctttccaggtacttgacgctttcggcaaaaaagagcttgtccttaagcccgtagccggagctgtccccgctttcctgactgaagtagttcttgtcaaagaagtagttgtagcccatattcttgtaaacgtcattccggttccagaagctgccgacattgccgtggaagacggcagaggtgtagttgctgtttgcccgcaagatttgcggggcagcctggaaggtgttgctggagcctaatgaagtgaagagtgacccgtcagagatcccgtaggtgctggtttccagcatattttccgcgtcactggttctgcccaggccaacctggtggtagaagttgctgtaagacagggtgtgcttgtttttgtagagggaattaaggaagggagtaacctccttgccgttgaccttcattccgatcaaaaactgctggaagctctccaggtggatgatgatcacgtttttccctttttccgccccgaagtattcggaattagccggggcgtaattctgctgggtaaagttgatgatcttgttcaattcactggtcgaagcattcttggttacggtcgagctggattcgttcttaatagcgtcataaaccgtgaaggtgtcaatgcccaggtacttgaccacgtaagtccggtcaaaagtgttcttgagcaggcggggccggttgcattcagccaccatcatgttgaggcccaaaacgaagaagccgaaggacgtaatggcaaaagtcctggaaaagccgtatgaccgctggtcgatcttgattacttttaccgccagcaggatgacgatgacgatcaggtccagccagataaaaatgtcgctaggcgctaaaagggccgcgctggacttgcctagaccctgggaaaccttgctgaggttggccatggtcttgacggtaatgaagtcggtgaactgccggtagtaaaggacgttggcaaataaaagcgccgtgttggcgaaatcgagggccagcatggcaatgtaggaggccagaggcttggaaaagtaaaagcccaggctgatcaaaatgatgctcatgcccagggggctgaaccacatgatgatgtgctggaggggattggccaggcctagatttaagtcgcagtaggcgacaaagaggtatttcagccagtagcagatgaccaggagggtcaaaaagccagtccggctttgaaatttgccgagaaatttgctgtgtttcaatgtctttctccttttattactgtcttaattttaaaggttgtggcaaaaatagacaaatatttccccagagttattgctttcttaaaattcttccctcaaaaaagcttgtataatgtaagcagaccttagtagattggacccagcgagcatgttgtttttagcacctttatacaattatttagccagccagtacgccacccggatcaatcactttgccttgatcaagttagccttgcagggcctggacaagacaattttttacttcctgctcttcgccctggtccgggtcatctggcttttggctgtccgtaaaagacgcgggctctggtcagaatttggcctctggctcttcgccttttactttctcctggtgctgatgctaacgaccttcaggtcatcctacttcccttgggaactgaatttccattggacgcggccgctcagcaatatcaacctggtcttcatgaagaatacctggaaattagtctatgcccagagcaaggtcgacttttactataactctatgggcaacatcttagccttcatgcccttcggggccctgctgcccaatctgctgcaagtcaagcgttgctttggccgggtctttttcctgggggtcttgtcatcggtgacgatcgagatcctgcagtttttgctcatgacaggtgtcagcgacattgacgacgtcttcttcaatgcctgcggggtcctgctgggctacgggctctactttttgctaggtcaaatttgtgtaaaaaatcccaataaagactagcaatgaaagggcaacaatgatattattatcttgtgaatgatttatttaacattttctagtgaggaagcataaatcaatgaatagtgtagtaagttttgacagtagtaaattgactccttttgttcacgaaaacgaactgaaggaaatgcaagcaatggttaacgccgctgacaaggaattgcgcgaaggcactggtgccggcaacgacttccgcggctggctggacctgccagttgactatgacaaggacgaattcgcccgcatcaagaaggctgccaagaagatccaaagcgactctgacgttttgatcgggatcgggatcggcggctcatacttgggtgcccaagcagccattgaattcttgaactcatcattctacatggctgaaaagagcgattatcctaaggttgtcttctgcggtaacagtctgtcaggcacttacttgtcagacttgatcaactggctgggcgacaaggacttctccttgaacatcatctccaagtccggtaccaccactgaaccttcagttgccttccgggttttgaaggccaagttgattgaaaagtacggcaaggaagaagcagccaagcgtatttacgcaaccactgaccgccaaaagggtgccttgaagaccgaagctgacgctgaaggctacgaagaattcgtagttccagatgacgtcggcggccgtttcagcgttttgtcagctgttggccttttgccaatcgctgctgctggctgcgacatcgacgccttgatgcaaggtgccgctgacgcccgggctgcttacactgaccctgacgtaagcaaggactcaccttaccaatacgctgccttgagaaacatcctttaccgcaagggctacaccactgaacttttggaaaactacgaaccaagcatcagaatgtttggcgaatggtggaagcaattgatgggtgaatcagaaggcaaggaccaaaagggcatctacccgtcaagtgctaacttcaccactgacctgcactcacttggccaatacatccaagaaggccgccggaacttgatggaaactgttgtccgcgttgctagcccacgggctgacgtagaaattccaaacgacgaaagcaaccttgaccaactgaacttcctggccggcaagaacatgaactatgtcaacgaccgggcttacgaaggcgttgttttggcccacactgacggcggggttccagttatgactgtcaacatcgctgaccaaagcgaacacactttgggctacttgatctactggttcgaactgtcagttgctatctccggctacttgaacgggatcaacccattcaaccagccaggggttgaagcttacaagcgcaacatgttcggccttttgaacaagccgggctacgaagacttgcacgacgaactggcaagccgcctgtaatctttcgtaaatgaaactaagaagagcaagatccgcggatcttgctcttttttgttcaatttgatatttttttggccaaagatgataaaataattacattaagtgctacaatttaagagaagcaaaaagagtattgcttatgttaccgctttagtaagagggggtaaaggaagatgtcatcaagaaaaattgccttgaccggacttgctttagctgctttaacgttaaccgcctgcagcaagcaggagagcagtcaaaaggagcaggatttgaactggtcagttggcggggaaatcaccacgatggacccgtcaaaggccacggacgtggtcagcttcagccagatgataaattcaatggaagggctctacagaaacagcaaggacgggcaaagtccgggcctggccactagcgcccaggtttccaaggacgggctgacttatactttcaacttgcgcaagtccaagtggaatgacggcacgcccgtaacggcccaggactttgtctactcctggcggcggaccgtcaatcccaagactgaggccgagtactcgtatcttttttccgggttcaagaacgccgatgccatccaaaacggcaaaaagccggtttccagcctggggatcaaggccgagggcaagtataagctggtcgtcactttagagaagcggatggcctattttaaggacctcatggccttcccagtctttttcccgcaggaggaaaaagccgtcaagaaatacggggacaagtacgggacggcttccaagtacatggcttataacgggccttttgtccaaaagggctggacgggatccaacctgtcctggaaactggtcaagaacccggattattgggacaagcagagcgtcaagcttgaccagatcagcttcacggtcaacaagacggcgactaccgcctacaacctctaccagtcaaacaaaatagatgccctgggcctggactccaatttgaccaagcagttcaagggcaagaagaactactacagcctctccaacggggggacctactacctggaacttaacgaaaagaacccgaacctggccaacagcaacatccgcaaggccatctccctggccatcaaccgggagaacctgatccggattttaggcggcaacaaccaggtggccaatacttacacagccaagggcttgactgaatatgacggggaagactacaccagcatgatttcttcctcggccaaagacctctacaagtaccagccaagcaaggccaaggagtactggcaaaagggcctgagtgaactcggcaagtccagcttgaccttgaacctgctgaccagtgacagcgacgggggtaagaagaccggcgaggccctgcagagcatgctggaaacccagctgccagggctgaaattgacggtcaccagtgttcccttcaagacccgcctggcccggcgggaaaacggccagttccagatctgcgggtcagactggatcgccgacttcgctgacccgatttccttcttggaacttctgactagcaagaacagctccaactatggctcctggaaaaacagccagtatgacaagctgattgctgcttccaagaacaccaatgaccaggaaaagcggctcaaggatatgagtgaggcggaaagcatcctgcttgacgatgccggggtcatcccgctttactatgaggacgatgcctggctgatccggtcaaatgccaagggctggatctgcaagcggagcgagtggaactttaaggaagcctatgtgactaagtaatgtgatttgaaaagaagaaaaaagtgctagaccggagctagcactttttcatttgctttgaaaaggacaagaaaaaaggcaagctccagaggaacttgcctttcggtattattgcgatgtccgggctcgaaccggaacattatggattcagagtccactgccttaccaatttggctacatcgcagtaaatcacccgtacgagaattgaactcatgactccaccttgagagggtagcgtcttaaccacttgaccaacgggtgaagtttgtgttcgaattaccgacattcattattatgctttctttgcaagaaaaagtcaaggctcccggcaaaaaaagtctaaaattttttcaggctggcttggaaaggctgaaaactgccgtataatagagctaactgcccgcacgggccttttagaaaggagtcaccgcttgcttaattttcctaaaacccagctgctgattgaaagcctggtttctgaaagaattgttcccggagtcaactacgccctcttaaaaggtgaccaggtctttgcctcgactttgggctttgccagcatttatccggctaaaagccagctgagcccttttgcctactatgacttggccagctgcagcaaggttttggccacgacggctgctttcttgcagctgagggaagagggaaaggttgactttgctgaccccttgcaaaaatacgtgccggaatttaaggacggccgggtccgcctcagccaccttttgacccacacatctggcatccggggctggatcgaaaaccggaatgccttgtccggcccggaattaatgagggcgatcgtgggcttgccagtgaccagcgagtttaaccgggtggtccgctatgcagacaccaacttcgtccttttaggcctggttttagagcggatcacgggcaaagcagtccaggacctggccagcgagcggatcttccagccagctggcttgactgaaacgacttttgctccgccaaaagaggagtgcgtgccaacggaactagttgacggccaggtcattcaaggcttcgttcatgaccccaagggccagcaattaggccggcggtgcgggtcagctggcctgtttagtaccgtcagcgacctggtcaaaatgggccagggctatatgggggtcagtgaccttttgccattaaagaaagaaacaatccaagatctctaccaggtcaagactccggcgggtttaaaagcccggtcctggggctggaacctggtctttgaccctaaggaaaactatcccatcatctaccacactggttttaccggcactttggtcttgtttgaccaggtcaagcagtccggcttgattcttttgaccaaccgggttcacccttctcggcacaatcagatctttttgactatgcgcagacggatcatcaacgcttttttgcaggaaaaccgctagctagaaagaggagcaaaatcacatgaaattaagcaataagcaaaagggttggctgcttttagccgtctacggcctggtcatcatcatcctgggtcgttttaacagccggatgtcgccttattatgccatcaccgctatcgcggcatttgccgtggccctaatcgagggcctgctttttgcctttagcaagaacgcgacctacaaggcggttgccttttttgccggcttggttgccttgatcaacgtagtcgccgtcttaactacggcaatttaaaaaatcccgcggctgaccgcgggatttttatttactcttttacttacttgctttgcgtatgctagttgattcttctcttcaagacgcccttgtcggcaaagacctgccgcaggtgcagcatggccgtgtaggttgagagaatgtagatcttgtcagtcggcgcctttgcaaaagcggccagcagctggtcaaagtcgctttcaatgatcatcttgtccgggtcaaaaccggcaacttccaggcggaaggccatgtccttgtgccgttcgccgccgacgatgacctggtcgatcttgtcccggtccaggctttcaaagttcccgtcccagatccagctagtgtcgatgccgtcagcgtggtgggcgtttaagagggcagccaggctgtagtggtccttttccgtgtccaggaggctgaggacctcgtttaagccaaccgggttcttgaccaagatgatgttgatctgcttgccctggtagtgaatcagttcctggcggccgaagatccgcttgtttttggcaaaagccgccgcgatttcattggcggaaacgccgaattctctggcgcaggcaaaggcggccagggcattgtagatattgtaggtgccgccgatgttgatggcgaattccttgccttcaatggtaaacttgatccggctcggggtctgctcgctgatttcttccagcttgtaggtcaaatccggccgcttgtagccgcagttcgggcagaagaagtcacccaggttggcataggaaattgcgtggtagtgcaggatatgctcgcacttagggcagaggaccccgtcagtgttgacgtcagccttgaggtcattttgcggtttgtcctggtcagtttcaaagccaaaaaagacttttggattcggcaggtcgactgaagagaagatgctggcgtccccgttagcgatgatggttgcatctggcgccagcttgatgccggcgacgatcttttcataggtcgtgtagatctccccgtagcggtccatctggtctctgaaaatgttggtcagaacaaaggccttggggtggaccaactgggttacggccttgacgttggcttcatcgacttccaaaacggccagtttccggctactttttttctggccatgagccaaaaaggcagttacgatcccctgggccatgttggacccggacgggttggtcaaaatatcgccgtatttttctttcaaggtctgggtgatgagggccgtggtcatggtcttgccgttggtccccgtaacgataatggtctcgtagtccttgcccagctgctcaaggacatctgggtcaagcttcatggctagcttgccgggaaagctggtcccgccctttaagacattgtgcaggaaccagtaagaggacttgccggcaaaagttgcgatgttggatttaaaactcatgattaacttcctattctgcattaaaactatgataaatcttaccataagacggaaagtttagcggctaaaatgcggagcttttaaacttttgcaaaatacactatacttatttgagcgagattaatacaaaggtggagaatatggcacagttttttttcgaatacggagcgatgggcagcggcaagacgattgaaatcttgaaggttgcccacaactacgagattcaaggacgcaaggtggctttattgaccagcagcgttgacacccggtccggccgcggcgtggtggcttcccggatcgggctcagccgcagcgcccagccgattgagccggacctggacctctttgactacatcacgactttgaaccagcaagagcaggagtctgacggccaccccttagcggcggtcttgatcgatgaggcccagttcttaaaaaaggaccaggtcatccagtgtgcccgggtcgtggacgacttgcacattccggtgatggcctttggcctgaagaatgattttcagaaccatctttttgaaggcagtgagtatcttttgctttatgctgataaaatagaagagatgaagacaatttgccacttttgcgggcacaaggcaaccatggccctgcgctacaaggacggtttgcccgtctatgagggcgagcaggtgcagattggcggcgacgaggcctactacccggtctgccgcttccactatttccaccccgatcaggcaagagactagtttttattggaaggattgattaaatggataatgtaatggcacagctggaaagcttggaagtgcgctatgaagaaattcaggaaatgatggccgacccggaagtcatcgctgataccaagcgctacatggaaattaccaaggaagaagctgacatgcgggaagtcgtgcagaagttccgcaagtttaaggccgacaaggaagaaattgccggcaacaaggaaatcatcgctgacggttcagaccctgagctggttgaaatggccaagatggaaaactctgagctggaagatgaaatcagccagctggaagatgaaatcaagatcttgatgctgccaaaggaccctaacgatgacaaggacatcatcatggaaatccggggggcagccggcggggatgaagcttccctgttcgcgggcgatctgctgcggatgtatgaaaagtacgcggaaaaccagggctggaacgtttctatcgtcgacagcgaacaaactgaagttggcggctacaagcgggtggccatcatgattactggtaacaaggtctactccaagctgaaatatgaaaacggggcccaccgggtgcagcggatcccagtaactgaatcagccggccgggtgcacacttcaactgctaccgttgccgtcatgccagaatatgaacaggttgacattgaccttgatccaaaggaaatccgggtggacgtctaccggtcatccggtgcgggcggtcagcacatcaacaagacttccagtgctgtcagaatgacccacttgccaaccggtatcgtggttgccatgcaggaccagcggtcccagcagcaaaaccgggccaaggccatggaaattttgaagtcccgggtttacgactactacgaaagccagaaccgggacaagtacgacgccaagcggaagaacgcggtcggcaccggtgaccggtcagaaagaatcagaacctacaactacccgcaaaaccgggtgactgaccaccggatcggcctcactttgaacaaattggaccggatcatgaacggggaactggacgaagtcatcgatgctttgacggtttactaccaaaccaagcaattagaggagctggcagaaaatgcataagagtttacgagaaatgcggattgaggccagtgaactggctgaaagcgcacggagcgaggaaatcgactttcttttggctgagcggctgggcctgacgccaagccagtttcagcttaagcaagacatggaattgtctgacgctgaagtcaagcaggccagaaaggacatgaagcgcctggctaaaggggactcaccccagtatatcctgggctatgcctggtttttaggctaccgcttgcgggtggccaaaggcgtgcttattccccgctttgaaactgaggaactggttgaatgggccctagcgcacttacaagacggcgacactgtccttgacctggggactgggtcaggcaatattacggtggccctggccaaggaagctgaaagcaaggggatcaaggacctgcatttttacgccagtgacgttaaggacaccccgctcagaatcagtgaagagaactttttggactacggcctggacgtaaccacccgcaaggccaatgttttgctgggcctgggtaagtttgacttgatcatttccaacccgccttatatcaagcccagcgagaagaacgtgatggacaagggcgttctggccaatgagccggaagaagccctgtttggcggccaggatggcctggccttttaccggaagttcgctgaagaagttagagaccacttaaactcgggcggccgcttcttcatggaattcggctttagcgaggaagatgagctgaaggccctgtttgccgaaaaattgccggactttaaggtggaattccgccgggacatggccggcaagccgcggatgctgtttggggagtggaagaaataatggaaaccaagatttttaaacgggaacaattggatgaagcagtcagcctgcttagggagggggaattagttgcctttccgactgaaactgtctatggcctgggggctttggccacccgggacgattcagtcaaaaaggtctacgcggccaaaggccggcctagcgacaaccccttgatcgtgaccgtggctgacgaagccatgatgcgcccttacgctaaggaagtgccggagcgggcggagaagttgatcaagcacttttggccaggtcccttgaccatcctgcttttagctaaagaaggggccctgccggaatctgcaaccgggggcctgccaacggttgccttccgctgcccggatgaccagctgactcatgacttgatcgccaagcttggctacccgatcgtcgggccttccgccaacacctcgactaagccgagcccaaccacggcccagcacgtctaccacgacttaaagggcaagatcgctggaatcgttgatggcggcgagactgaagtgggcctggaatcaaccatcgttgacctgtcggttaacccagcagttgttttgcggccgggcaagattacgccagaagagatcagccaggtcttgggcgaagaagttttgatcaaccggggccaggtaagtgacaaggacgtgccgaaggcgccagggatgaaataccgccactacgcgccaagtgcccaggtttacgtggtcgaccaggcggaaacttttgctaagctggacctggatgtttcctgcggggtcatggcaactagtgaccttttggaaaacttacctgtacctgaggaaaataagttcaatttaggcaaaaatctgacggaggctgaccacaacctgtttgccggcctgcgctattttgacgaccggccagaaattaaaagtatttatgtagagggctttgaccagggcgaggaaagtctggcctacatgaaccgtttaaacaaggctgccggcggtcatcatgtctaatctggacgatttaatgttttaaaaaaagaaattgctttaaaccatttccttttttatttataatagagacgacatggtatttttgaatggaggaactatatgggaaagttcactgtgttaaaccatccattgattcagcacaagctgacgatcattcgccgcaaggaaactggatcaaatgaatttcggagaatcgttggcgaaatcgccggtttgatgacctacgaaatcacccgcgacctgcctttgcaagacgttgaaatcgaaacgccaatgggcaagacggtgcaaaaggaactggccggcaagaaattgactatcgtgccgatcctgcgtgctggcatgggcatggtcaacggggttttggaaatgattccgtcagccaaggtcggcgtcgttggcatgtaccgcgacgaagaaaccttgaagccggtagaatacttcttcaaggttcctaaggatgttactgaacgtgaatgcctggtcgttgacccgatgctggctactggcggttccgccaacctggccatcgaagctttgaagaagcggggcgtgaccgacattaagctggccgtcctggttgctgcgccggaaggcgtcaaggcggtgcaagatgaacacccggacgttgacatttacgcggctgcccttgacgacaagctgctgccaaacggctacatcttcccaggtttaggggatgcaggtgaccggatctttgggactaaataattaaaaaagtcgctataaaagcgattgcaaaagttccaattaatttttattggtgtacaataagtgacgtgttcgaagaattcaacacaagaagggaggtcacgaagaattggagaaatcacttgtcttcaatattaacggtaccggactgaacgtcgacttggtcggcattatcggttcgaccttgatggcaattgtggtttttgccatttgttacgctctttcacgtaaagttgaaatgaaaccgaacaagaaacaaaatgtcctggaatacctgatcgattttaccgacgggattgtcaaggataacgtcgaagacccggctgcgcaaaaacatctgtctctttacgcctttgttttgttccttttcatcttctgcatgaatcaactagggttgttcttggaagtgaaagtcggtgactatatggtcatcaaatcaccaactgctgatccagtgacgacgatgtcgttcgcgatgatgaccttgcttctgtcatttaccttcgggattcagaaatttggcacgaagggctacctgcagaactatgcacgtcctgtcggttttcttttgccgattaacatcattgaagaatttaccaacttcttgacgttatcgctgcgtctctacggtaatatctttgcgggtgaagtcctgctgaccctgatcgggaaccagctggggccaagcatggggattgtaaccagaatcctggctgcgccgctcgcaatgatctggcaaggtttctctgtcttcattggctctatccaggcgtatgtttttgtaaccctttctatggtttatattggcaagaaggttacacaagaataatttttcggaggttttattatgactacaggtttaaaggatttagctgctgcacttgttgctggtattgctgctttggctgcttcatgggggaacggtaaggttatctcaaagacgatcgaaagcatcgcccgccaaccagaaagtgctggtaacttgagatcaactatgtttatcggtgttggtttgatcgaagccgttccaatcctggctatcgttatcgctttcttgattttgttcctgtaattaaccagtcgttaaattacattagttactaaattgagagagaaggattgttgatggaatttcaaccagtattcgccggcgctgaaatctcaatcattgataccctttggtatttaatagtattcagtatccttttgctggccgtcaagcattatgcctggggcccggtaaaggacatgatggagaagcgccgtcagaaagtcattgatgacttggatcaagctgctagcgaccgcaagaaggctgaaactttggccaatgaacgggaagcagccttgaagaattcaagacaagaagcaacccagatcctctctgttgccaagagtaatgcgcaaaagaccggcaagcaaatcgtcagcgaagccaaggctgaagcttccgctatccgggaaaaggccaaggctgatgcagcgaaagctaagactgacgccttgaacgaagcccgcgaagaagttgctgatctttctgtgacgattgcggaaaaggtaattgctaagaacttatctgctgctgatcaaaaagatttagttgatcagttcattaaggggttgaacgattaatggccttaagtagagaagaaacggcaagacgctacggaacagcgatctttgattttgccaaagacagcggcaagactgagctcatgtacagcgaactgactgaattgaagaaggcagttcaagcagagccccgttttgtccaggttctgagcaatcctgttttggacaccaaacaaaaggaaagtcttttgacggcggttgaacagggcttttctgcagagcttcaagaagttttaaacttcttgcttagctatgatcgttttgacaacttggttgacatcattgactactacattcacctgtacaatgctgccaaccacatcggaacgggtgtcgctaagactgcattgaagccagatgaagatcagctgcagcgccttgcggagagctatgccaagaaatatggcttgcaggcacttcatcttgaaaatgaagttgatccagaaattatcggcggcgtggtccttgaggttgaaggccgcgtgatcgatggctcagtaaagcatcgattggagagaatccgcgccatgttaacaaagtaagtattataaagaggtgaaaccattgagcattaaagcggaagaaatcagctctttaatcaagcagcaacttgaacactacgacgataagctggacatcgaggaagtcggtgtcgtaacttacgtcggcgatggtatcgcccgcgctcacggcttgaacgatgtcttgtcaagtgagcttttgcagttcgacaatggtgcctacggtatcgcccaaaacttggaaagcaatgatgtcggtatcatcattctgggcaagtttgacgacatccgtgaaggcgaccgcgtgaagcgaactggccggattatggaagttccagttggggatgctttgattggccgggttgtgaatccacttggccagccagttgacggcttaggcgaaatcaagactgacaagactcggccaatcgagtcaaaggcgccaggcgttatgcagcgtcagtcagttaaccagcctttgcaaactggtattaaggccattgatgcgctggtgccaattggccgtggtcagcgtgagctggtcatcggtgaccgtaagactggtaagaccagtttagcgatcgacaccattttgaaccaaaaagggcaggacgtaatttgtatttacgtctcaattggtcaaaaggaatcaactgtcagagcacaagttgaaaccttgaagaagcttggggcgatggactacaccatcgtggttgaagctggtccttcagaaccggcaccaatgctttacatcgcgccatattccgggaccgcgatgggggaagaattcatgtacgccggcaaggacgtcctggttgtctttgacgacttgtccaagcaggcggttgcctaccgtgaactttccctgctgcttcgccggccacctggccgtgaagcctacccaggtgacgtcttctacctgcactcacgtttgttggaacggagtgccaagctgagcaaggaactgggcggcggctcattgactgccctgccattcattcagactgaagccggggacatctccgcctacattccaaccaacgttatttccatcactgacggacagatcttcttgcaaagtgacctgttcttctccggtacgcgcccagccatcgacgccggggcttctgtttcccgtgtcggcggggccgcgcagatcccagccatgaagaaggttgctggtactttgcggaccgacctggcttcataccgggaactggaaagctttgcccagttcggcagtgacctggaccaggcaacgcaagccaagctggcccgcggccggcggaccgtcgaagtattgaagcagccgctgcacaagccggttgccgttgaaaagcaggttgtcctgctttacgctttgacccatggctttatggacgcggtgccagtcgatgatattgctcgctttgaacaagaactttacaccgactttgacgccaaccatgctgatctgttagctgaaatcaagtcaactggcaaattgccagatgaaaacaagcttcaagaagctcttcaacaatttgtatccagcttttcatcaagtaacaaataggaggtagactatgcctgcatctttacttgaattgaagaagagaattgcttctgtcaagcaaacgagtaagattactgaagccatgcacatggtttcagcagctaaactgaatcagactgaaaaaagagacaagggctaccaggaatacaacctgctgctgcaccaaaccgtgtcccggctgatgagtgccagcgtgatcaaccacttgaacaaggctaattaccgcctgacgcaagacaacattgactccatcgactacgatgatgtctttgggatggggatcatttctgacatgatcaagccccgtgaggaagttcactccgtgggctacctggtagttactggtgaccgtggtctggtcggctcttacaacagctcagtcatcaagcagatgatgagcctggtagctgacgacaagctgcagggcagagagtccaagatcctgtcagtcggcagcgttggctcccagttcttcaagaagaacaacctaaacgttgtctacgaaaaagacggcgtttcagacgtgccaaccttcaaggaaaccctgccaatcgtctcaacggcgatcaagatgtatttgaacggcgtttatgacgaactgtatgtttgctacacccaccacgtgaattctttgtcttcagccttccgggccgaaaagatgctgccgatcgtcgaccttgacatcggaaccatggaagccaaggaaagcaagaagattgaattcgaagttgcccctgacattgacagcgttttggcaaccttactgccgcaattcgcgcgggcggaaatctatggcgccattttggacgccaagaccgccgaacacgcaagttcaatgacggccatgaagaatgccacggacaatgccaaggaccttgtttctagtcttagtttgcaaatgaaccgtgcaagacaagcacaaatcactactgaattgactgaaatcgtcagtggtgcgaatgcacttgaataagagaaaaggaggtagaagtttgagtcaaggtgaaatcgttcaagtaatcggccctgttgtcgacgtcaagtttccaattggcaaagacctgccagacatcaacaatgccttgaaggtcatcaagtcagacgacgactcgattatccttgaagttactcttgaacaaggcgatggcgttttgcgctgcatcgcgatggaatctaccgatggccttcgtcgtgggatgaaggttgaagatactgggagctcaatttccgtgccagttggtccggataccttgggccgggtcttcaacgttttaggtcaaccgattgatggtggtccagaatttccagctgaccaccctcgctccgggatccacaaagaagcacctaagtatgatgaattaactactagccgtgaaatcctggaaaccgggatcaaagttatcgacttgttggaaccatatcttcgtggtggtaaggtcggtctgttcggtggtgccggggtcggcaagaccacgatcatccaggaattgattcacaatattgcccaggaacacaatggtatttccgtcttcaccggtgtcggggaaagaacccgtgaaggtaacgacctttacttcgaaatgaaggcatctggcgttttagacaagactgccatggtcttcgggcagatgaacgagccgcctggtgccagaatgcgggtcgctttgaccggtttgacgatcgctgaatacttcagagacgttgaaggccaggacgtgctgctcttcatcgacaatatcttccggtttacccaggccggttctgaagtttccgccttgctgggccggattcctagtgccgttggttaccagccaactttggcaacggaaatgggtcaattgcaagaaagaatcacttccactaagaaggggtcaatcacctctatccaagccgtttacgttccagccgacgactacactgaccctgcgccagcgactactttcgcccacctggacgcgacgaccaacttggaacgtagcctggtagaacaaggtatctacccggccgttgacccacttgaatcaacttccagtgccctggaccctgaaattgtcggccaggaacactacgacgttgcgacccgggttcagcacatcctgcaacgttaccgcgaactgcaagacatcatctccgttttgggtatggatgaattgtcagatgaagaaaagctgatcgttgcccgggcacgtaggattcagttcttcctgtcacaaaacttcttcgttgccgaagtctttaccggcgttccaggctcatacgttccaatcaaggaaacgatcaagggcttcaagatgatcctcgacggccatcttgacgacttgcctgaagatgccttcagaggcgttggcccgatcgaagaggttttgaagaaggcgctaaagatgggggttaccccaagcgatccggaagcaaaagccttattagaaaagtaggttgatgcatcatggcagaagcagagaaactgtttaagatcaatatcgttacgccaaacgggttaatctattctcaccgtggcagctccgtctcaatgcgggctattgacggcgaccggcagattttgtacaaccacctgccgattttaactccgctgacagttggtgaagtccgggttcaacgcggcgccgatgtcgaccacaaggttgatcacatcgccgtcagcggggggatcatcgaattcgccaacaatgtggcaacgattattgctgacaacgcagaacacgcgcgcaacattgacctcagtcgggctgaagctgccaagcagcgggccgaggcgctcatcaaggaagccaaggaaaagcacgacgagcagttattggaacgggctcaaattgctttgcggcgggctgtaaaccggattcacgtttacgacgagcagcacaaataagggaaaagagcggatttattccgctctttttttatggtagattttattatgagacaacttggaattcacgcaatcatcagcttggtgatctactttgtttgcattgccttagcctttcaggcgatcaaagccgtcagaattgagaaaatcattcggaccagccgggtatttgaagcccaggtcttcttgatttttacggcgattgccctgggctatacggtcggccaatttttgatcgccttgatagatacttcattacaattgtctaacctgttttaaagaataggttaaagctaagcggaagccgctatacagagcgcttttatggtacaattaaaattaatatgttatggaggaaatagacgtgtcaaaagatattggtattgatttggggaccgcgaacgttttgatcaacgtttccggcaagggcattgtgatcgacgagccatctgttgttgccgtggatacgaacaccaacaaggtggtcgctgtcggcactgaagcttatgaaatggttggccgtactcctggcaacatccgcgttatccggcctttgaaggacggggtaattgctgattttgacattactgaagccatgctgagctactttattgagaagctgaacgtcaagggcttcatgagcaagccaaacattctggtctgcaccccgactggtgtaacttcaattgagcaaaaggccatcatccaagccgcggaaaagtcaggcggcggcaaggtctacctggactatgagccaaaggtagctgccgttggtgccggcctggacattttcaagccgcaaggtaacatggtcatcgacatcggcggggggacgactgacatcgccatcctgtccatgggcgaaatcgtgacttccaagtccctgcgctatgccggggaccggatgaaccaggccatcgtcaactacatcaaggctaaccaccagctcttgatcgggatgcggacggcggaagccatcaagattgaaattggtgccgctactgatccagacccggacgcaagcatgaatgtccgcggccgggacacgattgacggcctgccaaagcagatcaaggtaaacagctctgaagtaactgaggccctgcaagaaggcctgcaaagcatcattgacactaccaagcaggttctgcaggaaacgccgccggaattgtccgctgacatcatcgaccgcgggattatgatcaccggtggtggcgccttgctgaagaacatcgacaagctgattgccgacagcctgcaggttccggttttgatcgctgaatcaccgcttgaatcagttgctttgggcactggcatcctgctgcagcatattgaaaagcacgaacgtcactaataatgcgtcaaataatgattcttctagtccgcttttaccagcgggcaatctcaccaattttgccggacagctgccgtttctacccgacctgctccagctatatgatcactgctttggaaaagcatggtccgcttttgggactgctgatgggcctggcaaggatcctgcgctgcaatccttttaaccgcggcggggtagatccagtaccggacaagtttacccttttgcgcaatccccacccagaagaatatgaggacgaaattattgccagaaaattccacagtcactaacgaggagggaatatgtcaagaaatcaaaaaaatatcgggatcgaggtcaacgaactgtctgaccgccaggtaccgacttgggaagtagtcattccaaagaagcgccagatcggcttgatcgagcaggttgacggcaagttccgggtaaccagcagcaagtccaagaacgtgatgtttgccaagagccttgatgccggcatcaacgatctgctggcctacttcaccttgcacgaaaaataatttttacgaataaagtgatagttaatggcaaaagttcaagaagaaagcaaatggtatgaccgcatcgcctggggagttatcattcccgtggtcttgctgtcattcgtcagtttctattcaatttacaacgcatcagtcaatgactcgacctatgggacgccaactagaacagtggccatgcagattgtctggtacacggtttcctggctgatggtggccttcatcgtccgctttgacgccgagcagatctttaagctggccccctatctgtatggcttggggatcctcatgctggtcgcggtcctcttcctgtatgaccggacaacggctgccagcagcggggccaagagctggttcgtcgtcggacctgtcagcttccaaccctcagaagtcatgaagccggcctttatattgcagctggcccgggtcgtcagagagcacaatgcgcgctatgcccacaacctcagaaatgactggctcttgatcggcaaggtcatggcctggttcctgccggtggccatgctacttatgctgcagcctgactttgggaccaccctggtctttgtcgcgattaccgcggggattctcctggtttcagggatttcctggaagatcatcatcccggtctttctgctcatggtggtcgtgggtgtcgctgtcatcctcctggtctttaccagtgaagggcagacgattctgcgccactacttcaagacctatcagctggaaagaatcaagtcctggagtgacccgtcaggggacaactccaacagcgcctaccagctctggcagagcatgaaggcgatcgggtccgggcagatttttggcaatggctttaacaatatcaaagtctacgtgccagtccggaactcagacatgatcttctccgtggtcggcgaaagcttcggctttgtcggcggggtggccttgatcggaatttacttcgtcttgatcgtgcagatggtcaagatcactttctcgaccaagaacgccttctattcatatgtgtccacagggattattatgatgattttgttccacgtctttgaaaatatcggcatgagcattgatctactgccccttactggggtgcccctgccatttgtttcacagggtgggtcagccttgatcgggaatatgatcgggattggcttgatcctctcgatgaagtggcacaataaggactacatgtttagcacggctggcgacttttaactgaatttttgagagcatacgaaaaccgcctcggtcaatcgaccggggcggttttatttattttactggacttagtccaagccagccttgttgtgccgaacgaccaggatgtcgcagtcagcagttctggtgacgtattcagtcacgctgccgatgagcaggcgttcaacggcgttcaagccggtcgcgccgacgacgatcaggtcgatgtcatgcttcttcgggaattcccggctgatgatgacctttggtgagccgaattcgatggagtagtggacttccttgacgccgctgtcttgggcagactggtagtacttttccatcttcttcttggcgtcgttggaaacctgctcaaccatggctgagtcaaagctggaaacgttctggaaggaccgcgtgtcgataacgtggagaatttccaggctggcgttcatgtgcttggcaaccgttacggccttcttgaaagccaggtcagcttccttggaaccgtcaacggcaacttggatatgtttgtattggtattgtttagtcatttttgccacctcttcctgtctctattttaccaaaaaaatgaaagcattttaataaatttactgattgttttgcgaaagcaggagggcgaagataaaaatcgtcgctgagcctaaaaagagggtgatcaagttgagatacttgttgtcaaagaagagcaggacgattcccaagacgctgatcgccaggagcgtccacgagcagatggtcatcaagctatggagctccggggagctggagacgtcgaagactaggaaggcgccgtttctccggtgccagaggtaccaggcggtcagcagcaggcaggcgataaaaatgaccatgaaaatacggatgtagagcatcggttagactttctagttttcacaggaagtgaaaacacactgagtaagctagtggcaggaataaacaaaaaaagcggcccgaaggaccgctgtttttgtctaagaaaatccgagttgaccaaagcataaatggcgctgttgatcccgtaaagaattcacaaaatccggcccgtcgcgcagtgaatatggattctgcgtgagcagcattccgattcagtagttactgacaggccaccacgtccttaagtttgatcggtcaactaattacaaataagctttctgacgatcaactcagatcacttattataatatagaacccagcagcctttgtcaagtaaaattataacgctttcatttacccttaaggcctgctttctgcaggtcatgcaggcgttggtactggctcttaaaagccgcttcaaatttgctctcgcccttaggggcaaaatactgcttgccttgcatgcggtcaggcagataagcctgggccacccagtcgcccggatagtcgtgggggtagaggtagccagtcccgtggcccagcttgctggcccccttgtagtgggcgtctttcaactggtcgggaatctggccgacattgctttggcggatgtcggctaaagccgcgtcaatggccgtcatcgcagaattgctcttaggagacaagcagagctcgataacagcgttggccagggggatccgggcttccggcaggcccagctgctgggccgcctgtacggccaaaatagctcgctcacaggccgggggattggccaggccgatgtcttcgtaggcaatcacgctgaggcggcggcagattgagaccaggtcacctgattccagcagccggcccaggtagtgcaggcccgcgtcagtatctgagccccggatggacttttgaaaggcggataagaggtcgtagtggccgtccccgtcagcgtcaaagttctggatcttcatttgcaaggaatccgccatgtcatccagggtgaccgtgaaggagaaggcatctttgccctcagcttccagttcctgcttggtcgacaggactgccagctccaggctgtttaaagtggcccgcaggtctccgttgcccttttgcgccaaaaattctcctgcttctttcgtcagcttggcatggtacttgcccagacctctttcttcatcggttagggcccggtcaacagccgtcaggatctcttcctcagtcaacggcttcagttcaaaaatctggcagcgggaccggatggccggggagatggccaggtagggattttccgtggttgccccgatcataatcacctggccggattcaagcagcggcaaaagaaagtcctgcttgaccttgttgagccggtgaatttcatccagcagcagaacgactgtcccgctcatcttgccttcagcggcgacctgggagagttccttttgcccgtcagtcgccgcgttgagctggcggaaggcatacttgctgctgccagcaatcgcgctggcgatgctggtcttgccaatgccgggcgggccgtacaggatcatggacgagagctgccgggcctcaaccatccggcggatgatcttcttaggaccgaccaggtgctgctggccgacgatctggtcgatggactggggccgcatccggtaggctaagggcttcatttattgcccccgaagaatctggccaaaaagccctttttctttggagcaggcaatttctcagccggcaggggcggggcgtagacctgggtcaattcgatccgcatccggttgatggcctccttgctgacgaccaggatggcagaatcatcatcgccttttctggcactttcgtcattgaccaggcagaagggaacctgctccttgctggcccggctttcaatctggccgacaaaggtcgggttgggggtgttggcgttgatcaaaatggtgtagcccttgtagtcggcaaagtggtccatgaagagtttggtcaacttggcgtcttcacagtccttgatggtcatgcgcacgaaaacccgctcccttaaagaacccaaaaagcgccgccgctcgtcgggcctggtctgcggagtaatgccattcgcggcgttttcgactcttttggctaaatcttcagtcatggcttgatcctttctaaaaattaatactgtctttttctggctctaaagcatattataactgaactttttggacaagaaaaaagcctttcccaaaactgggaaagactttgaagccgaattgatattacagcaacttgttgtagtattcaacaaccagggcttcgtcaatttctggttccatttcgtcacgttctgggaaacgaaccaattgaccttccatcttgtcttcgtcaaatgaaacaaatgatggacgtgaagcaacagcttccaaagcgtccttaacttgttgcaggttctttgacttttccttcaagctaatggtttgaccaaccttaacttcgtatgaaggaatgtcaacgcgcttgccatcaacagtgatgtggccgtggtttaccaattgacgggcttgttcacgggtagtagccaagccgagacggtaaacaacgttgtccaaacgacgttcaagcaagatcatgaagttggtgccgtgttggccttcacggatcttaccagcgcgggcaaacaaagtacggaattggcgttcgctcaaaccgaacatccagcgcagcttttgcttttcgtgcaattgcatgccgtattctgaaagacggccgcggtggttaggaccgtgttgacctggaacgtatgaacgacgagcaagttccttgccagtgcctgacaaagaaatacccaatcttcttgaccgcttccaacttggaccagtgtatcttgacatataaaaattcctccaataaaaacaataaaaattgttggagtaaaataatcacaatataagctcaacattcgtgcatcccgagtttacattttcgcccgtgcagcgtgggttactcgttcactaaacgtcccgggatgttgacgttcttgtcgcttatggctgcaaatatcttacacgttgaccattataagggctttaggcccgaaaagcaagaaaaaaacgcagaaagtctggcaaagtagaaatatttcgggggctagtttggtataattaactttagttcggaggagaaagatatgtcatcaacacaatctctactactcatcactttaattatcacgatcatcgtagtggtcatggccatgcttttgatcaaccgccggcaattgcgcgatattgaagagctcgataatgagctgggcaatatggaagacctgcacctggagcgggcgattggcaagctggaccaaatggaactggctggggaaagcctggctaccctcaatacctggaagaagagctaccagaaggcggctgagctttttccggaaatccagcgcttgattgaagacggggcggacgaaaatgcccgctaccgcctggtcaagtcccaccaaagcattaagcaggccagagaactggttgactccgtttctgaagatgtcaagaattcatccgacgtcttcacccagcttttggaatcaaaccgggaaaacaaggcccaatatgacgaattgatgcagagctaccgggaaatccgcaaggaaattctggcagattcctttgactacagcgtggccctggaagaaatcgaaaaccgcctgtcagccatggaggaagattttgcccaggccaagaacctgtcagcccagggcgaccatgtcgaggctaagcgggtcttgtcaaagatccgggcggacctcacggccttaaagaccaagctgccagaagttaaagaggatcagcacgacctgcagaccgtttttgctgaccagctggatgaaatcgcggctggctataaggaaatgcgggatgccaagtacggcttcggcagcctggacgttctgctggaaatcaggcaaagcaacgaccagatcgaccggtccctggcggctttggcccagctggacttagaagagaccagcaaggggatgaagaaggttgaaaaggaaatcaagaccctctacagaatcctggagaaagaatataaggcccggccttttgtggaaaagaaccaggacaagctgcagcggctcttgacccaccagcagaccgtcagccagcagctgatcaagaaactgcgccatatcgacgaaagctatgaactgacccacggggaactggacgaaagccgggagcttgaaagagaagtccacaagatggattctgactacatccgggccagccagcggatcgctgacggccgggccgtctactctgaagtccaggacgactggatcaagatcctgggccgcctgcaggagatcggcaagcgccagcaggaattgtcggaagcagttgacggcctctatgaggcggaagaagtggctcagcggtcaatcaaggaattcaagcagcaggtctctttggtttaccgccacctcagccggcagaatctgccggggattccggaaggctttttgcaaatgtacaccctggtcattaatgaaatcagcaagaccagcggggagctcaaccaggtccggatcaacatggagaagatctctgaagaactggtgcaaatctcagatgacgttgatcgcctgcaaagagaagcggaagacattatcagttcagccaatctttttgaactgaccatgcagtattccaacaagttcctggacaatgaaactgtcgtccgggcccgcagaaatgccatgaagctgtatgaccgggactacaactacaaggatgccctggacacgatcgccacggcggtggagcgggctgagccaggcagctaccagcggattgaaaatgcctattatcaagagcaaaaagaacttattgattgaagccaagcggattttggactaaaatagaatatcatttgtaattaagcggtcattaaaatggccgcttttttaaggagcaagaagcgtgatttattttgacaacagtgccacgaccaagatggcgcctgaagcattagatacctacagccaggtggtgaccaagatctggggcaacccttccagcctgcacaagctgggtgaccgggcccatggcctgctggaagcttcccgcaagcaggttgcagacttgctgggagtaaataccgacgagatctactttacttccggcgggacggaatccaacaacacggccatcaaggggacggcctgggccaagcgggaatttggcaagcacatcattacctcatccgttgagcatgcctcagtggctaatacttttaccgaactggaaaacctgggcttccgggttacccgcttgccagttgacaaggaaggccgggttaatccggaagacttgaaggcggccctggacaaggatacgaccttggtctccatcatgggcgtcaataacgaaatcgggactatccagccgatcaaggaaatttctgaaatcctggcagactacccgaacatccacttccatgttgataatgtccaggctctgggcaaggggatctgggaccaggtcttcacctcccgggtcgacatgatgagcttttcttcccacaagttccatggcccgcgcggtatcggcattttgtacaaaaagcgcggccggatgctgatgcctttgtgtgaaggcggcggccaggagaagggcttgagaagcgggacggaaaacctggcagccatcgcggccatggccaaggcagcccgcttgcttttgacggacgaaaaggaaaaggcggacagagaatacgccattaaggaaaagatcagcaagtacctggcaggtaagccgggcatccatatcttctctcctttgaaggcggactttgccccccacatcctctgctttgctttagaggggatccggggcgagaccctggtccacactttggaagaccaggacatctacatttccaccacttctgcctgcgcctcaaagaaggcggacgaagccagcactttggtggcgatgaagacgccagacgcgatcgccaccagtgccatccggctcagctttgacgaaagcaatactttagaagaagcagacgaattcatcgcggcttttgacgagatttaccagcactttgccaagatcaaccacttaggagaataaatttgcaatacacagaaatcatgattcgctacggcgaactgtccaccaagggcaagaaccggaaggacttcatcaaccgtcttgccagcaatgtccagaaggttttgcacgacttcccggatctgaagatccagacccaccacgaccggatgcacatccttttgaacgggaccccttttgagccggtcaatgaccgcttaaaggtcgttttcgggatccagacctattccccagtcatcaagactgaaaagagcctggaagccattgaaaaaactgccctggaactgatgcaggcaacttacaaggccggcatgaccttcaaggtcaataccagaagaagcgaccacaagtttatctacgacactaaccaattgaaccaaatggtggctgactacctttataaccacatggaaggcctgcaggcggaaatgaagcacccggacatggtcctgcttttggaaatccgccaggacggagcctacatctccaaccagcttctgcatggggcaggcgggatgccagttggcacggccggcaaggcagtgatgatgctgtccggcgggatcgactctccggtagcttcctacctggccatgaagcggggcgtgaacatcgaaatggtccacttcttctcaccgccatacacttctgaaaaggccctggccaaggccaaggaactgaccagcattctggccaagtacagcggccggatcaacttcatcgaagtaccttttgccgaaatccaggaaacgatcaaggaaaagctgcctgagggctacttgatgactgttcagcgccgcttcatgctgcgtctggccgatattatcagggaaaagcggcacgctttggccatctttaacggggaatcagttggccaggtggcttcccaaaccttggaatccatggcagccatcaatgacgtgacgaccactccagtattgcggccagttgccaccatggacaagactgaaatcatcgccaaggctgaagaaatcgggacctttgacctgtccatccagccatttgaagactgctgcaccatctttgccccgccgcggccaaagaccaagccaaagatcgacaaggcccgggaatatgaaagccgcctggacgttgacggcttgattgagcgggccttagccggggtcaaggttactccgatctacccgggccagagcttccttgacgacctggctgaagaagacgcggacctgctttaatgctgcgcctggacaaatttttggccaacatgaaggtgggctccaggtcccaggttcatgagatcattaaggccggccaggtgacggtcaacgggaaggtctgccggtcagccaagcagaaggtgaaagaggatgcggaagttctggttaatggccaggcagttgtctaccagcaataccactactttttgctcaataagccagctggcgtcttgtcggcaacagaagactcccggcaaaagaccgtcctggacctgctaaaagaccaggaccgttatcaaaaaatcgctccagtgggccgcctggacaaggacacgaccggcctcttgcttttgaccaatgacggccaattggcccaccagctcctggctccggaataccatgtgcctaagacctattacgcgcttttggccggagtagccgacgaagaaacggccaaggcaattgcggcaggcctcactttaaaagatggaacggaattaaagccgggccagctgaagatcttgcggcaagacaaggaccaggagcagtcagaaatcgagatcaccattaccgaaggcaaataccaccaggttaggcggatgtttgcctcccaggggatgaaggtcttaaagcttaagcggctgagcatgggacctttgactttgccggttgatttagctcctggctcttaccggcctttgacagaagaagagctggcggccttaaagcaagttgccctttaatggctgaaaaaattatgctatactttgtgacaaagccaagatcaagaggtggcgcttcatgacagagaaaggtcatttaagctgagagaccggaaggcgcctggtagcttgattcgctggccggctgaaccaggagtaagccggtccggtacccgcgccgttaccgcgtttaagcggagcattatgctcaatttaggtggtaccgcggttatatatcgtcctagacatttacttgtctgggacttttttttggaggaaatttatgacagaattagcaccaaaatacaacccgcaagaggttgaagctggccgctatcaagaatggctggacgaggacttgttcaagccgtccggtgacaagaaggccaagccttactcaatcgttatcccgccgccaaacgttactggcaagttgcacctgggccacgcctgggacacggcaattcaagacaccttgatccgctacaagcggatgcagggctacgacaccctttacctgccaggcatggaccacgccggcatcgccacccaggccaaggttgaagcacgcctgcgtgaacaaggggtcagccgctatgacctgggccgggaaaagtttgtggaaaaggtctgggaatggaaggacgaatacgccaacatcatcaagagccagtggcaaaagctgggtctgtccctggactacagccgggaacgcttcactcttgacaagggcctgtccaaggctgtccgccgggttttcgttcagctctataatgaaggcttgatctaccggggcgaatatatcatcaactgggacccgaagctgcggacggctttgtctgacatcgaagttgtccaccaggatgaccaaggggccttctaccacatcaactacccgctggctgacggctctggcagcgtggaaattgctactacccggccggaaaccatgtttggtgacacggccgtggctgttgccccaggggatgaacgctacaaggacctggtgggcaagaagctgattctgccgctggttggccgggaaatcccgatcattgaagaccaacacgtcgacccggaattcgggaccggtttggtgaagatcactcccgcccacgacccgaacgactttgaagttggcaaccggcatgacctgccgcggatcaacgtgatgaacgatgacgggaccatgaacgacaaggcgggcaagtacgccggcatggaccgctttgactgccgtaagcagctggttgaagacctcaaggctgaaggctacttgatcaaggttgaaccaatcgttcactcagttggccactctgaacgctccggcgtgcaagttgaaccccgcctgtccacccaatggttcgtcaagatgaagccactggctgacaaggttttggaaaaccaaaagggtgaaggcagagttaacttcgtgcctgaccgctttgaaggcactttggagcggtggatggaaaacgtccacgactgggtcatctcccgccagctctggtggggccaccggattcctgcctggtacaacaagcagaccggggaaatgtacgtcggtgaagaagcgccagcagacattgaaaactgggaccaggaccaggacgttttggacacctggttctccagtgccctctggccattctcaactttgggctggccggatgaagactcagctgacctcaagcgctacttcccaaccaacgccctggtaactggctatgacatcatcttcttctgggtttcccggatgatcttccaaagcttgcacttcaccggcgagcggccatttgacaatgtcgttttgcacggcttgatcagagacgagcaggggcggaagatgtccaagtccctgggcaacgggatcgacccaatggacgtcatcgacaagtacggcgctgacgctttgcgctggttcctgttgaacgggaccgcgcctggccaggacacccgcttcagctacaccaagatggacgctgcctggaactttatcaacaagctctggaatgccagccgtttcgtcatcatgaacctgccggaagatgccaagccagcccaaaagccggataccagcaagtttgacctggctgacgcctggatttttgaccgcttgaaccacaccgttaaggaaactaaccgcctctttgacgaattccaattcggggaagccggccgggaaatgtacaacttcatctggaacgacttctgtgactggtacatcgaaatctccaaggttgccctctacggcgacgacgcagaactgaaggccagaaagcaggccaacttgacctggattctggaccagattctccgcctgatccacccaatcatgccattcgtgacggaaaagctctggctgtccatgccgcatgaaggcaagtccatcatgaccgctgcttacccggaagcccacgctgaatttaacaatgccaaggctaacgaagacatggccttcttgatcgaaatcatcaaggctgtccggaccatccggatggaagtgaacgctccaatgtccagcgccatcgacatcttgatccagctggatgacgaaaagaataaagcaattctgcgggacaacatggaatacgtggaaaacttcctgcacccgaagaagctggaaatctccggcaagatcaaggcaccgaagttagccaagacggctgtgatcgccggggcccagatcttcgttccactgtcagaactggttgacctggacgaagaaatcgccaagatgggcaaggaagaagcccgcctggaagctgaagttgaccgggcaagcaagaagctggccaacaagggctttgttgaccacgcgccagctaccgtggttgaaaaggaaaagggcaagctggccgaatatgaaagccagctggccggcgtgcgcgaccgcatcaaggaattgaaagaaagtcgttaaagacgtgaaatttaggacagttaatgaacttaccgcttacctctatcatttgccgcgcttgcacgaaaagagcgacctgacctatgtcaaaagggtgctcaaggctctgggggatccccaggacaaggtcaagtgctgccacattactggaaccaacggcaagggctcaactgcatattacctgagcaatctgctccaaaaggccggtcagcagactggcctttttgtttcgccctttatcatccgctttaacgagcggatccagctgaacgggcaggcaatcgcggatgaggacctgctggaagtggcaaatgaagttgaagccgcagtcggccacttgcgggaagaagaggcagattttgccctggtgacctttgaatatgaagttgccatggccttcctcttttttgccaagcaaaaatgtgattacgcggttattgaagtcggcatcggggccgagcatgacaaaaccaatgtgatgacgccagtagtcagcttgattaccactatcggccttgaccatgagcagatcatcggaccgactttggctgatattgccaaagaaaagagcgggatcatcaagccggctgtcccagtcatcctcggtgacatcccagccagcgtaaagggaatcgttgaagaaaaaataactgaatcagctagtccttcttactggctgggccgggacttccatgtcaaggaagaaaaagcaggctatgagcttgcggttgccgggcaaaattaccagttgccggcctggccccggccagaagctaaagacgcggccatggccttggcggcttttgcccttttgccgcttgctttaagtgaaaaggcagctgaagctgccttaacccagaccacggttcctggccgctaccaacgcctggaaaaggcgggatgcagctttttattggacggggcccacaatgtccaggctggaagcgaacttttgccatatgcccgccgcctggccaaggataaaggcggccggcttttggtcttagctggcatgatgaaggacaaggacttgagtgactttctgactctgctgaaagatgaaaaagtcaccttgaccagcctggcttacccgcgagcagctaaaaaagctgacttcccggcctgggtccaggaaaaatttgcctatgagggcgatttgggccaggcattaaagcaagtgatggcggaagctggagaccgggacttgatcttggttacgggttcattttacttggtcagcgcggtcttgcagcttctgcagagcgcctgagcatgaagggggaaaatatgcgtgttgcaggtttaaagatggacaagcagggggttatttttgacatggacggcctcctggtcaactccgaagagctctactggcaggccaatatccaggccgcccgggaatacaagctgggcatcagcgatgatgcttacctggacctggttggagccagcgtcaaggccatggatgccttttatgaaaaatattttccaaacgatgaggtccgccaggcttttgtcaagcggaccgacgacctggtctgggaatggaccgaccagggcaagctgaagctgaaggccggggtcaaggaggctctggagtactttaatgacctgggcttaaccgtcgggatcgccagcaacaactataagagcgtggttgaccacaatctctgggtgaccggctgccggaacagctttgactttatcgttacccatgacgaagttgctgagaaaaagctccggtccaagcctttcccggacctctatctggctgcccaagagcgcagcggcctgggtaaagaccagctcttgatctttgaagactccagcatgggggtcgaagcggcggaaaatgccgggattgactgcgtcatgattcccgacatcaagcccgcttcagccgaagaccgggccagagcccagctgatttgcctggacttttttgactttttgaaaaaaatttcttagtttttggcgtaattagtagtagagcgtaaaaataaggaggaaatgcaaatgaccgaaactacgcaaaactactattatgttgaaagtgaccgtgacctgctcaagctgctctttgaccagctgccctgccagagtctggaagacctgttgcagctgctggatcaaaagcacattgccagcttcaaggacatcttggactacgcgtcaggaccggactgccccaatgacctggccttgaccatcgaggtggccatggaccggttgcggcggactgacatgcggcgcagctctgactgggccagcagctctaagattggcaactacctggctaataaactgctggggcaaaagcaggagcagttctgggtcctctattttgaccagcagcagaatctcctgggggaaaaaatgcttttccaaggcaccctggaccggtcctgggtccaccccagagaaatcttccgctgggcggtggtctacggctgcgccagcatcatcgtggcccacaaccatcccagcggggcgctgaccccgtcagacaatgacctggaattgaccaagggcttgaaaaaagccagcaagatcatgaagatcacctttttggaccacttcatcatcggcgggggtgaatatttgagcctgcgggagcgggaattgttttaaaattagcttaattttccgccaatccatgactttcacgggcattatgctataattaagcaagattaagcgagtaaataaggagagatatccgtgtttggattaggttcaaagaatatcggtattgacctgggtaccgccaacaccctggtctacgttgaaggcaaaggcatcgttttgcgtgaaccttcagttgttgccaagaataccaagactggcgaagttattgcagtaggttcagaagccaaggaaatgatcggcagaactccaggctcaatcgtggctatccgcccgatgaaggacggagttatcgctgactatgacacgaccgcggccatgcttaagtactttatgggcaagacggtcggcaattccaagccttcagtcatgatctgcgtgccttcaggcgttactgaagttgaaaagcgcgctgttatcgacgctgcccgggtggcaggggccagagaagcttacgtgattgaagaaccattcgccgcagctattggtgccggtttgccggttatggaaccaactggttccatggtcgttgacatcggtggtggtacgactgacgtagccactatttccctgggcgggatcgtttcttcaacttccattcgccaggctggtgacaagttcaaccaagcaatcaccaactttgtgcacggcaagtacaacctgctgatcggtgaaagaaccgctgaagacatcaagatccaaatcggttcagcttctgttgaagcagccaaggaaatcgaatcaatgaccatccgcggccgggacctggtgtcgggcttgccgaagtcattggaaatcagtgccgttgacgttgcaactgctattcaagacgttgttcaagacatcattgttgcgatcaaggaaaccttggaattgacttctcctgaaattgccgcagacgtaattgaccatggtatcgtcctgaccggtggtggtgccctgctcaagaacttgccagaagtcatctctgacgcgaccaaggtgcctgtcttcatcgctcaagatccgcttgactgtgtagcaatcggtaccggtgaatctttgaagcacctggacgtaatgcggaagactagcagataagaaataagaaaaccggcctccgggccggtttttatattggatgggtgtttatgaagaatttttttcaaaacagaaaaatgctggcggctttcgggaccgtggcggttttggcagccctgctgggctcaacggtgatgctgagaaacaacctgagcgcgccgcttttgatccagcgcctgggcaatgacatcgtctccgtgggctcaagaatcgtgagcgtgccggtttcctggtttactgatggaatcgacagcgtcaaggacttgcagaacgcggctgatgaaaacagtcacttaaaaaataaggtggctgagctggcccaggtcgaagccagaaatgctgccctggaaaaggaaaacaagcagctgaaagctgccgctggaattaaaaagaccttgaccggctacacgaccacgactgcttcagtaatttcccgctccagcgacagctggtcagaagtcttgaccattgacaagggcaagagctccggcttgaagaaggacatggcggtcatgtccggcggcggcgtgattggccggatcctggaagtcgacgcggccaccagcaaggtagaactgatcaccacgactgacagctcagccaatcgttttgccgtgcaagccacgacagacacgggcaaggttttgcacgggatcatcagcgtccagtcaaacggcactttgacctttacccaggcctccagctcaagcaaactgaagaagggaaccaaggtctacaccagcggcctaggcgggacttcaccgaaggggcttttgatcgggacggtggcagaaaccaccaaggacagctttggcctgtctgacttgatcaagatcaagccggccggcaatttgagcgacgcgtccgtggtaacggtcgtcaaaaggagcgtggctggctaatgcggattttcaagcaatgggttttggccatcgccctttacctggctctagttatggaggggaccctgtccgtttacctgcagccggccttgacttaccagcacggccgggcggggctcttgctcctgccaatcgccgttttgatcatcgcctatgaagacgaaagaaacgagaaggaaatctggctggccctggcggccggagtagttgccgacctctacttctgggggatcatcgggatctacacctttatcctgccggccctgtcggcttttggccgctggtatgcccgggtctttccagaactcttcgttttccgcctgctgggcaacatcgtggccattaccgtcagctgcctttacacctggctggttttccgtttgatcggctggactgatttgaccttgaaggccatcggcttcagcctcttatacacggccggctggacgaccgggatcagcctggcaacttactggctttgggccaagctggccagatcttatcctttcctggttgacctggacaattaccggtattaatgagcaataaaaaagcggccagcgtgaagctgaccgcttttgagcgtattgcagatttattgggcagttaagtagtaaagaacagaggctgccacgccaaagagcgtgatcaaagccatcaagactaccatgaaattctcaatcttttgaaatgttgactttttctttttacgtgccatagaagcctcctatatgagagtgattataacctttttttcggcgatttgcaatttccttgctgcactttaagagaaaaataaaaatgtgctaaactagctagcagatggaggaaaattatgctgatgatattcttattgccggcctttggcctggcttgcgcctacctggtcaacctgatctggcctaaagccgcctttaaaggctatgatgtcatgcctttctttttgatctacgcctgccagctgatgaccaacttaaagggcgtgccatcctttttaccggccggctttttgctttacttcatattgatattgctggccgccatcagatgggccatgatcaacaagaacatttccttagggaagatgttccgccagttctggtcctacctggatgcctgcagtttcttttggtattgcggattgcttttggtcgttatgatctgataaattactgtcagccgcttagcgcggctggcagttttttaattttttcggaaatctgcttgtgcttttcagatattgtggtttaaagtggggatttgtggtaaattgttaacagaagggaggagcctgccatgttcatgggcgaataccagcacaatttggacgccaaaggccgtttgattatcccggccaagctgcgtgaacagattgggccagccatggttttgacccggggcatggaaggctgcgtttttggctatcctttgacggaatgggccaagatcgaggccaaactggccaagcttcccttgacgaagaagaacgcgcggagttttacccggatgttttattccggcgctatggaaggcgaattcgacaagcaggggagaatcaatttgtcccccaccttgaagaagcacgccggcctggtcaaggaatgcgtcattgtcggcgtctccaaccggattgaaatctgggctaaggagcgctgggaagagtattctgacgaagccaacgaaagttatgatgaaattgcggaagatttggacgatatcgagttataaagatggaatttaagcatactagcgtgttattgcacgaaacaatcgacaacctggccccgcaaagcggcggcacatatgtggatgccaccttcggcgggggcgggcatgcaagatacctgcttagtaagctggacaaaggaaatctaatcggtttcgaccaggaccagtacgcgattgacaccgcccagagcaattttgctgcctttttaaaagaagacagccagccccgcctgcagctggtccacaacaacttcagccacttaaaagaggagctggccaagctggggattagcggcattgacggcatctactacgacttgggtgtttcatctccgcaattggaccaggctgaacgcggtttttcctaccgttttgacgcaaggctggacatgcggatggaccagagccaggactttgatgcttaccagctggtcaaccagtatgaccaaaagcagctggctgacgtcctttaccgctacggcgatgagaagttttcccggcagatcgccagaaagatcgttgaaagaagacgggccaagccgattgaaactacttttgagttagtggagatcattaaggaagcaattccggcagcagcccgccgcagcggcggccacccggccaagaagagcttccaggccatccgggtggaagtcaaccacgagctggacgttttgcgggcatctttggaagaagccatcagcctgctcaatcccggcggcaggatctccgtcatcaccttccagtctttggaagacaagatcgtcaagcagaccttcaagaagtattcagaagttgaaattccccgcgggatgccggttgtgcccgaggggatcaagccaactttacgcctggtcaaccgcaagccgattacggccagcgaggaagaactggcggaaaacaaccgatcacacagtgcaaagttaagagtagcagagaagttataaagaggaccacaatggctggaaacacagttagaaaatacaattacgaaccagaagaggaagcccggaaaagtcctcgtttggtggttgatccgcagaaggtgccatactcagcttttgaaaagctgctggcagtcttgggcctgcttggggcagttgccttgattaccttgaacgtgtcggctagtgtttcggcgacttacgcccagcggcagctgaccaacgtcaaggaatcaattaccaagcaaaagaacgcaacagctgacttgcagcaggaaatcggtgagctgtcatcaaatacccgcctgaacaagatcgcccaaagtcaaggactgaagttgcgtgaaaataacattaggacaattcgctaatgaagaagaccactaatttaagaaaaataaaatccagagcacacggctatcgctttacagttgggagaattctagagctagtcgttgctttggtttttcttttttttgccggccgcatgctttatttgtcgatttcaaaaacgattgatggccaggacatcagcaagagaactgccgcgatctaccgccgcaacaccgtattgaccgctaaccggggcacgatttatgacaagaacggcttgatcattgcccaggattcccacacctacacggtctacgcgattttggacaagacttatgttgactctaataagaaaccactctatgttcaagacaaggagaaaacggccgataagctggccacggttttgcccctttccaaggcaaaaatcctcaagtatctaaacccgaaaaataaaaacaccttccaggttcagttcgggacagccgggtccggtttaaccttgactgagaaaaagaagatccaggccatgcacctgaccgggattaagttcatggaaacgccgtcgcgcctgtatccaaacggggttttcgcttctaacgtggtcggctatacggtttctcaaaccaattccaagacgcagacgacggaactggaaggggtgaccgggcttgaagcctacttcaacaagatcctcaaggggaccaacggctatgagaccagcatggtcgactcttcagaaaaccagctgccaagcggatcccactcctataaggcggctaaagacggggacaatctatatttgacgattgactcccagctccaaagcgccctggaaacctatatgagcaaggtgcagaagaactacaagccgaaagctatgacagcggtcattgaggacttgaagacagggaagatcctggcagcctcccagcggccgaccttcaactctcagaccaaggctggaatcagcaaggccggcagcaacctcctggtccagtccatctatgagccgggttctgttttcaagatcctgtctctggccgccgcggtcaacagcggcaactacaaccctaagtcctactaccggtcagggtcaattaccgtttccggctccactatctatgactggcagaagtccggctgggggacgatcccgttctcccaggccttcccgcgctcgagcaatgtcgggatggtctacctggaaaagaagatcggggccaagctctggcgcaagtacctcaatatgttccgcatcacccacaagaccgggattaccctgccaggtgaagtttccggcagcttctccttctcaagtccggttgaccaggcggtaacttcctttggccaaggggtcacggtcaatgtcatgcagatgatgcaggtttacagtgccctggccaacaacgggcagatggttaagccgcaactggtggaaaaaatcaccgattcttcgggcaagacaatcaagagctacaaggtccagaaggttggcaagaagatttttactgcccagaccagaaaagtagtcatgcagaacatgaagaaggttttggacaaggaaatcgggaccggccacatctactacatgaagggcaaggacttcgggatcaagaccgggacggctcagattgccaagtcaaccggcggctacatgaccggggaccgggactatgtcttctcagtcgtggggattaccccaactaacaatccccgctactgcatctatttgaccatgaagcagccaagcaagctgggcagcggggccgaaacaatcctggcccagatctttaagccgatgatgggccggctggttcttttgaacaagggggacaagtcagcttcggccgtggtcaaggtgccgaagtttaccggcatgacctatgccaaggcgaaaaagaccgcaacctcaaatggtctttccctggtccgcctggggactggttccaaggtcctcagccaaaaggcaggggccggtgaaacggtatccgttggcagcaccgtctttgccttgactagcggcaagatcagcctgccggatttgaccggctggagtgaaagccagattgaggcctacgcctccctggccggcatcaagctgcagctgtcaggcagcggcaaggtcaagtcacagagcctggcccaggggacggtagttaaatcagggacgaaattgaaagtagagttaaaggagtaatagatcgatgcaagcaagtttgattgcttttatgatttcactggtactgagcgcattgcttttgccatggctgatcatctggatgagaagccacgacgaaggccagcagatccgggatgaagggccgaaatggcatgaaaagaagtcggggaccccgaccatggggggcacggtcttcgtgctttcagccgcggtcgcaacggttgccatctgtgcttacaagggccagctgtctaagacagtctggattttgttagttgcccttttgggctacgggatcatcggctttttggatgacggcttgaagctctttttcaagcggaacctgggcctaagagcctggcaaaaaatggccctgcagctgctcgtcgctgctgctggtatcgttttgctggcggccagtgacaactttgacttcgctctttacctgccttttgccggggtggtcaagaacgtggccttctttaccttgtttgaagtcttctggctggttggcttttcaaatgccgtcaacctgtctgatggtctggacggcctggcaaccggtctgtcctttatcgcttacggcacttacgcctggctggcctttaagagccagaacttcggcgttctggtcttctgtatggcggtaatggggggcctggcagccttcttcatgttcaaccacaagccggccaagattttcatgggggatgccggttccctggccctcgggggcggtttggcggcagtcagcatcttcttgggccggccatggtccttgctgttggtcgggattgtctttgtctgcgaaacggccagcgttatcttgcaggttgcctcatttaagacgactggcaagcggatttttaagatgacgccaatccaccaccacttcgaaatgctgggctggtctgaatggaaggtcgacctggtcttctggctggtcggtctggttggcagcggaatttacttgatgatttggggataattaacgatgaaagaaatcgataaatatgctggtaaaaacattcttgttttaggtctgggccggagcggcttcgcggtcagcaagctgctccttaagctgggcgcgcgtttgactttaaatgacaaggccgacctggctgctgacccgaaggctaagcagttagctgacctgggcgtcagagtaattggcggcagccacccggttgacctgtttgaccaggaaaagtttgactacctggttaaaaaccccggcatcccttacgagaacccgatggtggctaaggccagcgaaaaaggggttccgatcatcactgaacctgaagttgctttaagcgccagtgagtcgccttatgtctgcgtcactggttcaaacggcaagaccaccacggtcatgctgacccagcagatcatggatcactacctgcaaaagcagggccaccacgcttacgcggtcggcaacatcggctggccgatttctgaagtagttttaaaccaggccggcccagacgacctgctggtcgtggaaatgtccagcttccagctgatgggggtaaccgacattgagccaaaggtagccgccatcgttgacatctataacaatgtccacctggactaccacaagacttttgataactatgttgacgccaagctgaacgttggccgcttccaaaaggccagcgactacttcctggccaactttgaccaaaaggatatcctgactagagaagaaaaggcaactaaggccaagattctgaccttcagtgaaaatgatccagctgcagacttctacattggccaggactacttgatgcatggcgaagaaaagatgatgaagattgccgacatcaagctgccggggatccacaatttgcaaaactccctggttgccatcggcatcagcagcctgatgggggcaggcaaggacgacatcgcggccgttttgtccaccttcaccggggctgaacaccgcctgcagtacgtgaccacccttgacggggtcaaggtctacaatgactccaagtcaaccaacattgaagcagccaccgtggccatccagtccttcaagcagccggaagtccttttggccgggggcctggaccggggctttctctttgactccctggttgatctgtttaaaaagcacgtcaaggccatcgtaacttacggggaaacccgttacctgctggcggacgcggccagaaaggccggaatcaagaccatcgtggttgttgacaacctgcatgaaggggttaaggaagcatccaagctggctgaagccggcgacgtcctgctcttttcaccggcctgcgcttcctgggaccagttcaagacctttgaagaacgcggcgaatattttgtcaagtatgtaaaagaattggaagagaaataaaatgagagttattttttctggtggcggcactggcggccacatttatcccatcatggccttgattgaacgcctgaaggaagaaggcatttgccaagacgatgagattttgttcgtcggcaccaagaaggggctggaatccaagatcgtgcctgccgccggggtcaactttaagaccatcgacatccaaggctttgacagaaagcacctgttgaacaatgttaagaccatccagctctttttaaaggcgactaagcgggccaaggaaattttggctgactttcagccggacgttgtcctgggcactggcggctacgtcagcggggcgattgtctacgaagccagcaagatgaagattccgaccatgatccacgagtccaactccgtggtcggggtggccaacaagttcttaggccactacgtggacaagatctgctatacttttgacgacgcggccaaggaatttccggaaaaaaagaagctggtcaagaccggcaacccgcgttcccagcaggttttgagcttaaatgccaagccagttgacctggcaggcgatttgggccttaacccccagattccgactgtcctggtcttcgggggttcccggggcgccttggccatcaaccgggtcatgctcaagtctttgatggagctgaagaagaagccttaccaagtgatctgggcaaccgggacttactactatgacgcgattgagaaaaagctggctgatgttgactacggcgactccatcaaggtcgtgccgtatatcgccaacatgccgggccttttgccggaaatgacctgcgttgtttcccggtccggggcaaccagcctggctgagttcacggccttgggcgtgccagtcatcttgattcccagtcctaacgtgacccacaaccaccagatgaagaatgccatggacctggaaaaggccggggcggctttggtgattgcggaagatgatctgaacgaaaacaccttcgtgtcctccatcgaccacctgcttttggaccatagctatgccgaaaaaatgcggcaggcttccaaggccttgggcgtgcccgatgcatctgaccaggtcatcaaggtcatgaaggaaattgccaagaagaactgataataaacgattaggaggaagcaatggctcgcaaacggataacccgcagagacccagaagaggagctctctaaattcttacgccacgaacctggccaggggcaggaaacacgcaaattgtcgagccagcttacttcgcttaagaaagaacgccggcggggcctgtttacccggctgggttcgatcatggccgtctgccttttggctatcgcttttttaacctactacgtctcgcctttagccgacgtatcaacggtcagggtgctcggagctgatgacctggatggcaaaagcatggttgaagtagcccagatcaaggcttctgacaaggtcgttgatgccttgcgggggcaaaagaagatcagcaagaagctggccgctaaataccctgaagtggcttcggtcactttatcggtcaaggggctgaacaccttgaacatgcaggtgcatgagcggaaagtgatcggctatattaaagacgggttcagctaccggaaaattctcgccaacggggaactgggcaccaagagcctggcctggagcgaggtcgaccatgacaagccgctttttatcggctacagcaagcaggtggccttgaagaccaaccttaaaatttttaactcttttcctgaatatttcaaaaagcaggtcaagatgctgtctggcaataccaggcgcaaaacccagatgattctggtcatgaaagatggcaatgtgataatcggcaacactgagacgataaaatccaaggttaagtactataactcgattaaacaggatttgacaaccaacagtgtcattgacatggaagtcggtgccttcacccgccctttgactagcgcggaaaaaaatgcttacggcttgtcttaattttgtatctttaaagaattatgatattatctatatattagaattgggggaaggaaacttggataattcaactttgttagttggtttggacattgggaccacgagcatcaaagtcgttgttgccgacgccgctcatcaagagctgcaggtttacggggcagttgccgctcctacgcgggggatgcggcatggcaagatcgttgatatcgatcaagttgctgaatctgtcaaaaacgctatccagcaggtcagcgagaagaccaatagcaagatcaaccgggtagtgactgccttgccagtcagcatgctgcagctggaaagtacaaccggcctggtcaatatttctgattccggcaaggaagtcgctaatgaagacgtccagcgggtcatgtacgcggccatcaaggctgccaagaaaaaggaccggcaggcagtggccttcttccccagccgctttttgatcgacggggaaaaggacgttgacgacccgcggaccatgattgcccgctcccttctcgtccaggggctggtaatgacggcgccgtcagcggagattcacaacatcaacacggtcttaaagcacgctgacatccagaacaacttctttgttccggcaccgatggctgtttccagcgtagccctggatgaggcagagagaaccttcggggcaattctgctggacatgggtggcggcagcacgaccgccacggtcatccgcgatggccagatcaagtacgctaccgtcgacttgaagggggcggccgacattacccacgacatttccgtggttttgtcaacgacaatgagcgatgctgaagctttgaagcgggattatgggtatgccgacccggacctggcttcagaaaatgaaaaattcgcggtcaaggctgtaggcaaggacgaaaacaacctggtcagcgagaagtatctcagtgagatcatcaatgcccgtctgcagcagatcctgcgccgggtgggccggggcctttacaaccatgatgccctgtctttgccggccggggttattattaccgggggcagcgctcttttggccggaattgatgacctggtagcggctgactatgacgttaaggccaagatctaccagtcagcccagattggcctgcgcaatccggtttattcagtggcctacgggatcgtcaactatgccaacaacctgaacgatatcggctacctggccaacaccgtgatttatcaagattcagctcttgcttcaaacgagcggccggccagtgccggaaatagtcaaaaaaatgctaaaagagtgacgcggaaagctgaaaatgacactgaattagcttataataagactaagcttgatggggaagtagacactgaaacccggcatgaagaaaagactaataataacgaaaataaaaacaagggcttagctgcatttctcagaaagttctttgattaagggtggtaaacgtagatggctttggattttacttttgattcagatgacaacaacaacgcagttatcaaagtaattggcgttggcggggcaggcggcaatgccgtcaaccggatgattgaagacggcgttcaaggcgtctcttttatcgcggccaacactgatgtacaggctttgaacagcaacaacgctgaagttaagattcagctggggccgaaactgactaggggcttgggggcaggttcacatcctgaaaccgggcaaaaggccgctgaagaaagcgaagaaacgattgaagacgcacttaagggtgctgacatgattttcatcactgccggcatgggcggtggtactggtaccggggcagccccggtaatcgccaaaattgcccgggaaaccggtgctttgacggttggggtggttacccgtccattcagctttgaaggccctaagcggtccaagaacgccgctgaggggattgctaagctgaaggaatacgttgacaccctggtcatcgttgccaacaaccggcttttggaaatcgttgacaagaagacaccgatgatggaagccttcaaggaagccgacaacgtcctcaagcagggtgtccagggcatttccgacttgatcacttcaactgactacgtgaacctggactttgctgacgtcaagacggtcatggaaaaccagggggcagccttgatggggatcggccgggccagcggcgaaaaccggacggtggaagcaaccaagatggcgatttcctcaccgcttttggaagtttccatcgacggggccaagcaggtcctcttgaacatcactggcggtccggacttgaccctgtttgaagcccaggatgcttcagaaatcgtttcaacggctgccggcgaagatgtcaacatcatcttcggtacggccatcaaccctaacctgggcgatgaagtcgtggttacggtgatcgctaccgggattgatgacgaagctgaagcagctgcttccaagcaattgccaggccgcggccaccaagtgagtgcgcctagagaaaagccagctgcgcctaagatcttgactccggaagaagccgctccagctgctccagtccaagaagcgccagttcaagctgaagcagctaagccgaccagcccggtcaaggaagagaagccagccatgatggacccgatcagcgtttggggcctaaacgacgatgactactcaagacggcaaaacccggaagaacaaaagcggcaggctgaagaaaaggaagcggcttcggatgctgacccaagcagcgccatttcccaaattgacatcaacaccgattacgacgacgatgatgacgacgatattccgttcttcaagcaccgccgggaccggtaaaggaggcagagtaaatgaacaacaaatttaaggattttttcggcttcggcgacaacgattcctatgaggaaagagacgcctacgaggaacattacgacgaacaagaagaaatgcaaaacagcaaccggccaactaatagccgtgacagcaatgtcgtgtccattaaggccggccaggctggcagcgggccaagcaagatcgtcctttacgaaccgcgggtatattctgacgctaaggaagtagcccagaacctgctcaaccaaaaggcgatcatcatcaacttcagccggatggacgacgcttctgcccgccgggtagtcgacttcatcaccgggacggtttacgccctcaatggtgaaatccagcgcgtcggcgacaagatcttcttggctactccgcccaagtttgaaactgacggcaagatcactgaactgcttgataagaaagatactttaggttaatgcaaacatttttggtttttttgtaccggctgctctactttatctgtgaagcttacagcctcttgatcattattgatgcctttatgtcttggattccggccatcagcgaatcagcggccggccgctggatcgaccggatcgtcaaccccttcgtcaaccttttccggcaggggccgatcctgcgcttgatctacgcgactggcatcgacatttcaccaatgattgcactgtttgtgatctactttgtccaaagcgttgccttgggctggctctttagcattttagggaggatcttcctgtgatggacaagcgccaggccagcagcttttacccacattttgcaattgaagaaagaccaacaattgaccaatttgttggtctttttaatcgcctcttgtttaccggccaggcctttttaacggacttcctggacccccggcaaaggcagatcatggagacgatcgccggcggggaagccatcgtgcaggcttttggcggctatgaagaagcggaaaagtgccggctctacatcagcctggaatgggagaacctgcgcccagatgactaccaggttcagctttttgaaattgaatacccgcaaaaatttgccagtctccgccacagccagattctgggcagcctggccaattccggggtaaaaacagatacttttggcgacatcatcacggacgggcaaggccggtggcagtttttcgcggaaaaagaactggctggcttttttgccagtcaaatcgaccggatggggccagtcaaggtccgcctggaagagaagcccttaaaagaccgcctggaagcagaagacaattccgagattattaccgctgtagcttcctccatgcgcctggacgcggttttagcggctctaagcaataagtcccgcagccaggttaaagaggccctggaggccggcgaggtccgcttaaactggcatgaagaagaaaaaggtgaaagcctgctgaaagttggcgacatcttgagcctgcgccgctttggccgggtcaagctcttgtctgtccagcccagcaaaaaaggccgcctgcgggtggaaggccagttttggccagcaaaaaggcaataaatatttgacaaagggctggttgatgccttaaactcttttactgtagatagaaaactttttcattgttttttatctcttacataattacgattaataaatcagactgacagtcctgcttaaaggcgatcttagcgagttaatgatggtggaagattaacacaagccggcgagcgatcagctgccgattggtctgagcggggggccggcacgataagccggcaggagtggggcctttcggggctcaatttaggtggtaccacgatagtctcgtcctattttaggatgaggctttttattttagcgaaaggattttttatatgcgagttaaggatacgctgaacctgggcaagaccaagttcccaatgcggggcaacctgcccaagcgggaagcagaatgggaaaagaactgggaagaccagaagttttatgaaagacgcttgaagcttaacgaaggccatgaaagatttgaccttcacgacggacctccatttgccaacggcaacattcacatgggccacgccttgaacaagatcaccaaggacatcatcgtccggagcaagaacatggaaggctactacgctccttacgttccgggctgggatacccacggcctgccaattgagcagcaattgaccaagcagggcgttgaccgcaagaccatggaccgggctgcttaccgggaattgtgccggaagtttgccatggagcaggttgaaaagcagcggaccgacttcaagcgcctgggcgttatgggcgactgggaccacccttacatcacccttttgccggaatttgaagccgcagaaatccgggtcttcggcaagatgtacgaaaatggctacatctaccaaggcaagaagccggtttactggtcctggtccagtgaatcaactttggcggaagccgaagtagaataccacgacgtggaatcaccatcaatttacatttccttcccggtcaaggacggcaagggcaagctgagtgaagaaaacacctacttcctgatctggacgaccactccatggactattccttccaaccaagggattgccgttaacccgaagtttgactactcagttgttgaagttggcgaccgccgttacgttgtcggtactgaccgcttgagcgccgtagccgaaatcttgggctgggacagctacaagactgttcagcaccttaaggggacggacatggaatacatggtggccaagcacccttacatcgaaggtcgcgacagccttttgatggaagctgtctacgttactgacgatgatggtaccggcctggtccacactgcttccggctttggtgaagacgactacaacactgccatgcgctacggctttgacgttttgtccccaatggacaacaagggctgcttcactgaagaaatccctgacccggacctggtgggcaagttctacactgacaccaacgaaatcgtcaaggacaagctggcggctgccggcaaccttttgcactacagcacctttgtccactccgccgctcacgactggcggaccaagaagccggtagtctaccgggcaaccacgcaatggtttgcctcaatctccaagttcagagaccagatcctggaccagattgaaaagaccaccttctacccggcctggggcaagacccgcctttacaacatgatcaaggaccggggcgactgggtaatttcccgccaacgtgcctggggcgtgcctttgccaatcttctacgctgaagacggcaccgccatcgtgacgcatgaaaccatcgaacacgtggctgacctctttgccaaggaaggctccaacgcctggttcacccacccggttgaagaacttttgccagaaggctttacttcagaacactcaccaaatggtaagttcaccaaggaaactgacatcctggacgtttggtttgactccgggtcatcctggagcggggtccaggctctgggcagagacgttcactacccgacttccatgtacctggaaggcagtgaccaataccggggctggttcaactccagtttgatcaccagcgtggctaccaacggggtagctccttacaagtcagtcctgtctcaaggctttactttggacgggcaagggcggaagatgtccaagtcattgggcaacacgatcgctcctaacgatgtcatcaagcaaatgggggccgaaatcatccgcctctgggttgcttccgttgacgcttccggcgacgtcggcgtgtcaatggacatcctgcgccaggtttcagaaggctaccggaagatcagaaacaccttccgctacatgctggccaacacggctgactttgatccggaaaaggaccgggtagcttacaaggacctgcgcaagatcgaccagtacctggaagtcaagcttaacgacttagttgccgaaagcattgtcaactacgacaagtatgacttcgctgacgtctacaagctggtcttcaagttcatcaccaacgacctgtccgccttctacctggactttgccaaggatgtcctttacatcgaaggcaaggacagccacgcccgccggtcaatgcagacggtgatctacgatgccgctgtcaagctggccaagatcctggcaccaattttgccgcacaccatgggcgaagtttggggctacttgaaggaaaaggaagaagacgtctacctgtccaacttccctgaaatcgaagactacgctgacgctgacgacttgaaggaaagctggggcgaattcatgaagctccgcgacgatgttttgaaggctctggaagaagcccgggaccaaaagctgatcgggaagtcctttgaagccagcgtaacggtttacccaggcgaagcagccaaggctgccttggacaagctggctggggaagacttccgggaaatcttgatcgtgtccaacctggtcatgggccaaggggaagtaccggctgaagccaagcaatttgaccagtccagcgtacttgtccgccgggccgaaggcgaagtctgcccacgctgccggatgtaccggactgacctgggcgctgacagccgtttgccgcaactgtgcggccgctgcgcatctatcgtggccggcgaccacccggaaatacttgaagaaggcctggaagactaatgcgaaccggacttgtaaaacaatttgccgaaaaagcaagtttcggctttatcgaagacgaccaaaatcacaaattatattttgtcttttatactgccatcaaggaggagggctataagaggcttgaagtcggccagcgggtgagataccagcttgcccagggtaaacacggactgcagtgcatcaacgtttacttggccaaagactaagcaaaggaatgacatatggatttaaaggaaactgaaatttcaacgaaggaggctttccacggcggcttcatcaacttgcatgttgaaaccgtgatgctgccaaacgggaaaaccgcctccagagagctggtcgaccaccggcctgctgccgcggccatctgcatcaacgatgaaaagaagatgctcctggttacgcaatggcgggaagcgatcaagcaactgactctcgaaattccagctggaatgattgatgctagcgacgtgagtcccttggatgcaatgaagcgggagttaaatgaagaaggcggcctgaaagccgaatactgggaaaaggttgccgaattctacacttcaccaggattttccaatgaaaagctgcaccttttctactgtgacacgctcagcccagtggctaacaaactggacctggacgaggatgaatttttgacggcagaatggtacagccttgaagagttaaagaacctgttgacagagggcaaaattgtcgacgcaaagaccatttatgctatttccgtatgggaaaacatgctgctgaccggttcagaaggttagactatgacagaaaaacgttccgattaccgccgccgccaggcagagcaagcagaaaaggcaaatagacaggaagcagctgattcagctgcttttcctgcttttaagcaggaccaggaccagaagaccttaaaggcagaaaggctgaaaaaaaggctgaattttgctatcctggtcgtgtgcctcttgatcatcctggtttgggtgattttattgaaattttaaactgaattgaggattaccgatgaaaattgcaatcgttgttccaatggctgaagaagctgaattttatcatcaatacttttcctcaggtaaaaaagaaatgttcggttcaacggaattcgaacatttttccgttgccggcaacgatctttacctgggcttgaccgggatcggcaaggtccaggcggccatgaacctgaccagcctcctggccaaggaaaagatcgacctggtcatcatgaccgggtcggcagggtccttgcaaaaagaagttcagcggatggacctggttttaccaagcgaattcgcctaccacgatgcccacaacacttcagcgggcaactatgtcgaaggacagatcccgcaggaaccggcccgctttaagctggactgcgcggaaagagacaagttcaaggactttctgggcaaaaagggcgtggcctacaaggaaggcttggtcgtgaccggggattccttcatctcctcccaggcacaaaaagacgaaattctgggcaattttccaaccgccctgtgcgtggaaatggagggggcagcctttgcccaagtggcctaccactttaacgttccgctgatcgccttgcgggccatctccgacaatggggatgaagatgctgacaacgactttgcagcctttgtcagaaaggtcggtgcccaggcggcagaactgatcgtggaatatttaagggagaatgatttttaatgaagcaggtatatcttgacaacgcggcaaccacgcccatgtcaccgaccgtcattgacgtgatcacggatgaaatggccaatgacttcggcaatgcctccagcacccacaccctgggccggaaggcccgcaacagcgtggaaacggcccggcacaccatcgcccaggcaatcaatgccaaagaccaggagattatttttacctccggcggttctgaaagcaacaatacggtaatttttggcgtggctgaaatgcaaaaagcagttggccggcacttgattacgaccaagatcgaacatgaatcagttttaaagtccatgcagcgcctggaagagctgggctatgaggtgacctacctggacgtggacagagacgggcatatttcccttgaccagctccgtgaggccatcagaccagacacgattctggtctcagtcatggctgtcaacaacgaagtcggcagcatcaaccccctcaaggatatcggccaaatcgtcaaagacagccaggccttcttccatgttgacgctgtccagggcctgggcaacattgacctggacgtggaagaaatgggaatcgactttatgtcgacttcagcccacaagatcaacgggccgaaattcctgggcttcctgtatgaaagagacgggatccgtctgccaaaccggatttatggcggcgaccaggaactgaagcggcgggctggtacggaaaacgtgccggggattgccggctttggccaggctgtagcggaagttcaagcagaaagcaaggctgacctgcaggccaaatacactgatttccagaagatcatcttgagccggctggatgagagcggggtggcctatgaggtcaacagccccttgaccggtctggtttcccaccatgtcttgaatctccgtttaaacggtttgtccacttatgtccttttggccaacctggacctggctggcttcgctgtttcaggcgggtcggcctgcacggccggcagcctgaccccgtcccacgttttgacggccatgtttggccaggattcaccaaaggtcagcgaatcgatcaggatttcttttggccgctacaacacggttgaagaagtgaaagctttcgcggctgccctggtgaaggtggcccgcaagctgcaagaccggaagcgggaagactaaatagttgctttttcaagggaatgtacttacaattaataagcgaggttttactttatggctaatactgtgatgatcaatggcgacaagcggaagtttatgcttaacccagacgtgaagctgtatgcgttgattgacgccggcttccagaagaccccccggggcaactttgtctatgagcacccgctttacaacgaatcgccttacaacgcgacgaccaagctgaagatgaccatcaagagcgacttgaccagcttgactatggtcgttacggatccaagcggcctgaagaaggtaaacatttttaaaaacaagcagctggctccgacggttgaacttttggactacatcttgaaggacctggaggagcggaagattttaagcgaagtgaaggattgatttaatggttgacaatagcaagatcagagtcgttgtcggcatgagcggcggggttgactcctcagtttcggccctcttgctcaagcagcagggctacgacgtcgtcggcgtttttatgaagaactgggacgacaccaatgatgatggtgtctgcacggcaactgaagactacgaagacgtcaaaaaggtagccgacaagatcggcatcccttactattcgatcaacttcgaaaaagaatactgggagcgggtcttccagtactttttgaaggaatacaaggctgggcgcacgcctaaccccgacatcatgtgcaacaccgaaatcaagttcaagtccttcctggaatatgccctggacctggacgcggactacctggccatgggccactatgccaagactatggtcgatgaaaacggggtaacccacatgatgcggccaaaggacggcaacaaggaccagacttacttcctgagtcaattgacccaagagcagatcaagcgggtcatgttccccctgcaagacctgaccaagccggaagtgcggcggattgccgaagaagccggcctggtcaacgccaagaagaaggactcaactggcatctgcttcattggggaaagaaacttcaagcacttcctcagcgaattcctgccagcccaaggcggggacatggtaaccccggacgggaaggttgtcggtcagcatgccggcctcatgtactatacgatcggtcagcggcagggcctgggcctcggttcaaccaaggagtcaaccgctccctggtttgtcgtgggcaaggacctggaaaagaaccagctgatcgtggagcagggctatgacagcccccgcctttacgctgaccgcctgcaggcttccggcatgactttctttaccggcaaccctgaggaggaaacggaattcaaggcaaccgccaagttccgctaccggcagtgcgatgttggcgttacggtcaagtaccacgcagccagcaagactgctgatgtctactttgacgagccagcccgggcagttaccccgggccaggctttggttttatataatggcgaggaatgcctgggcggtggaaacattgacgctgccttcaaggatgacaaaaagctgcaattagtttaacggcaaggccaagtcccggcggacttggccttgttcgtgtttagcggggccgtcttttgctataataaatagcgatagttacgagaggcgataaaaatcatggaaatatattttgtaagacatggcaagacacagtggaacctggagcagcgtttccagggcgggcaaggcgattcaaaattattgccggaaagtttggccgacattgagaagctgggacgttatttacaagggaagcattttaaggcggtttacgccagccccctggaccgggcgagaatgactgcccaagggctgattggcgcggccgggatccgcctgcccttgcacatcgatgaacgtttgcgggaaatgaacctgggcaagctggaaggaatgaagtacgttgaggcggaaaagctctatccccaggaaatcgataatttttggcatcacccggacaaatacgacaatactgtcgtagagggggaaagctatgagcatgccatggccagggggctggatttcggccgggaaatggccaaaaaataccccaaagacagcgacaaggtcctggtggtcagccacggggcagttctatcagccatcatgggggcgcttttaggctatgacctggccaatctcagacaaaacggggttatctacaataccagcgtttcagtcttggcaagccaggaaaagggccctgccttcaagctggtcaagtggtcagacgttactcctttagagcacaagatgtcagaaacggatggtttgtaatggatcagaagatcaatcagctttatgaagaaggaaaagtcgaccaggcgattcatgccttgattgagaaaatcgaccataatccccgggaaactgccaactacctgcagctggccacttacctcctggaccagggcagcgctgagcaagcccgggagctcttgaccaaggcccgggggatcgcagaagatccccaggccttggcctatgacctggcggtttgtgactacgccctgggcgattttgatcaggccctggcccgtttggcccagattccggatgatgacatgaccatgtaccaaaaggccctggtctacctcaagctgggccagagccagaaggccctggcttatgccctgtcgatcaaagaaagtgacgaccgggtaaaagagctcatcggggacatctggctggctttaggagagctggaagcagcccgggccagctacctggaaattgctgaagggcagagaagcagcaagctgaactttttgctgggcctcacttatttcagccaggaccgggaacaggcggaagaattttttgccaagtccaaaaagcaggatcccaaatattaccaaaaagccaaagaccagtatgagtccctgctgaagctgctgagccagggaaaggcaggggctgggaaagaataataaggagcgggaaatgaccgagtttagcggtgaagtaaagagcgttatttatgaaaacgcgcaaaacatgtacaagatcttgctggtcgccgtaagtcagcctctggccggctatgacgatgatgaaatcaaggtgacggggaccttcggggacctggagcttggccaggaatacaactttaccggtgacttggtcacccaccccaagtacggcttgcagtttcaagcgactggctgccagccggccctgccgaaagagactggcggggtggtcaagtacctgtcttctgacaagttccctggcatcgggcccaagacggcggaaaaaatcgttgaccagctgggcagcgggggcttaaagagcttgcaagctgatccagccttgatcgccaagctggatctttcccaaaagcaaaaagacagcctcttgtccggcctggcccagatggattcctttgacgacctggctatgactttggccagttacgggattccccgcaaggtggccggccgcctttaccagaagtaccatgaccagaccttgaaaaagctgcaggccgatccctacctgcctttaggcgaagtgaccggctattccttcaagcaggccgaccacttgggaattagctttggaattgcccttgacagtctggagcgggctgatggcagtatcctggcggttttgctccaggccttgaccatggagggggaaacctacctggaactggaagaacttttgccagccgccaaggaactgacaaatataaattttgaccgcctggcagaagcagttaacgacctgcaggacaagaagaaggtcgtcgtggaaaaaggccgggccagcctgctggccccatttcaagtggaaagcgagatcgtgaccgacctggaagaccttttagccaagggtaaggaagcggactaccgggaaaaggacttggaccaggccatcaagcgggccgaaaggaagctggggatcagctatgaccctgagcaaaagcaggccatcaaaaacgcggtaaccagtccggtctccatcctgactgggggacccgggagcgggaagacgaccatcattgacgggatcttgctggtcttaaaggacctggtcgacatggacgaagaagaagctgaagaagcgattctcctggccgcgccaaccggccgggcagccaagcggatgggggaagtcaccggctatccggccaagaccatccaccgcctcttgggcctggggatcgacaacagcgaggaaatggagctgaatgatttggaaggggagatcttgatcgtcgacgaaatgtccatggtcgacatctacctctttgaaaagctgctcagcgccatcagcaatgttcaccacctggtctttgtcggtgacaaggaccaattgccatccgtcggggcggggaaggttttcgctgacttgatcgaggcggacttcattccgacctgccagttgcaggtggtccaccggcaaaaggatgattcaacgatcattcccctggcccacgcggtcaacgaaggagccaacccggctgttctcttgcaaaagacggccagctactcctttattccttgccggccccatgccgtgcctagcgccgtcgagcagatcacccaggcagccttaaagagtggctttgcggctgacgacatccaggttctgggggccatgtaccggggcgacggggggatcaacagtctgaatgacacactccagcgggtgatcaacccggaaaagggcaatgataaagcagttgaggcccatggtgagaacttccgcctgcatgacagggtcctacagctgcaaaatgacccagagcgggggatctacaacggcgagattggaaaggtcgtggccgttgacccggaaatgatggaagacgaggatgacgaagtcaagcttttggtcaattttgacggtaaagaagtggcttacacgcaggcagacttgaataacctgacccgggcttatgccatcaccatccacaagtcccaggggtcagaatttcctttggtcattctctgcttaactatgcagaactatatcatgctcaagcgcaatcttttgtatacggccatcacccgggcttcccagaagctggtcatggttggagaagagcaggcttttgcccaggccatgcgggtcaagggcaatgagcggcggaccaacctggtctggctcttgaaggaccgctttaagccagaagaacaaagtaagcaagagagtagtgactctacagagaatactctggataaaggagaaaaagccgaagactacatcttgaccggggcccggatcagccggtcggagatttcccccatggttggcatggaggacctggttcagggatgcaagaaactggcggaaatcgtccggaccaaggggccaggagcctaacttaataaagtttttgacagaaagaccacttagcttggtctttcttttttgccccaaaaataagttagttatcctttgagaaagttgggtaaaaaatgacagaaaaagaaacaaagaagacagtcaaaaacatcatcatcggttttggcaaggggggcaagaccctggccaagttcctgggccagcagggcgaagaagtccttctggtggaaaagtcagccaagatgtacgggggcacctgcatcaacattgcctgcctgccgttcaagcgcctgattttggaagggggcagccggtagcgatttttctgaagcagtcgctggcaaaaatgagatgacggcccagttgcgggagaaaaaccaccagatgctggcgcaagaatctacacccgcccgaccatgagcgaggcctttaatgacctcttcaagcaataaaaaaagaactccggaaggagttcttttttgctatcaagctttatttcttttcgaccagcattggcagaatcattggccgtctttcagtccgggagtataggaagtcctgcaggttctcgatgatcgccttgcggatttcgctgtccttaggcttgtcgctcttggccatttccgtcttcaagacatggtagacgtgcttctgggccgcgttgatcaagtcctgggattcacgcatgtagacaaagccccggctgaggatgtcagggcctgccaaaacctgcttgtgcttgtagtcaaccgtggctacggctactaccagcccttcttcagacaggatctgccggtcgcggaccacgatgttgccgacatcagcagcaccggaagtgtcgacgaagacgtccttgacgtggatgtcgccggcgattctggccccttcagggctgaagcagaccacatcaccgttcttcaagacgaaggtgttctctgccggcacgcctgcttgctgggccaggtgggcgtggacaacctgcatccggtattcaccgtgcaccgggatcatgtacttcggcttggtcagttcgaccatcagcttcagttcttcctggccgccgtggccggaagtgtggacattgttgacccggccgtggaccacgttcgccccgccttccatcagcttgttgatcagctggttaacgctcagggtgttgcctggaatcgggttggaagagaagatcacagtgtcatgcggcttcaacttgatctgccggtgggtgccgttggcaatccgggagagggcagccaggggttcaccctgggaaccggtacagaggagcatgaccttttccggcggcagggagttgattgcttcagcatcgacaatcaagccttccggcacattcagatagcccaggtcgatcccgttttggatcccgttctccatgctccggccaaaaatcgccaccttgcggccggtgtcgatcgcggcttgaatggcggttgacacccggtaaaggttggaagcgaaagtggcaaagatgatccggccttcaatgccggtgatgatgttgtgcaaagagccggcaacgaagcgttcagacttggtaaactgcggcacttcggcgttggttgagtcactcaagagggccaaaacgccttcttcgcccagctgggccattctctggaagttaggggccggctggttcatgaccggggtcaagtcgaacttaaagtcgccagtaaagacgaccgcgcccagcggagtgtggacggcaatccccaaagtgtcggggattgagtgggtggttctgaagaaggtcaccttcagcttgtcaaaagtcaaaaccgtgtcttcgtgctcttcatgcagctcggtccggtccaggatcccgtgttcttcacacttgctcttgatcaaggccagggcaaaaggcgtggcgtagactggaatttccggaatcttttccagcaggaagggaatcccgccgatgtggtcttcgtggccgtggctgacaaccagggccttgatcttctcccggttcttgaccaggtaagagtagtcggagataacatagttgatccccagcagatcatcttccgggaacttgatgccgcagtccatgatgacgatttcgtcttggtactggacacagtacatgttacggccgatttcgtgtaatcccccgatcgcgaaaacggctacttcgttttgcttaatcttcactgttagtttggccaaaggcagtcagcttgaagtcagcgtgttcttgttcgtacttcaaggagttgccggttaattcttggatgagctcgatgttgtagggggtgttttgttcaacgagggctctggcttggacaatgttgtcggcttccatgtagagagtctgggtcgtttctctgcgtgggttaacgatcttgtccttttgatataaaactttgtagatcataaaaaatctccttattgtttaattgtaatttgatctctgtttgagaaattttgccaaaaatactcaatagctaattaaagtttagcataattagaaaagcaagtatagaaacatacttgatctaaggaggcaaaaaagcccaagccaggacgaagcgggctggcttggacttttgagcctagtagatgacgatggtgtcttcatccagggcaaatgggttttccttgttgatccggtcgtagaagaggtggccgttcaagtggtcgatttcgtggccggagacgatggctgggtagcccttgaggcggatggtcttttcctcgccgtcaacggtccagtagtgaaccgtaaccttgtttggccgcggaacgtagccgtcgatgaccttgtcaacgctcaggcagccttcgccttcgcccaggcaggtcttgcggacggattcagagatgatttccgggttaacgtaaacttccttaaagatgatttcacccttgtcgtctggcacaagcagggcagccatagacacgccctcaccaacctgcggggcagccagaccgaccccggcgcggagctggtgcttggcggcaatctttggatcttgtgagtttaccaggtattccatcatgtcatcggccagcttgcggtagtggtctgacaagggaaaagtcaatttttgcgcaacttgccgcaaaacgggatccccgtcgcggacaatatctttcattaagatcaatgtgggttctccttttaaaataatcgctaatatatttttaccacaaaaaggcctgctatggttaaacattctctgaaaagcttatgtaaactaaagcaaatttgttgaccaggcccaaaagtggttgtacaatagatgattgtaaaaaaatataataaacattacttcggccagcctgctatctaaggctaaagggaactgtgcttttgtcacagttctttttatgaggaacggggaggaaacatttttggcagatcaaaagagaagagaaaacatcagaaacatcgcgatcatcgcgcacgtcgaccacggtaagactaccctggttaaccagctgcttaagcagtcagacactttaccagaacacatgaacctggaagaccgggcaatggactccaacgccattgaacgtgaacgtgggatcacgattctgtcaaagaacaccgcggtcagctacaagggcacgaccatcaacatcctggacaccccaggccacgccgacttcggtggggaagttgaacggatcatgcacatggttgacggtgtcctgcttttggtcgacgcttacgaaggcccaatgccgcagacccgctttgttttgcaaaaggccctggaagccggcgttaagccagttgttgtcgtgaacaagatcgaccgtcctggttcccgtccagctgaagttctggatgaagttctggaactcttcatcgaacttggcgccaacgacgaacaacttgaattcccagttgtttacgcttctgccttgaacggtacttccagctactcagacgacccggctgaccaggaagaaaccatggacccggtcttcgacacggtcatcaaggccattccggctccgcttgacaacgaagacgaacctttgcagttccaaatcaccatgcttgattgggacgactacgttggccggatcggcgtcggccgcgtttaccggggcaagatcaaggttggcgacgaagttactgtcatgaagcttggcggctccaagcaaaacttccgcgtgaccaagctttttggttacttcggtttgaagagaaacgaaatcaaggaagccaaggcaggcgacattatcgccatcagtgggatcaacgacatcttcgtcggtgaaaccattgcttccaaggaaaacccagaagccttgccaattctgcggattgacccgccaactctgcaaatggacttcgtggccaacgactcaccatttgctggccgggaaggcagccaggttactccagccaagctggaagaacggcttttgcggcaaacccggactgacgtttccctgaaggttgaaccaactgaccaattaaatgcctggactgtttcaggccgtggggaactgcacttgtccatcctggttgaagaaatgcgccgggaaggcttcgaactgcaactgtcccggccaaaggttatctaccgggaagttgacgggcaaatgtgcgaaccatatgaagctgtccaagttgacgtgccggacgaatatgtcggctcagttatcgacggcttgtcccaacgcaagggtgaaatgcagaacatggtttccaagggcaacggccagacccggttggaattctcagttccttcccgtggcttgatcggctacaacaacgaattcatgtccgcaactggtggttacgggatcatgaaccacactttcagcgaatacaagccagtcgttaagaactggaacccaggccggcgcaacggtgctttggtttccatcaaccaggggcagtcaactacttactccctgcagtcagttgaacaacgcggccagctcttcatcggtgccggcgtgcaagtttacgaagggatgatcgttggtgtatcttcccgtgaccgtgacatcgctgttaacgtaaccaagggcaagaacctaaccaacacccgtgcttccggtaaggaccacgctgcggccatcagaacgccaaagactttgactttggaagaatcaatcgaattcttgaacgatgacgaatactgtgaagtaactccagaaagcctgcgcctgcggaagaagatcttgaacacttcagaacggcaaaagtttgacaagaagaaggccaagaccaactaattgttagtttttggtaagtctctccccctatttataggaggaggggcttttttgttttataatgaaaagcgacgattatttttagaaggggaaaaacgtgaagaaaaataaagttgctgccacggccgccaaaataaaagagacattccaatatttcgactaccggatcttcatcgtctacttgcttttaatgacgatcggggtgatcgcggtctattcggccagttcagaaatcctgctgatccacggcttcaaggctacggtttacgggcaaaagcagctgctctacgcctttttcggggtattgatctgcctggcctgctacagcatcaacctggactacttaaggcggggcaagctgctcttgtggctgctggtaattgtggccggcttattggtctatgtccgcctctttggccaggcggtcaacggggccaagggctggatcaacctgggcccaatcaacatccagcccttggaattagccaagctggtcctgactttgtatctggcccggatgctggctaaggccgacgggcggttagtgcgcggacatatcatctcccagcttttgcctacggcaatcatcgcgggtgtactaatgatcctggttttggtcgaacctgacttcggggggacagccatccttttttgcctggtcctgatcatgtattcagtttccgggatcccgaccggctacatcctcttgagtatcatcggcatcaccgttctggtggtcgggggcttcagcttgattgtggcctggaacccgagcttcttgcaggatgtttacgtctacaagcgttttattgccttcctgcacccatttaagacggctgccaatgaaggggcccagctggtcaattcatattatgctatccataacgggggcctttttggcttaggcctgggcaacagtatccagaagcggggctatctgccggaaccttacaccgactttattttgtcgatcattgccgaagaagttggctctcttggcgcattagtagtcttgggcctgcttttctacctgatgattttgatcatggagcggggggtcaaggcccagtcccagtactccaccttgatctgcttcggggtgaccgcgattatctttttccagactttatttaacgttggcgcggtcttaggcctcatgccgatcaccggggtgaccctgccttttatctcttacgggggttcctcactctgggtcttgtcggcagcgatcggcctggtattaaatgttaccgcggaagaaaaaatcagacaggaggtgcaagcagaggatgagtattaaccaagaattagctgaccaggagattgccagccggaccagcttgatcgtttatttgcgtaatgtcaacaacgatcagttcaagctgcgcaggttcggggatattgtttatttttccaaaaagctgcactatttgattctctacgtcaaccaggcagaggcggaagaaacggcaagcaagctgcggaccttcagctttgttaaggaggttgaattttcccaaaatgatgccctggacctggacaaccagaagattgagcagcagatcagtgacatggccaaggaggccgaagagaagttaaatcagacagataaagaggactggattaagtgagaattatttctggaaaatacgccaaacggaacttgtttaccctcaagagccagaagacccggccgaccagcgacaaggtcaaggaatccttgttcaattccctgggccagttttttgctggaggagaggtcctggacctgtacgcgggcagcggggctttggggattgaggcagtttccagaggctgcgagcatgcggtgctgaacgacgtcagccggccggcctgccagatcatcaggaaaaacgtggacttgaccaaggagccggaccgctttgaggtcttcaccatgccggcgaaagtggccttgaaggtcttcgctgaccagaaaaggaagtttgacctggtctttttggacccgccatatgccaagcagcagatggtcaaggacatgacggctctggcttccctggacctgcttaagccgggggcaaaaattgtcgtggaaactgatgaacagacagacttgccgccggttgccggctttgaccttttgaaagaccaccatatgggcaagacgatcgtaagaatttaccagagggcagaatagatgactacagcgttgtttccggggagttttgaccccattaccaacgggcatatggatacaattgagcaggcggcgaaggtctttgaccgcctcttggtcgtagtgatgaccaacagctcaaaaaaggcgctttttacgccggatgagcgggtggacttgatcaaggacgcggtaaaagagcatggcctggccaatgtcgaggttctggcccggccgggccagctgacggtggacctggccaaagaattaggggccggggttttagtccgcggggtccgcaacagcagcgattttctctatgagcagcagatcgcccagttgaaccgggacctggccccggacctgccgactgttttgtttatggctgaggcggccaacagtgctttggcatcgagcatgctgaaggaaatcgccatgtttggcggcgagctggaccgctttttgcccaaaaaggctgccagagccttgaaggagaagttgcaaagtgaaagttaagaaagacggacaaagcaagaagtggcgccgggccctggtcggcttgtttgcagttatcctgctggccctggtcctgctcttgccaaccaaatacgtgattgaggcgcccggagatgccctgccggtcggcaattatttaaagacgacaggggttaaggctaaaaataacctctacttcgtgaccgtgagtgagcggagggcggttttgggcgattatttatggtcctttacccagccttatgaagaccgcctgaccatggatgaagtgactgggggatcaagcacggagcaatatgaacagctgcaggaatggtacatgcagaccagccagcagacggccatctattacgcggccaagaaggccgggcttaaacccaagctgaaataccagggcgtatatgtgatggacctgcagtccagctccagttttaaaaagaagctcttgatcggggacacgatcgtagcggctaatgggcacaagttcaagtctgtccagggctttatgagctacctgcagaagcagaagatcgggcagaaggtgtcgattacggttttgcggtccgggaagaagcagacttttaccgggaaaatcgtcaaggtgaaaggcaccggcaagccggggatcgggatcagcatggtggaaagggtcaaggtggaagtcagcccgaagacgacgattagcacgggcgacattggtggcccgtcagctggtctgatgttctccctggcctgctaccaaaactatactggcaaggacttgaccaagggccacaaggtagccgggacggggacgatcgatgcaaacggcaaggtcggcattatcggcggcgtggacaagaaggtcgtggccgcggataaagaaggggcagaagtatttttcgccccaactgaccagaccggggtcaagaagtcccagaccaactacgcggtggccaaaagaacagccaagaagctgggcacgaagatgaagatcgtgccggtggcaacttttgatgatgccttgaaatacctgcaaaagcattacaagtagaaaactgaatagttaagaagagaaccggagccagcctccggttctttttttgcctcagtaaattttgccttttttcttttatttaggaaaaaagaccatttttggcgtattagttattgaggtgataaaaatgaatcagtcaaacgaaagaacggaaggcaagcaaaagctgcaggacctgcttgcctggcttatggataagaaaatgtacatcatagtcgtcttgctggcggccgggggcttttattatgccaaccggcagccggcagctgacaattctgctcttttgtccagcagccagagcatgagtgaaaacagcgggcaaagcctgcaaagctccagtgtcagttcagtggctgccagcgccagctcagcggcttctgcggcaaacgctgaagtagtctgcgatatttcaggagcggtcaagcaccagggggtctaccggctgaaaaacggagcccggctggaagacttgattgaaaaggccgggggcttgaccaaggatgcccaattgcaggccatcaaccgcagccagcttttaaaagaccaagacaagatctacatccccggcaagggggacaagacggaagcggcccagaccgctaactctgctgcagcatccgctccggcttcttctccttctgcatcagcctcatcagtctcttcttcaacttccggggcagcttctggtgacttgatcaatttgaacacggctacagccagcgatctgcagaagctgaacgggatcggggagaagaaggccgagcagatcattgcctaccggcaggaaaaagggtcttttaagagtattgacgagttgaaagaggtgtcgggaattggcgacaagaccttcgcggcaattaaggaccagcttacaatctagcctgcaagccggcttttactttcttttggccttggccagcgtcagcttgtgcgggatcttccagtcgcaaaaatgggggaagctttttgccctggccgccttgctctacctgctctttttgctcaaggataaatatggcggtttgtttaaactcgccctggccttcttgctcttattgactttggtcctggctaaggaccaggttaagctgggtgagccggcaggcgacatccgcctgtaccccgaccaggtgaaaattaccgacggctggctgagcgggcgggggcagacggccacgcagaaagtgcaagtttacgggccggcaagccgggaggcactagccttgctggaaaacgggcaaagcatcgacttaactgaagttagcggcgcggtcagtgaaatagagccagcgaccaatcccggccagtttgactaccgccgctatttggccagccagcatgtctaccggcaggtcaagctggctcattatcaggtcaagctggctccggctagtcttcttacccgcctgcatggcctccgctggaaaattcaagcttatctgaagcgcctgccccgcctattggccttttttgccagtgaactgctgctagcggaaaatccggctggggacaaccaagccaacttgaatacctaccgggacctgggggttatccatatcttgagcatttcggggatgcatgtgggcatttacgtctttgctctggcggttttcggcagctacctgcacatgaccaaggaggaagtttttgccgcttcctgcgctctattgacctttgaggtcttcttgagcgcgggccagccaggttttatccgggcgactcttagctatgttttttcagccggattagcctttaagagccggaggatcggccgggctgacctgttgggcctgacttattgctgccagcagctttttactccccgccttttgttggaaaccggcgggatcttgacttatgtattagccctgggcctggtcttgacggcgaaattgccagactgcaagcaggctttttggctgaacggcatgctgacgccttttttgctctactttttctaccaggtcaatgtctgcacgattttttacaatattttagtcgtgccctatttcaactatatcgtcatgcccatgaccggcctggccttgctggctccgccgggtctagcggctttttttgagaaaatcctggaggcggcggaagggatgctggctaatgtggcgaaaaccggctttggccggctgatctatggccaggtcaaggcctggcagctggccctgctttttgccttaaccttcctgtatctcatcacgcggaaaaagaaataccgccatattctggcggcggtctatctcttaatttttgtcagcatccacttccccttggaagggcaggtctcttttatcgatgtgggtcagggcgacagcattcttttgacgacgcccatccgccgccaggtctacttgatcgataccgggggcaagctgacttttggtaaaaagaaacagagccagccccagatcgaccggattaccattcctttgcttaaagcccagggaatcagccagatcgacggggtcttcgtcagccaccaggatgctgaccatgttggtgacctgggccccctgctcgaggaaatgccggttaagcgcctctatatgggagcaggtcttattcaaaatccgagctttagggccaggatagccggccgggtagagaagactaagctggttgagctgaaggcagggatggaggtgaaagaagcgatcaacttccaggttcttcacccggaagtagcgggaaaaggggaaaacaaggactccttgtcgcttacctgccgcctggctgggaaaagctgggcttttaccggggacctggaccaggcaggtgaggaggcaatcattaagaagtttcccgatttgaaaattgactacttcaaacttggccaccacggcagcgatacttcttcttcaactgtctttttgcgggcaatccagccaaaattagtctttatctccgctggccggaacaaccgctaccaccaccccaagccggaaaccttagccaaattgcaccagctggggattccctatctcaatacccaaacggaagggatgatcagctggcattacggcatcagggaatacttcagcagttttctggaagggcggcgggtgtgttatcattattaaagagtttacttttagagggaggaaagcggcttgccaaatttgatatccctgtttcctaacagccaggcgggaaacccgaatgtcctgctgcagggaccggacgcttttttaaatgactatctggcccataactatgtccagcaggcagcctttcaaggcctggagaaggtgacggttgactgtgagagcgacccgctggacgacttgatcgcggccttggcggaagccagccttttcagccagcaaaaattagtcttagtcaagaaccccatctttttgacgggaaagttcccggccaagtacaagcagcaaggggaccggctgctggaaatcttcagtcacctggaccagatcgacgacgtgatcgttttagtcgccagctatgagaagctggaccggcgcaagaaactgaccaagcaggtggaaaagagcttcaatacggtctcaaccgcggtcaaaagctatgaaagcggccgggttatgcaggccttggtcaaggctgagggctaccgctttgccggcggggccctggacttgctcatggagagaagcgaccaggtcctggacgcggccctgggcaattacaacaagctgaaggcgatcagcgacggccaggaaatcagccgggacctggtggaccggaatatcgatctcagcttagaccagaacgtttttgctattctagaggctgccttaagaggggactaccaagaggcaatcgaccgcctggacgggcagctgcgggaggggacttatcccttgcagctggtcgcggtctttttcagccaggttgaatttttgctctgcgtgaaggtgatgggacagagaaggcggagtgaaagcgagattgccaaggaattgtccgcccacccttaccgggtcaagacagccttgaagtccagggcgaaggtcggccagctgaagaaaatgctgggccagctgatccagctggactaccgctacaagagcggggtctaccagggcagccgctttttgaaggcttttatcctgacctgctaggcaaaaagagaaaaaacagggaatagaaaaagacaaaagaaaaagagcgggaaacggattgtttctcgctcttttgttgattgctagtttaattacttagcaagcttagccaaacgattcttgtcacggttagccttgttcttgtggatcaagccctttgaagcagccttgtccaattcacggatagcagcaacgtgtaattcggaggcgttgtccgcaccagcagcttgagcagccttaaacttcttaacggcagttctcatagtgctgagttgagcagcattgcgttcgttagcaacagcttgagtcttaacacgcttgatagcagatttgatttgtggcattaggttcacctccaataactgattgaaattcactaaattattatactgaaagccagcgccagatgcaagaagaaattttacttgctttttccaaaaaatcgggtatgattatatttgttatgtgaaccccggacgttgtctttacgtttcacctaacggctgacgttgtccggggcaattatttaaaagaaaggtgcagaaacatggcagtttcaaaagaaagaaagaacgaaatcatcaaggaatacgcaacccacgaaggcgacactggttccgtagaagtacaagttgctgttttgactgaagacatcaacaacttgactcaacacatgcgtaaacactcacacgaccaccactcatacgttggtctgttgaagaagatcggtcaccgtcgtaacttgctccgctacttgcaagaaaatgacttggaacgttaccgtgctttgatcgctcgtttgggtttgcgtcgttaatcaaagacctaccaagaggctgggatttcccggcctcttttcttttttctgttttcaacttcatttttctttcttttcctttgcgggcttagtgactatcatgctcatgccctttatgttaaaattaaaaagattataagcgttttgatcgacagatccatataaagtatctatcagacaaagaattgatttaacatgattacgaaaaggagagctttatgtcagacaagttaaaaataatggttctaagcggggtccgcgagcagggcaagaatatgtttgccgttcaggtgaacgatgaaatctttgttttggacgccggcctcaagtacccggacagttcattgttcgggatcgatgtggtaattccggacatggaattcttcaagcaatacggcgatcaagtggcggggatctttttgactcacggccacgctgactccatcggggccctgccatacattttgcgggactgggatattccggtttttggttcaaaactcaccattgaactggctaagatcgacgtggaaagagaaaacaagcggcggaacaaccagctgttcaacgtcatcgacgccgatacggaaatcgacttcaagaatgccagcgtgtccttcttccacaccactcactcagtgccagactctttggggatcgtcatccatgctccccaagggcagatcgtctacaccggtgactttaagtttgacccgtcagcccggccagcttaccgcactgacatgacccggctggctgaaatcgcgaaaaacggcgttttggcccttttgccggactcatccaatgctgaggctgttttaccgaatgccagcgaaaatgaagtcggcaattacatcaccaatgtcttcagaaacgccaagggccggatcatcgtggccggcaaggcttccaacataaaccgggtccagcaggtctttaacgccgctgctgctaccggccgccgggtccttttgaccggccgggacgtggctaagatcgtccacacggccatgaagatgggctatctggaagtaccagacgggcttttgatgaaggccaaggaactcaaggacgtgccggatgaaaagacggtcatcctggaaaccggccggatgggtgaaccgctccagtccctgcagaagatggccaataaccgccaccggacgattaccatccacgaaggggacctggtctttattgccacgactccgtctcacgccgttgaaaccacggtggctatcaccagtgacatggtttaccgggcaggcggcacggttatcgaacttggccgcaacatgcacacttccggccacgcgactggccgggacctgcagaccttgattgacctcttgaagccgcggattctggtaccggtcatcggggactaccggcttttagaagcagtcaaggacttagccgttgaaactgggatggacccggacgatgtctacattacccaaaacggggactgcctggaatacgacactaagcgcggccagttcttccgcggggatgccgtgccgggtgaagacacgatgatcgatggctccggggtcggcgacgtgggcaacattgttttgcgcgaccgggaagttttgtcagatgacgggatcttcatcgcggtagtgacgattgaccgcaagaagaagaagatcgtgtctgaaccgcaagtcaccagccggggctttgtctacatcaaggccaaccaaaagctgatgaatgactctatccaggtcatcaaggacgctatccaggccaactttgaacacaagaagtttgactggactgaactcaagcaagacatgcgctccagcctggggaagttcctttacaagcagaccaaccgccggccggtcgttttgccagttgtcatggaagtcaaccagaaccggcaccgggcaatgcagaagaaggccgaagacgcggctgaaggcaacaaggaaaagccggttaaaaagccggttaagaagaacaaccgcaagaagcagaccaggccggcaaacaagtccgctaagggcaagaagccggcaaacaagaataagaagaaggacagcaaggcagatgacaagcgttagccaagggaacctgcggaaattggccatagaggctgaagcaggaggggactaccaggctgcctgcgggcacttggaggaggccctgaggctgggctttgacgaggacctggccctggacttgtcccgtcttttgcgcttaaacaaggaagaagatcaggcttatgcccttatcaaggcactgcctgatcttttttcccgggataaagtgctggaggagtatggacaagtcctggcggccaataattttttgattgaggctctccaggtcaagcatttgactgagggagaggtcgacttcccggttttgccagcagacaaaaaggaacaagagaaaattctgcttgcttttagaaaaaagcaggcagtcagccaaagccagtacgagcagctcttgaagctggatttgccgacctacctggcctttgccagaagccttttgctggatcccctggctaactacgccttgcgcctggcggtgtgcgaggacctggtcaagctgggggttaaagaagagatgcaggttatgatcctgggggacttgaagagttttgtgcccgctgaaacggatttgctcaagcaggatccggtttaccgggaatttatcacttctctggccagccgctaccaaaaccgcccaagcgaactgcccttgatcttggctgaaggaaatttcgcttttggccagctttatccctgccagggagattacgtgactaatcccgatacttttgcccgggacttgaccggctttttacggcaaaagcggggcggggagagccagaatttgctggaaaaaatctatcagaaaaatagtgattaatctttttgcaaatcactttactttttgccggcatttagtataatcatttttggatattttcaagaagttgcgctattgctactagcgtacttcttaggaaagtagtacaatattcaacagagaatcatccgttagttttgtctcaacggacttcttgcaaaatttcaggaggatcattttaatggcagaaaaagaacattacgttagaactaagccacacgttaacattggtactattggccacgttgaccacggtaagactactttgaccgcagctatcactactgtgttggctaagaagggtttggcaaaagctgaagattactcacaaatcgacgcagctccagaagaaaaggaacgtggtatcactatcaacactgcccacgttgaatacgaaactgaaaagcgccactacgcccacatggacgccccaggccacgccgactacatcaagaacatgatcactggtgctgctcaaatggacggtgctatcttggttgttgccgcaactgacggtcctatgccacaaactcgtgaacacatcttgttggctcgtcaagttggtgttaactacatcgtagtcttcttgaacaagtgcgacttggttgacgacccagaattgatcgacttggttgaaatggaagtaagagacttgctttcagaatacggttacccaggtgacgatgttcctgtagttcgtggttcagctttgaaggctcttgaaggcgacgaagaagctcaaaagaagatcgaagaactgatggacgttgttgacgaatacatcccaactccagaacgtgaaactgacaagccattcttgatgccagtcgaagacgtcttcactatcactggtcgtggtactgttgcttcaggccgtatcgaccgtggtactgttaaggttggcgacagcgttgaaatcgttggtttggtagaaaaggtcttgacttcagttgtaactggtttggaaatgttccacaagactcttgacttgggtgaagccggcgacaacgttggtgtattgctccgtggtgtcgaccgtgaccaaatcgttcgtggtcaagttttggcagctccaggctcaatcaagacccacgaaactttcaagggtcaagtctacatcttgagcaaggacgaaggtggccgtcacactccattcttctcagactaccgtccacaattctacttccacaccactgacatcactggtgaaattgaattgccagaaggtactgaaatggttatgcctggtgacaacactgaattctcagttactttgattaagccagccgctatcgaagttggtactaagttcactatccgtgaaggtggtagaactgttggtgccggccaagttactgaaattgacgactaatttttattttttaaattttagttctaacagtgtaaaaaggtgttcttctcagaagaacgcctttttttatccaaaaaagccctattttgtagtactttgattgttttttgaccgtctttaaggtaagatatttaagtatgcaaagtagcaaacccaaaatagacattggaggtatttaattaatgtctgctaactggaaaactaccggtaagactactggtgaactttcttttgaaatttctcaagatgaaatcaagaagagcctggacaaggcttttgaccgcgtaaagaagagcttgcgtgtacctggcttccgtaaggggcacgtttcccgtgtaatcttcaaccaatactacggtgaagaagctctttacgaagacgctttgaactttgctttgccagaagcttacagcgctgctgtcaaggaaactggcatcaaggcagttggccaacctcaaatcgttcctgtatcaatgggcaagaacaaggcctgggaaatgaaggcaatcgtaacggttgaaccagaagttgaacttggccaatacactgaaattgaagtgccaaagcaaaacactcgcgtttaccaaaaggacatcgacgctgaattgactaagcgtcaagaacaaaacgctgaaatggttttgaagaacgacaaggctgaaaacggcgacactgtaaccatcgactacgttggtactgttgacggcgttgaatttgacggcggctcagcacaaaactactccctggaactgggctcaaacaccttcatccctggctttgaagaccaactggttggtcacggcgccggcgaagaagttgacgttgtcgtaaccttcccagaagactacggcgcaaaggacctggctggcaaggaagctcacttcgcaaccaagatccacgaagttaaggcaaagcaattgccagaacttgacgacgaatttgccaaggatgttgacgactcagttgaaacccttgacgaattgaaggaaaagatcaaggctgaactgaagtccgaaaaggaagaagcagccaaggcagctatccaagaagcagcgatcactactgcagtcaagaacgctactgttgaagaaattcctgacgtgatgatccaagaagacgttgacaaccaactcaaccaatacttgggcgacatgcaacgtcaagggattgacccgcaaacttacttcaagttgactaacacgactgaagaccaactgcgcagccaattgtcagcaaacgctgctgaacgcgttaagactaaccttgttttggaagcaatcgctgccaaggaaggcttcgaagcaagcaaggaagaaatcgacgctgaaatcaaggacctggctgacaactacaacatgagcgaaaaggcagttcgcaacgctttgagcgacgaaatgctggctcacgacatcagcgtccgcaaggcaatggacttaatcactgacagcgctaagcaagtagctaaggctaagcttgaagaaggcagcgaagacgaagaagacaagtaatcgcctgtctatagactgaatcccccagaagtggcaactgccccttttggggttttcttttgccaaggctgatgaaaaatacaaggctaatttcgcgcaagttgcccgtatttatgctaatctagtctttagcaaatagaggagggaatacatggctactaagtttacagatccagaagaagtgaaatgctcattctgcggcaagtctgccagccaagtaaagaaaatgattgcgggcaacggcgtatacatctgcaacgaggacattgaactcgccaagcggatcattgatgatgagctgcgtctggattcactgaaggaagcgcgcgagcttcccaagccaatgcaaattaaagaagaactggatcagtacgtgattggccaggaccgggccaagcgggttctgtccgtagcggtttacaatcactacaagcggatcagtcaaatggatgttgattcttcaaccgaattgcagaagtcaaatattgccttgatcgggccaactgggtccggcaagacctacctggctcagactttggccaggattttgaacgtgccgttcgcgatcgcggacgcaactactttgactgaagccggttatgtcggtgaagacgtcgagaatatcctgcttaagctgctccagaatgctgattacgacttggagagagcccagcgggggatcatttatatcgacgaaattgacaagatctccaagaagtcagaaaatgtgtcgattacccgggacgtgtccggtgaaggggtccagcaggcccttttgaagatcctggaagggaccattgcttctattccgccgcagggcggccgcaagcacccgcagcaggaaatgatccggatggacaccaccaacatcctcttcattgtcggcggggcttttgacggtatcgaagaaatcgttaagaaccggctgggcaagaagactatcggttttggggcagaacaagaatctggcaaggttgacgatgacaactggaaccgtttcttgacgaccggggacttggtcaagtttggcttgatccctgaattcattggccggattccgattatcactaccttggaccggctggacagtgctgatttggtccggatcctgactgaaccaaagaatgccttgatcaagcaataccagaagctgctttcccttgacggggttgacctggaatttgaacctgccgccgtcaagcagattgctgacctggctattgaacggaagatgggggccagaggccttagaaccatcattgaaaatgccatgatggacatcatgtaccggacgccgagcgaaagcgacatcagcaaggtcatcatcacgccggaaacaattaccgggatgggcgagccgaaggtggtccgccgcgaactggaagaggttgccgatgatcattaaacaatcagaattttccgtcagcgcggttaaagccagccagtaccctgaaggcggcccggatgaaatcgccctggctggccggtcaaacgtgggcaagtccagcttcatcaacacccttttgcaaagaaagaacctggcccggacctcctcgtcgccgggcaagacccagaccttgaacttctaccgggtggacagcgaccaagctgacttttacctggtcgatgtgccgggctacggctatgccaaggtctccaagaagcagagggaagagttcggggaaatgatccaggattacttggaaacccgggcctacctcaagggcttgatcctgctgatcgacggccgccacgaaccaaccgccgacgacattgccatgtatgactatgcccagtatctcaacctgccgattttactagtggccacgaagatggacaagatcaagaagaatgcttttaacaagactgaagcagccttcagaaagcacttgaacttgaataaggacaatgtgactttcctaccattttcatcagtgactaagctgaacgttgaccaagtcaaggactggatccaagccagattggacgaagaatagcagacaaaacaaaaatgctcaaaggattttcctttgggcattttgcgtttagcggtgctttttcggcatttgcggccggtggttgaagagctcagccaccagcttgaaggctccgtagatgatcaagaggatcccgatttcgatgatcgactggtggttgaagtattctggggtgatgatcacgatgatccccagggcaaaagaaataacggcttccgccccggtgatgatcatgcggaagaccccggtctgacgccttaagataatcttgcggctgcggccataggcgtaaaagagcaggaaggcccccaggaagtagtgagccaaaaagaccaggagctggttgctcgataaaagggctatagagaccgcgaacaagaccaggtaggtaattaggaagaagcgtttctgctgcggtttaaaggccgaaactgagaccgtaaggatatggttgacgctgaaaatgatccccccgacagcagctagcaccccgaaggccttgaaggcatagttaggtgctgtcagactgatgatgccgagcagaaccaggagccagccggccatggtgtcccggctgaacaaggccgctccgatctgctggttcttgatcaactgccagatcgaggaaaagagattgcccaaaatgaatttggtccgccttgaggagttagtcaccgacaaaaggatggccccgaagcccccgaagccgttcttggccagctggttgatcttgctcgaaccgctagccgccagggcatcaaagaggtcctgggtcagggcttcccgctcttccaggctggctgacccgatccattggttgatcagctggttgtagacccgggactcaggattgggccgcttgcgggtcacgaaatggctgcctttgatctgccaggaataggtatcgtgctgggcgatattgacattggttgagtagacgatgaccgggtcgacctctcttggttcaaagaggcggccgataatcgaaaagtcgggtacgtagcggcggaggaccctttgcaaaaagtcctcgttgtagtcgactccggcttcgctggccaggccggggctgtcaaaggtgtagacggccttgattcgggcccggtagtcttctgggagattcaaggcggcgtattcagccaggttgcccccctttgagtggccgcccaggatgtagtcagctgagtcgccggccaggaggtccttgaggtagcgggcacctaagatctgggccttggtttctttaaaagaaatctcaaagtcttcccgccagccaaccagggtgtcgtcggtccctctaaaggccacatagtgggtgccgtcttcaaggacgattttcaaggcgctgaactggcactggtcagtcaaaacggtgttgaagtgggacaagcgggcatccttaaagcggtcggcttcgctcatcaagtggaagagctcctggtactggctggcgtccaggccggtgaaggaagaggcgaagtatttctcggcgatttcgccaactgtcacttctttgttgccggaagggatgtacttttccaggttaagataagaaaaaattgctaagactaaagcgtcgatttcgttgaaaggagacttttccaagggaatgtcgccgcgccattccaggtaggtcagcaaattgctgttgtccaagatgctcacatccttaaagaaaataattgcaaatgcttacaagttcattttagcctaaatagggcagggatgggcagatttacccgaaaatttagcgacttttataaaatataaaaagccgccaacaagcggcttactttgcctctttgccggcagctttgtcgtcttcctttccctttcccttgccagaagcggctttcttcaggtcgggaacgctggcgaatttgtcgaagagcttgtctaagtcgtcttgtcttttaaaggttaaacccatttgtccatatcctgctttccattgaaataaaagttctgcttttgagtcaattataacgatatttttgctattcagtcaattttgaactatacttagcaaaaactagcaaaagaaagcagcttcaagagaggtgtaaaatgactgacgcgattgatacaattaagagccgccacagcacgcgctattttgaccaaggcaaggagcccagccgggcagacctggaagaagtaatccgcttggccggcctggctccgtcttgggtagattcccagccctggcgggtttatttggctatgggggaaacagccaaaaagatccatgcccgccacctggctttggctgaagcagggacggcggcatccccagactgggagacctggcaccgggaggcctgggatccttatccaagagaaaacatggcccggcacaaccaggccagccaggaatatctgaacacgccggaattgctggaccttaggactaatattttgcagaaaaatctctactatgccccggcgattgcctatttaactattcccaagcagtccaatctttggtcagtctatgacctgggagcctttgcccagactctggcgcttgccgccaaggccaaggggattgacagcatgccggcctatgaattggtcaaatacccggccagtgtccgggaaattatggggattccagaagaccagaccctggccatgggaatcggcctgggctatggcaaagatgagtacgtcaacggctaccaggctccccgccgggatctgcctgacttcttgacaattaaggattaggaaaaagttatataaaatcgttgacttatagtaagtgagtctgtaagattaaattaaatcaaattgagaaaggagctaaatcatgtttgcaatgcaagaaaaccaaactatgtgcgtttgttgtatgtcacttatgtcatacgactgttttgtgttgcctaaactggatttagctcagaccaagtgatttgccaagtaattgttagcttagtggcaaatgaagcagctgtttcctttagggagcagctgcttttttgtctcaggaggaaaaaatgcaaaagatcaagaaattcacccttgccgctgtcagcgtcagtgccgccttcctgctggccgcttgcggcagtcagcagagctcaagctcagcaagtaaggacaagcaggttttaaagctcagcgcgactgctccgctggatacgatcgacatcagtaaggcaaccggctacgggcagacggggaacgtttttgaaagcttctaccgtttgggcaagaacgggcagccagccgccggcttagccaagtccggcacagtatccaaagacggcaagacctggaccttcaagctgcggtctaacgccaagtggtccaacggggaaaagattaccgcccaggacttcgtctactcctggcggcggacgatcaaccccaagactgcttcgccttacgcctaccttttctccggcatcaagaacgccgatgaaattattgccggcaagaagtctccgtccagcctgggcatcaaggctttgaaccaggaaaccgtgcaagttaagctcaaccggccgattgcctacttcaaggttttgatggcttacccgctctttgggccgcaaaacgaagcctttatcaagaagacgggcaagaagtacgcgaccagctccaagtacatgctttactccggcccatttaagatcaccggctggaaggggaccaatgatacttggtcttttgtcaaaaacaaccagtactgggacaagcaggcagtcaagttgagcaagatcagctaccaggtcgttaagactaccaacaccggctaccagctctaccagcagggcaagctggacctcaccccactgtccagtgaacaggttaagcagctgaagaagaacaaggacttcaagacctacccatactcctacgttgccttcttggcctacaacttccaggccaaggacgcgacggttaagaaggctttgaacaacaagaacatccgcctggccctgtctctgtcacttgaccggaagattctgaccagcaaggtcttcggtgacgggtcaagcgtgccaactggcttcgtggcttctggtctggcctatgacccggctaacaaggaagactttgccaaggagcaaaaggtggctaataccgttgactacaatgaaaagctggctgaaaagtactggaagaccgggttgaa

SEQ ID NO: 2370 - DNA, 236 bp, Unknown
  gut microbiota DNA sequence
gatgagcttctgcaaggcaatatgaaagcagctaagcctaagaagctgctgaccatcggctattgccgggtttcttctggccatcaaaaagaagacctccaaagacagaaggatgtagtgtccagatattgtgaagtcaatggctatcagtttaagatcattcaagacgttggatctggtctcaactataagaaaaagggcctgacagagctgatcaacatgatctgcaagaagca

SEQ ID NO: 2371 - DNA, 583 bp, Unknown
  gut microbiota DNA sequence
aatctgcttaccaacgaataccgtcatctggtgcacgaagtggccgacggctgtgacacgatagtcgttgagaagctggatgcctatgagatgcgcaagcgtgggaaaggctctgctcaaagaaaaggtatcaatcgcagactggcggtcctcaagccatatgagctgatgactattttagagtcgcttgtaaagaagcagaacaaaaggtttgtcaaagtggattcattttggacaagcaaggcatgccacgactgcggatacatcaacaaagatctcaaagttggtcagaaagaatggcagtgtccaagttgcaagaagacggtagacagggatttaaacgcagcaagaaacatattagattgggggattcatccagagcatcacgcaaagctgaagaaaaaggccgaagaaggaaaaaatcttagcccttcgtcactggtgacggaagtctaagattaaagcactaaaaacagcccgggcgaaacggaacaatcgtccttagcactagacggtgttatctgcgtaatcttctgagcgagtcaaaacgaagacgagatgacattgggcagttgtgaaacta

SEQ ID NO: 2372 - DNA, 1016 bp, Unknown
  gut microbiota DNA sequence
ctaatttataggagggaaaaatgcgtaaggatctaaaacttttccagcacggcaccctagtcatgctggtcgctggcctctttgacgggaccatcgaagccttatccggtgacgtcaaaacgccctttggctgcgtccactttgacccgaaaagtcctggccaaaaggtgagcggcttctctttgccggaacttgaagcctatctgaaagggtaggggatggggaatatcttctacgccgtcaaactcaccggccgctttgccaaaatgaagaccagaaccgtcttcaagcaagaaaagccatacccgggcttaagtgaagtcgctgaccagcaggctgtctttgaaggagaaaatacgaccggtaccttgatcggttactatgctcctgacctctaccaaggcatcgcttccagcggtttccacctccactatttaagtgctgaccatgccttgggcggacatgtcttagatttttaactggctgaagctgaccttagtctcacgccttttagtgactttgacctccacctgccaactagcaacgctgacttcctgcaggctaactttgacctcgccagcctcaatgaccagatccagcaggctgaacattaacttgaaaggacaacatgaagaaaaagctcccagccctggccgccagagtcaaggttgaactccgtccttgtttctcgcccttaaagaccggcggacctcctggctggccaagctcctggcttttttaaccgtggcctatgccttgtccccggtcgacttgatccctgactttatcccggtaattggttatttagacgatcttttaatcctgcctcttctggctgctttgaccatcaagctgattcccgcagacgtctggcaggactgcctggagaaaagtcaggggatgtgggagagcgggaaacccaaaaaatggtactatgccttgccaattatcatattttggctcctaatcctcttctggatcgggaaaatggtctatcaagggatgcataactgatt

SEQ ID NO: 2373 - DNA, 611 bp, Unknown
  gut microbiota DNA sequence
tcaacgctttctcatgctggattttttgcttgtcagtcagcaacacatggtattgtctggtaaatccatacttttcttcattagacacagatgcacaccttctttcgtcctactttatgctataattataccacaaagaaaggtggcatacactatgatcgtccatgaaagaggctgcgtttataacttcaatttccatctggttttcgtgaccaagtaccggaaagaagtctttgatagcccagaaaaggttgaagaaatgaaagggctgctccaaaaaagagcggatatgtcggacatccagatccaggaaatggaagtaatgcccgatcacgttcacatgcttatttcattttcgccaaaacagaggcccgtagacgtagttaaagggctgaaaggctggacagcccggaaatggttcgagctgcacccggaaactaagcagatgctgtggggcggccacctctggtcaccaagctattttatgagcaccttaggtgacatgagcaaagaagtcgttaaaaattacattgcatctcagtacacggcagccatgaaaaaacagcagaatggcaagtatggcgagttggaaagaaagagaagaaagagaa

SEQ ID NO: 2374 - DNA, 209 bp, Unknown
  gut microbiota DNA sequence
ccggtgacaaaccggaggaaggtggggatgacgtcaagtcatcatgccccttatgacctgggctacacacgtgctacaatgggcagtacaacgagaagcaaacctgcgagggtaagcggatctcttaaagctgttctcagttcggactgcaggctgcaactcgcctgcacgaagctggaatcgctagtaatcgcggatcagcacgccgc

SEQ ID NO: 2375 - DNA, 209 bp, Unknown
  gut microbiota DNA sequence
gctgaagaaaacggccgaagaaggaaaaaatcttagcccttcgtcactggtgacggaagtctaagattaaagcactaaaaacagcccgggcgaaacggaacaattgtccttagcactagacggtgttatctgcgtaatcttctgagcgagtcaaaacgaagacgagatgacattgggcagttgtgaaactaacctaaacactctgagta

SEQ ID NO: 2376 - DNA, 14524 bp, Unknown
  gut microbiota DNA sequence
ccgcctgtcctacgatgacgcggttaagatgctgcaagaagctggcaaggacttcaagtggggcgacgactttggcgcgccagatgaagccttcctgtcagaacgatttgaccggccattcttcatcgttaactacccagtagcaatcaagccattctacatgaagaagaacccggaaaacccattgacttacctctgcgccgacgtggaagcgccagaaggctacggggaaatcatgggcgggtcagaacgtgaagctgactacgacaccttgaaggcgcaaatcgaagaagcgggcctcaacctggacgactactcctggtacctggacctgagaaagtacggaagcgtgccgcactccggcttcgggatgggctttgaacgggttattgcctggatctgcaagctggaccacgttcgtgaagctgtcccattcccaagaatgatcaacagaatgcagccgtaatatatacgaaaaacagcttggagaaaatcaatctccaagctatttctttgctgttagtatctcttacttcttccagtttaagtcactgtttttatcagcttcagtgatttcccggataacccggcaagggttgccagcggccacggagttggccgggatgtctttaacaacgacgctgccggcgccgatcacggagttgtcaccgattgtgacgccaggcaccacccggactcccccgccgatccagacattgttgccaacagtaatcgggtaggcatattccaggccggtatttcttctggccgcgtccagcgggtggccggaggtgtagaagccgcagtcagggccgatgaagacattgtcgccaaaggtcactcccccagcatccagaacggtcaaattatggttggcgtagaagttgtcgccaaccttgatattccagccatagtcgcaccagaagttggattcgatgtgacagttttccccgctttggcccaggatttcctttaagagttccttcttttccgctccagccggcaattggttgtagcggaggcacttggccttgcaggccgtcagttccgtcaccaggtcttcgtcttggccaggattatagacctggccagccagcattttttctttttcagtcggcatttctttcctccagtccctgccaaatctttttaacagtagcgagcaacagataagctgaaatagataaacatcaaggtgatcatctgccttacctcgctctgaatactttttatccatttttagttatcttgcttgttattttactctaagagttatttttgatcaattaactatttggccaaaggagccagaaagtcaatcgagcacattattaagccagcagaccttttgctaacattgttttgttgggcgcggcgaagccgcgcgatttgtgttataattattgtagtaacaattaggatagttaaaagaatggttaaaaagaaaggcgcatgtcatgtatccccaccaggaaggttttgagaattggtgccggggtccgcaaagactcagccccaagtcaattgcgaacgccgattactgtttggaccacttctttacctatgcagaagtgaatttcccatccagtgacgttaatgaaatcacggccagcaatgtccgtgactacctgcagcagttggcgactaaggaaaatttgcaggtcacgaccgtcaacaagtatgtctcctacattaaaaagtacttctactacctggccctggctggaattaccccaagctatcgtttactagacctcaagggctactcttttgagcggcggaagacctatgtgatcgactggccagagcatttgcctgcccttatcccctatgtcaagcagccggtgactctctggctgctgcagctttttgccctgggctatcaggctaaggaactcttagggattcgctatagcgaggtgaaagacaatttgggcgagatgactgactacctaaccagctctctttcctttgaaaaggacccggatccttatattttcgcctccaggtccagtgaaccatatgccagtaccaacaacatcatgcagctggtcaagaccgacaaggatctcctctcccccatgccaatcactctgaccaatctccgcctctcttatgtctattccttgatcagccagcagaagtattctgacaaggaactcctggagcttttccgctgcccgccaaagcgtctggcctactaccagtacaacgctgcccagtgtaatctcattccattttctgaagagatcctaaaaaaggccggcccaaacgccgcccctgcaagaaaataggctataataagttaatagtcagtaaaaggagattttttatcaaatgaagaaaaagaataagcaagcagctgaagaagaaagctggggtaaatttttccgggacgtcctggttatgttcctggtctttgtctcaatttattatgttgtcttctccttcttcttagccaatgaagtggtgtctggcccgtccatgcaaccgacctttgaagacggcgaccgtttgattgctgtgcgccacttcactcctaagagaaatgacgttgtcatcatcaaggcgccggaccaggcaaacgccatgtacatcaagcgggtgatcggcctgccaggcgacacggttcagtccaagaacgacgtcctctacatcaacggcaagaagacggcccagcaatacttgaacaacaagtacaaaaaggctgaccatttagccggggtctactacaccagcaacttcaagatcaagctgaagaagaaccaatactgggtcatgggtgaccaccgggacgtttcaaaggactcccgctacttcggcccaatcaagcggagcaatatcttgagcaaggtagttctgcgctactggccagttacccagatcggcaccaacttttattaataagcagtaaagggataaaaattagtatacagagaaccaaaagagtatagaaaatgacaaacaagaagaaaaagcaagcgcctaaagaagagagttggggcaagtttttccgggacgtcttagtcatgttcctggtcttcgtctcaatctattatgtggtcttctccttcttcttagccaatgaagtggtgtccggcccctccatgcagccgacctttgaagacggtgaccgcttgatcgccatccgccgcttcactccgaagagaaacgatatcgtcatcatcaaggctcctaaccagccaggtgccatgtacatcaagcgcttgattggcctgccgggcgacacggtccagtccaagaacgacgtcctctacatcaatggcaagaaggttgcccagccgtatttaaacaataaataccaaaaggcggactatttagcaggcgtaacttatactaacaacttcaaggtcaagctgaagaagaaccagtactgggtcatgggtgaccaccgggacgtatctaacgactcccgccgcttcgggccggtttccagaagcgcgatcttaagcaaggtcgtcctccgctactggccagttacccagatcagcagcgacttttactaaaaaattctgaagctccctcaacaacttttcaaaaaatggtaaaataaagttattaaggagtgaaaatcaatgaaaccagaagaactttcggatgcaatcatcgaatttcagagcaagcacactgtgaacgatactaccctggcctttgccagccacctctcagtggaaaaggtgcacgccatgaagcaagggcggggcaactttaccagcgatgaaatcaaccagatgctggactatctccagagctatctccagagctaaatgtaagcaaccgggccaaacggcccggttttcttttgccctttttaccctacttttcccctctctaatttctttttatcgcttcattgtttcacgctagctattttacatttcgtataaagtttaaaataataagaaacttgttatgtaaaggacaacggctattatttcttaacagctaccatttttatcatttagctttaacccactatcgcaagcgataaagcttgctattacagcatttctctttctagctctgtaagcctttttctccgatttttgttccacggtctctttttactctatccccggccaagttattcacaggtaaaaaataagagccaccctagagcagctcttatcctttatatttaagttatcttgtcttacttgttccggtcagcttgcagttcagccatcttgatcatgacgtcaacagccttccacattgattccagaaccgtgtattcgtagcggccgtgcatgttttcttccccggcaaagaggttcgggcatggcaggcccatgtaagtcagttgtgacccgtccgtaccccctctgactggttcttcattgatttcagtcaagccgcaggctctgtaagcatcccgagccaggtcaatgatttccatgtgcttggccagttcatcagccatgttgtagtactggtcccacatcttcagcttgattctttccccatacttggcgttgagttcagccaccttttccttgaccaggttcttccgggcttccaggccgtcgcgcttgaagtcacggatgatgtaggccaggtgggcgttgtcaaccgtaccagagaagtccatcaagtggtagaagccttcttcgccttcagtcttttccggcacttcgtcttgcggcagggagttctggaagtcgatcccgacttgaatggcgttgatcatctgtcccttggctacagctgggtgcacgttaacgccttggatgtccagttcaaactgagctgctgagaaggtcccccagtccagcttgcccgggccctccccgtcaaccgtaaaggcaaaggcagcgttgaagtcttccacatcaaagtgctgagcacccgtgccgatttcttcgtctggcgtgaagcccaggcggatttccccgtgcttgatttccgggtgagccaggaggtattcagcaaaggtgaccagttcggcatccccgcacttgtcgtccccgcccaaaagggtatcaccggaagcagagataatggtctgccccttgtacttcttcaagttcgggaagacggccgggtccaggtagaattcgctgtcgcccaattggatcttgctttccccgtcgtagttttcagtaatctgtggcttaacattttctgaattgaagtcagccgtgtcgcagtgggccaagaagcccataaccggcacgtcccagtcaacgttggaaggaatagtcgcgatgaccgtaccggctttttcattgtagtgaacgtcacttaagcccagttcttccagttccttcatgatgaccatttggtagtccacttctctttgggtggatgggaagcggtcagcatgttcatctgaccgggagttgatcttgacgtacttcaaaaatcttggcagcaaagttgggtattccatctttttctccttattctttacataaacaaaatatttcacttactaaaaaatgttctggaagggatcggttgattcagcgctgattaagcactctacgctccagccctcttccttctgccaggcactgagccgtttggcagcttcatacttgaagagcttctccgtatagtggcccggatcaactactaccaagcctgatgaaatcatgtcatggccagtgtggtagtagacgtcaccggtgatgtaggcgtcgcatttgtcagctaaggcctgtttccagaacttgttcccgtccccgcagacgaaggcaacagtttccaccattttatcctggtcagcgcagatcaggcgaaccatgtccacccccatcttttccttgacgtagtgggcaaagtcaatcgccttcatggcttctggcaggcggcccttgcggccaatggcgatgccgtcctcgtctggggcaaagctggttacgtccaaaaggccaagttcttcagcctgccagtcgcttgacccgtcctgggccttgtcggaattagtatgaatggagtaaacggtgatgccattagcaattatcttggcgtacatggccttctgcgggtcgctgtagtccaagttgttaaccggacggaagatcaaggggtggtggctgacgatgaggtcagcgcctctcctgatggcttcatcaaccacatttggccggacgtctaaagtcaccaggatcttgtggactggtgcttctaggctgccgatctgcaggccgaccgggtcaccggcactggcgatactttccgggaaagcttcatttagtttagctacaacgtcttttactttagtcattttccccacctaattctgtcttgatcatagccagcaagttttcgacttccttgatccgggtcaggtccttttcccgggccttgttgaggttagccaggagcttttggtagtaggcttcctgtccctgccacttcttatagaaaacatcagtcttgttctttaagagcaagggaccaaattcctgctcgcggacagtcaattcgtgaacctggtcagttaaacgggccttgatcagctcatagatgtggcctgcttcatagacgatgtcttcagcgacgatctcgtacttgttggccatcagccaacggcgtacggtgttttccccaatattggcttcaaggaccaggcttgggtagtaaacgccccgggaggcggcttcagagagcaggttgaccatcaatttaccgcccatgccggcgatgacgaccgtatcgatttggtcgctttccttaatggtttccaagcctgaacccagccgggtttcaatctggtcagaaagtcccgcggtggcgatgtccgttttcgcgttctctaaggggccagccgcaacgtcactggcgatagcgtggctgatcttgccgctctctaccaggaggatcggcaggtaggcgtggtcggtgccgatatcggccaggcggctgcctggatcaaccatctcggcaagtctgttaagtcttaaattcattagtaaaacgctcctttatccaaaagtaaattctatcatatgccagccagcaaaagacagtttctgcaaagaaataatctacgtgctataattaattgtatttttgtcagcttttttggataacaggaggaaagaaagacaagacatggagcggacagagcctactactttaactaatatgtgcatgatcgtggacaaagaccgggttctgacgatcgaccgggaggacccggtttggccaggcctggcttttccaggcggccatattgaaaagcatgagtcatttcatgattcagtcattcgcgaggtcaaggaagagaccaacctggacatagtcagtccccgccttgtcggcttcaagcagttttttgacaagctggaccggcgttacctggtcttcttctaccgggccgaccagttctcaggaagtctccacgcttcaagggaaggcaaactggaatgggtcaagatcagcgatttacctaagcggcagttagcctacaactttgaccgagacctggaagtctttttaaagagtgaccttgatgagcatgtattgttggacaagaaggactttttatattaatgagcaagaaaaagaaaaataataagaagagcaagcggatttggggcggagtcgtgacggtggcactttttgctgccctcttcgctttcgcgggcgtgtatatcaagaattatccagtggaaaaggatgtcaagctggtcgccacccagtctaaggccttgaaggccaagaagacggtggctgaaaaggacatctggggctatccattcgccaagtgctacaccaagaatattaaatacttgtctggccagcgctacgggaaaaccgacgtctgccggcgggtctacccgaagaagtcctacttccatgacggctgggactttggctggagcgaggtcggcaacaaggcggctgttttggctattcacccggggactgtgaagaaagttgcctactgcacaggtctgggctggtatatctgggtcgtttctccagacgactatgttgaagtctaccaggaaggtttcgccaaccggtcagacattacggttaatgccggccagaaggtcaagctgggcgataagctcggccggctgactgactcccacctgcacctggggatcaccaagaccagcgctgactacatcagcaaacacggtcacccttacaagaactactggcggaacaacgacacctggctgaacccgatgaaggtgattactgacagcttgcagttgcaagaggatgtcaaggaatacaacgctaaggcagccagctacaatgccaaggctactagctacaacgagaagctggcagctaagaagaagaagctgaaggtggaagaaagcaagcacccttaccactacttgaagtcatttatcaaatagacagagaaaaaaagacgactgaaatatatcagccgtctttttttgctcacttttttgtcccgcccttttccaggtcaaggagaagttttttagctgcaaggccagcagcgtagccggtaaggctgccgtcggccccaatgacccggtggcaagggattaagatcaagatcggattacaattgttggccaggccgattgcccggctggcattcttgtcgccggtcatttcagccagctgctggtagcttctggtctccccgtaaggaatctgctggagctgctgccagaccttttgctggaagctggtgccttctggcgaaaggggtaagtcaaatctttgtctttggccggcaaagtattcctttagctccctcatgcaggccttaaccaagtcgccggaaggatcatttgggataatccggtcagccgggacctggtcagttgcttggccagtctttttctcaagataatttgccggttcaacgcagaggatggcatcttgggaagcgacaattctgagcggcccgattggcgtgtccatgacggcccgggagatattttgggcaaaaagctgccggtacttagccggcggcatcccggacagcttgcggaagtgggcataaaagctggagaagttagtgtagccggaatcagcggcagcgtcaaaaacgctggctccggcctgcagggcttgcttagcagcagcgattctcacctggatcaagtattctgccggcttcatgtcatagtaacgcttgaagaccagggacatttgctttctagttacgcccagctctttcagctgctggttaagctcttgccggtcagtaaaatattggtcaatgacggccttgcttgctttagccaggtcgcagtccgggtcatactggggcaggtcaggccggcagcgtttgcagggaccgtagccagcagcttctgcttccgcactgcttttgaaatactcaacattgtttcttctgggacattttgacttacaagaaggccggcagaaaattcttgctgtctgcacagcataaaagaacttgccgtcataagcctggtcgcaagtttggactgcctgccacatttcattgtcatccatagctcctctcctcgttttcaaacggtagaaagttttcaagaagcactttcagctatattaaactttaacatatttagccagtctttgcttctgaaaaaggcagattcaattgttaggataaaaaaacggctgacacaagtcagtcgtcttttaactctatgcaattacttcttaatgaatttggctgcttccaggcctgcaatgcggccggagtttacggcaaagcccatagtgttgcctggcagggtaaagttgtagctgtcagcgtagatggtgttagcatctgatcccgcgctgtagaggcctggaataacctgatcttcgtcatccaggacttggcagttttcgtcaatcttaacgccgccaaccgtgccataagcaccgctgtagaacttgccaaccaggtagccgccctccccggtcaatttgtggaggtagtcaggattcttgaaaaattccctgtcttggccatgatcacaatagctgttgtagtcgttgatggtcttttgcagtttatcagctgggatgtccagcttttcagctaattcgccgacgctgtcagccgtaataatggcctcatattcattctcttctgccttcttgatcaccggatccagcatcttaaagccagcggccgggtggacgatgtccatgatgtctgggccgtcttcctggtacttttgcaaaattgcccggtccatgatgacgtaggcgtagtggcctggctgcaggaacatggcattgccggaaaaagtagtgttgcccagcatcccttcatccataaagcggtcacccttctggttgatcatcaggtttggctggcggagcaccccgtcggcgaccatgtattccaggttgtgcggcaaaatgtagatcatttcaaccgtatcaccgtacttttgggcaccggcatcccacatcatcttcaagccttcaccattgatgcccggcacgttgaaggtaaagaagtccttgtcctggttgaagcctaagcggtccttcagcatttcagcgtttgatccgtagccgcccgtagcaaccacaacggctttagcgtggacggtgtacttggccgtttcgcttccagcgattaagccagtcactttgccttcttcagtcaaaagccctttaactggagtttccaggtagaacttaactcccaattcttcagcccgcttggtcaaggccttgttcatggctgaggcgcagcctggcccgatcttgccgtcgcctggatcaacgatgtgccaggtggcgttggattccttgaagtagcggaaagccccggcgaacttgactcccatgccttccaaccagtcgatagttgaggcggactgcttgaagtagcgggcgaccagcctgccgttaacccggtagtgggtgtattccatctggttcttcaaggcttcagccactgagatttcattgaagttggccttttgaatcttgctattgatccccagtggccccatacccatgtttgcggtccccccggtgatcttttccttttcaaaaaccaggaccttgacgccttgttcagcggcagaaacagctgcagctaagccagctggtccggcggcaacgatggccaagtcagtggtcaattcttcactggtcttgtcctggctttccccgctggcttcctgcagggcgtttttgacagcagtcatgatggcgttagaagaaaccgtagcgccagatacggcatcgacatcggtagactgggcggcgatgatttcgctggcgatcacgtcgttagccttagactggtattcccctgctccgaccaggacttcgacagcgctgatcttcccgccagtaatggtggtagcgactttaaccgggccgtgcaggccttctgcttcagtttggtactttccgtcttgatatgacatggtagttctccttgctttccttacttgttttctttaaccgcttacattgtatcgtgaagaaagtataatagtaattaagcaaggtatctaaatcattagcaaaaagtaactatttagaggagtgagaaaatgtttaaagagctggaaaacgttgacagagttgagatcagccatgattcttttattgaggaaaataacgggaaaatagctcagactttcacttggagttagttgaagtcttctccccttgtcacgcggtcttaaacaagctgccctgtcagctggctccctatgatattgtgatctcacggaagtttccccggctgactttttcaacaaagaaccttttagtcttagactggtcagtctggactttaaacagcaagcggtgctcgacatgctcaccatggccaataacgggctggtgcatgacatctttaaggacctggcccaagcggagagctacgtgcactataccggcctggacaacatgatttgtcatgaggggctgaactgctgccagaagattgctgaggcgggtgaagacggctatttcgtggattataagaactttattcttggacccttttcccagatcaattacattcaagttatagttgttattttttaaagatgggttttcaagatttttccagtgaaaactagtgctaccattagaggccagatctccataaattctttcgctagtctgttgacgaagactgtcaataatccctgataaaataatgaagacgtgaaatccattatcagcagcttgggcaattaatgctgtcatattcgcagttttaccagattggatatcaccaaccaccagtcctttacaggaattcttggctttattattagtctgcaattttgtcaatagtaagcacccaatagcagagtatattaaaatcccatcctagcaatgctaagatgggattaatcagtttatgggactttacttacagtgtagctgaacattttcagcccatggtaaataggcttccagacgctgattgtctaataatgacagctcattgggcagcttgtctagaagatagttgatgtatttgaattgatccaagccattttgcttggcggtttcgagtatgctcataatgatagccatggacttggcgccagtactgctctgtgaaaagagccagttcttgcgtcccatgacgatctctttgactgctcgttctgctctgttgttggacagttcaaggcgaccatcttttagaacgttcatgaacttgtccatgtgctttatgcaatactgaaaggccgtccccagcttgccggaaggcaacacggagattgatttcttggagcaccagtcggaaaacttctctagcagaggctttaattcagactgacgcttctcgtatctctcttcaacggaaaggtctttccaagcgtactccaggctaaacatttggtcacagtagtggatcccttgattagccactaaagttgtgtcggattctctagccttgtctttaggcaaggaatcatggaatttacgtcttgcatgagccatacagcctacaagagtcacatcctgttggcttaatcgtaaatagccaggatattgatcacaatgaaggtatccgctgaagcctgcgaggaaatcccatgcttccgcaccttttcgtgatccatggtgatacaggacaatcgacttctcggcatgcttgcctgacaagaaagtccagacgtagtctttggttctttcgctgtctaagactcgatatggcgtctcatctgcgtgaatgacatccagctttagcagctcttttctcaagagctcgtaaaggctggagaggtagtactcgcagactttgatatgccaattcgaaacagtcttgtgatcaagcggaaggcccatacgccgcaaatctttctcttgccggtaggcaggaaccttgagaacgtacttctcatagatagtatttgagatcaaagaagctgagccaagactgttggttaacggagccttaggtacaggtgctttgataatcttgtcagctggcgctttatcactgcagtgctggcacttgtaagagtgttggatgtgatcgattcgcttaacttgggctggaatgtagagcaactcttttctagcacagaagctgccgatctctttcagttcgtgctggcagtctggacaggtaaggtcatccaaacgatggtgaacctcctcgcccggcagagagtctaagatatcttgctttctgccgacttgcttgcgtctcttataggtaatagtttcggtaatgcgagggcaagtcctcgtcatcttgggaggcgttgtcttcttcgaaaaggctcagttgatctgggttgacagctttcttttcggaagacttcccgtaaagcttattagtcaaataagtaacttgttcagtaagaagggcaacctgcttgagcagctcttcattgtttgctccgagcgtttcgattaaagctgaagtttctttgtcagtcatggttgttgtccctccttgattaataatcaaaagaataccagaaaagctcgtgaaatcaatagaattcacgagctcttgcggtattaattttaggatcaatggtaaagccctgcatcaagcgcatgacttgctcatcggacaattctcgaacttcgtcttcattgttcggccaggccaacttcccgttctcaaagcgtttatagagcagccagaatccctggccgtcccaataaagtgctttgaagcgatctcttcggctgccgcagaagagaaagacacatccagagaagggatcaagattgaagctcttcttaactatgtaagcaagcgaatcaattcctcgtcgcatgtcggtcttaccgcaaacaatgaacactcgacctaattcagccagattaatcatggttcaagaacctgtctatgacttcaatcataagctcattagtggcatcactgtaaaatgacagctcaacccctttggacttcagattaaggacaagtctgttccttgtgagcctgttcttaggcttaactctgcccttcggcagctcaagcggtacgattggatgttcagtcataatatcgtgttcctccgtattcaatgttaagaacagtatatgactattgaccggcgagtaatagataccgcgctattgggcgcttactgtcaatacgtagtgg

SEQ ID NO: 2377 - DNA, 209 bp, Unknown
  gut microbiota DNA sequence
gacgctaagtacgacaagaccccaatggttgccctggtagccaatgttccaactcctcgtcaagacatcaacttcttccaagcctttgacgaaacgccatggtttcgtgacgttgccgtttgggtccaccaagccaagaccaaggaagctttgccagttttgatggacactgctatccgtcaagcttacgcaaagaagggtccagctgt

SEQ ID NO: 2378 - DNA, 303 bp, Unknown
  gut microbiota DNA sequence
aaggcttatctggtattggtaaaaagcgcgctaacgacataacgcaaagccttattcgtttggctaaagtcgcatgcccagcggtcaaaaagaacagtgctcatgtccgtggcctcaaaatggctattaacaacattctgagcgctgaagaagagtgccagactgctttacaggagatggctaagctggctcctaagcgggatctagagatcctcacaagcattccaggcattggcgaaaacacagctctaagaatcattagtgagcttggggacatcagacgttttaacaaccctagccaat

SEQ ID NO: 2379 - DNA, 383 bp, Unknown
  gut microbiota DNA sequence
aagccagtcttggtaaagccccgggcaatcatgtaggccatggcgatggtccatggagttgagtcagcgaaggctgacagggctggcttcatttgcaccaggcccaggccgatgatggtcacgtaggcgatgatggataccccggcgattggcaggggcttggtaatgcaggcaatgatcgtcgccaggaagatggcgaacatatgccagccggcaacggtgatggtcgccgggcgcagaggagtgagcaggaagagcccaatcccgatgatcaaaggccagatgaagcctttgtaattaacttttgctaacattttttctcccgcttttgaaaaaaactattcttccggcttagtccggtcgatgttggtcatggccatgta

SEQ ID NO: 2380 - DNA, 417 bp, Unknown
  gut microbiota DNA sequence
ggggaaagcaaggctaaggctattaaggccatggttgaagggccagtgactacggatgtcccggccagcgtcttgcaaaagcacccgaacgttacggtggttgcggaccaggcagcagcgagcttgcttaaataagaagcaaaacaggaggctaattaatttacttcgtaatcacaaaatgctaaaatgtaattacgaggtgatggtgatgcaatattcaattgggacgtctaaactgtttaaatccggaaattcgtatggttttagagtgacaaagcacgacaaggaattattgtctgccaacgctggagatgtttttgataaagaaatatctcccgatggtcaaacaattacttttaaaaagaggaaaaaggttagtcctgaaacacttgctttaattgataaactgtttgacga

SEQ ID NO: 2381 - DNA, 2289 bp, Unknown
  gut microbiota DNA sequence
tgactccaggcgttgccaagtcctcaaaagtgtcaaaggacggcttgacctggaccttctacttgcgcaagaacgcgcgctggtcaaatggcgaccaggtaaccgcggctgactttgtttatgcctggcagcggactctggatccgaagactgcttctcagcaagggaacctgtatgacgggatcaagaatgctgatgcagtagtggctggcaagaaaaagccaagttcattgggggtcaaggctgttggcaagtacaagctggctgtcagtttggaacacaagctgccatacatgaagtatctggtagccagcggacttttcccgcaaaaccggaaggctgttgaaaaatacggcaaaaagtatggcacagcttctaagtacatggtttacaatggggcatttaaacaaactggctggacaggctcaaacttgagctggaaactggtcaagaatccctactactggaacaagaagtctgttaagctgcagacagtttcctatagcgtacaaaaggcgcagtcaacggacctcaacctttatcagagcggcaagctcgacgctgccctgctcagcagccaggcggccaaggctatgaagaccaataaagcttacacggttcgccggcaaggcaatacccaatacttgacttataacgtatctaagtacaagttcctgcaaaacgtgtgggtaagacgagccctttcaatggcagttaaccggcaggctttggtaaagacggttggctgcgaaaataccgttgccaagacattctccgcgccaacagtagttgccagcgggcaaaagttcgctgcttacgttgaaaagcgcaacccaaacaatgtctacatgacttacgacaaaaagaaggctgccgcatacctggcaaagggattgaagcaactgggcatgaagaagctcagcttcaccttgactggcgacgatgacgatacttccaagcaaacgactgaatacttgcaaagctgctttaaggccgcttttggcgacaaagttgacgtttcagtatcaaatctgccaaagaccacgcgggtcggccggatgcttaacggccaataccaagtcactttaaccggcttgaccagtgacttcccggatccttacaacttcttgaaatacatgctgacgggccagagctacaacttcggcaagtggtcaaacaaggcttatgaccaagccgttaacaagtcacaaaccgcgactggcgcaaagcggctcagctacctcttgcaagcagaggaagttttgaccaaccagcaagctttgactccactttaccacatgggccaggcctggcttgtccggccaacggttcacggcgttgtctttaacggcggttcttactggtttgcccacgcttacgtttatcaaaaataaacagttgactagattgattttcaaaaactgaacgattaataacagcagagagtatagaaagaagagacttcttatgaccaagacgacttttgttaactgtaatttatttgttgggactgaagatgaggtaaaggaaaatgcctggtttaccgttgatgccgcgactggtaaaatcactgaagtcggtcaaggcgaggtaaaagtcgctgacaagacggtagatctggatggccaatatgtgatgtcaggtttgatcaatgcccacactcacattggggtggatccttatgctaagcgggcgtatccagaaactgaaactagcacgaccgtggcagctttggagaatctgcggtcaggcctgcaaggcggggtgacttacctgcgcagctgcgcggttagctttgacgtcgacatcaagttgaagcgggaaagagcgcagcatccttttgaagggccggggatcatgccatgtggccgggcaatttcagtaattggcggtcacggggatgccagaaatggcgaaaacaacgaatttgagtcatcctggctggttaacgggccagatgaaatgcgcaaggcggtccggacgcaatttaagctgggggcagaaaacatcaagttgatggctaccggcgggatcatgtcaacgactgaccaagttgatgatacggaattgacttttgaagaaatcaagacggcagttgaggaagcccattccaagcacatgacgatttgtgcccatgctcaaggagctcaaggggttcactattgtgttgaagctggcgttgattcagtagaacacggcttctacgtgactgacgaagacattgagaccatgaaggagaaggggatcttcctttcaccaactttgattgctggttaccaagtggccaat

SEQ ID NO: 2382 - DNA, 947 bp, Unknown
  gut microbiota DNA sequence
agataaaattagataaaaatgaaattatcactttacattttgacttgcttcagtataataaaactatctcaaaaacaaaaagtaaaggatggaagttaataatgaaagtaaaattgagatagttcactttatggtgaagcgggtcttttcaaccgatcgattgtgctgcgacttttaaagaaagcaacagatcaatcaagaaaaaaggaccaaatcacatgaaaaagaaaaactatattcccatggtaattactagtgtcgttgcggctactcttagcgcctgcggaagcagcagcgccagcagcaaggcgacttaccaaaagtcgatcagctggatgaccacgtcagaaattgaaactatggatcccaacactactgtggatacggcaagtggggagcaagagaccaatacatttgaaggccttttccgccttgggaaaaatggcaaggttaagccaggcatcgccaaaacagcagcggtatctaaagatggtttgacttggacgtttacccttcggaagaatgcttactggtcaaatggtgaaaaagttacagctcaagactttgcctattcctggcaaagggcggtcaatccaaagactggtgccggaaacacgacagagtaccaggtgatcaagaacgcggtcgccatcactgaaggcaagaagtccgcgtctagtctgggggtaaaggccgttggcaaatacaagctcgttgtcaagctggttcacccagtgccgtatttcaagaccaccgttgccagcgggatgtacccggtcagcaagattgctgttgaaaagttcggcaaaaagtatggcacggcttcgaaatatcagtactacgacggaccttttattcaaaaaggctggactggttcaaacctgacctggaaactggtcaagaacaagtactactgggacaagcaagctgtcaagctgctgaccgtc

SEQ ID NO: 2383 - DNA, 320 bp, Unknown
  gut microbiota DNA sequence
aaagcaggctgtttcagagttgaattgaactcatacagaattaccttgaacaatctagggttaaccttagctttctgctgttcgtaagccgatgcggtcattcgctcagagaacttaggaaatgcgtcagctagctccttatttaagcagtttccttgcatgccaagagtggtcttaatgaatgtcttagcatccagttttcttttacgcgtgaagtctttacttgggtgataagcaaagtaattgatgtattcagcagccttatccgttacagaatcaagctgtctaaagacttgatgtttcttagtcatgagaatacg

SEQ ID NO: 2384 - DNA, 8959 bp, Unknown
  gut microbiota DNA sequence
ctgcaagtcacaagaaggccgctatcgcatcgatccataaattattacggacgatcttcgctttaattaagaatgatcaattgtatagctatgacgtagccaaatataaccaaagacttttgtcataaaaattgatccaatagatattataacagcctcttttttgaaattacagaaggtggctgtatttatcatgccctaaatcagatatttaactcgattctccgggaaccatttcccgattaggcccttatttcaaaataaaattgcctaaaatcgttgataacacttgacttagagtagaaaagagcgtgccggaaaatggccacgctcttacaagttgctgacaaattaatgatgagagcaactcttgccggttaaatttcgttgatgccgatccggtccagcttctggtcgcggatggtcagttcttcttcagtttcgccgataccaaccccgcagaccggcatgaagccggctggcaggtccagcttcataactgtttctgggtgagtggccagagcagctgccgcgccaaagaggtagcaagcccccaggcccttgttttcagcagccagaaccatgttgtgggcaataatcccggcactggcataggccatctcgtcctgcttcttggcagagaccaaaatcaaggtcggcacaccgtacaagggatgtgattccagatcaccaaacatcatggctgcttcctggtcgatctcctttaaaagctttgggtcattaatgatcgtcagctggtagttctcgtataagccgcgggctactggagccagttcagctgcttcgatgatcttcttgacctgcttcttgtcagccggcttgccagtataagtccggattgacttacgtgatttcaacaatttcgtaaacttcatggatgattttccctcctgtcaatctaacaaaacacatgtctgtcgattccttagctcgattataccgcaatcacttcagtaagcggttgaaaatggttttaaactttttctacaaaaaaattacctgctttttcgataaaagagcttgacttaaagggcaaaagtctttatagttaagaaaacatatgaatgacctttaaatttagtcccgtgaggctaagaaggcagctcaaaatccatatataaacaagaaattcttggcaaacattcgaattgacaggaagaccggggaggaagctttccgggcagtttaagcagactttgagagaccattttagacacggagactgagtgtataaaatggtctttttgcttaagttattttcgaaaggatgccaaatcatcatgaccactgttagccaaaaccaagtcgttgtcgaaactgaagacaagcaagacaacttgctccgtctgccttactttgtcagcgttgaacaactgagcgccgacgacgtgctgcacctgctgcaaagagcccaatacttcaagaacggcggggaagtaccagccttgagccggccaatcttctgcaccaacatgttctttgaaaactcaacccggacccacaccagctttgaagttgctgaaagaaggcttggcttgactgtaatcccatttgacccatcccactcttcagtcaacaagggggaaaacctctacgacactgaactgaccatggcatctctgggcatcgaactcagcgtgatcagacacccggaaaacgcctactacaacgaaatcatccgcccaaaggaaggccagcacctgcaaatgggcctggttaacgctggtgacggttccggccagcacccatcccaaagcatgctggacatgatgaccatctacaacgaattcggccacttcgacggcttgaagatcatgatcgtcggtgacttgaccaactcccgggttgcccggtcaaacatggaaatcttgaataccctgggcgcggaagtctacttctcaggtccggaatactggtacaacgctgaagaattcagcaagtacggcacttatgtcaagaacattgacgatgaaatctcagaactggacgtcttgatgctgctcagagttcagcacgaacgccacaacggggcagacgccaagactgaacagctctttgatgccaaggactacaacgctgcctacggccttaaccaacgccgctacgatatgcttaaggatgacgccatcatcatgcacccgggcccaatcaaccgcggggttgaatgggacggtgacctggttgaagcacctaagtcccgctacgctgtccaaatgcacaacggggtctttgtcagaatggccatgatcgaagccgttctgcgcggccgtaagttgggaggccttgaataatggccattttgctgaaaaacggcctggtttaccaggaaggcgaattcatcaacgaagacgtcttgatctccggcagcaagatccaggccatcggcctggatctgccagaagagggtgctgaagtttacgacttaaagggcaagctcctggcacctggcttagtggacatccacgaacactacagagagccgggctttacctacaaggaaaccatcaagacggggtctgaagcagcgtcccggggcggtttcaccacggtctgcaccatgcctaatgttgacccgatcccagatgacctggaaacttttgaaaagcaggttgctttaaacgaagccaacagctgcgtccacctcaagcaatacggggccatcactgaagacctgaccagtgaccaggtggttgacatggcggccttgaaagaagcgggggcttttgccttcagcaatgacggccacggcatccagcaagccggcactatgtatgaagctatgcaggaagctgctaaggtaggcctggccatctgtgagcacatccaggatgactctctttaccatcatggggtgatgaatgccggcgagaaggcggaagaactcggcctgccaggcatcctgggggtcagtgaatctgcacaattggccagagacctggttttggcccaggctaccggggttcactaccatgcctgccacgtttctaccaaggaaagcgtggaactgatccggatcgccaaggaatacggaatcaatgtaaccgccgaagccgcacctcaccacctgcttttgagcgaagaagagattgacggcaacaacggttactacaagatgaacccgccgcttagatcaaaggaagaccagtttgccttgattgaaggaatgctggacgggacgatcgacttgatcgcgactgaccatgctccgcacagccgggaagaaaaggccggtgatatgcggaaggctgcttttgggatcattggcaatgaaactgcttttgccagcctttacaccaagttcgtcaagagcgggcaaatggacctgagcctgcttttggacctcatgagctaccagccagccaagctctttggcctggacgctggtgtcctggctccaggcaaggaagccgacctggccgtctttgacctggaccacgccgaaaaactggccgaagaagactacttgtccaagggggttaacacacctttcaccggccaggaagtctacggcatgaccgccttgacttttgtcagcggcaagctggtttacaagagcaagcactttgccgactaggcaaatggcaaaataaagtttttaccacagaagaaaataactagcaaaagacgaaaataagtccttctctaatcagaggaggacttattttgtttggcgctggcattgagggcggcccgttgctctctttggtcaacgtgggtgtataggtcggtggctgaggtgcccttttgccccagttgctgggcgaccatgacctggtccttggtcgcttgatagagttcagaagcgaccgtgtggcggagcttgtggggggtgagcgggtggccgaaggcagcagaatacttgccaaccattttttcgatggcattggtcgtcatccgccggcattcctggtggtagctggttaagaaaaaggccttgttagtggctggggccttgtagcggtctgcccggattgccaggtacttttccaggtaggggagggtccagtcagcaactggcactgagtctctctgtccgcccttccgggtgatatctaaagttgcctcttttaagttgaggtccttcatgtcaaccccggcgcattcagaaacccggattcccgtgcctaagatcaaagcgatgactgccatgtcccgttccttgttttgcttaaaagaagaaagggcgcgtccactgcagaggccggcaaatttttggtccaaaaagtccatgaactggtattttaagttgccggtgtacatgtgagcttctaaggcatgagcccggtagttcaaggtgcttgtataaggaagggaattgatcttgagcatgacattgcggtcaaaataaggctcgccattgttcttgtcagccgtgatcgtcaagtacttgtacaaggagcgcagggcgttgagcgaccggttgacggtcgtcggggagttgaggtgtccctgcttgttcctgctgtgctccagtttatccaggtagagcatgacatcgctccggctcaatttttccaggtcgcttggcagcacttggctgggacttttcgcctgggtcaaattttcagcgatcagccaggagaaaaagcggcggatttccgttaagtactggtagctggtggtcagagagtgccttgtttccagctggtattccttgacaaagtccggcatctgggccatttcccggtcgatgagggagaggtatttcttggtttccatatgactccttatcctttctccaaaaagtggttcttgcactcgtcttcaatgatggtcagcatttcttctaagatgctataattaccaatatttttccgttagcttaattatactagaaagaaggcgaaccgacagctagttgatcagttgactgtctttcagccaggcggctttttgcttggaaaagcgttaaaatagagctgactattgaaaaaatgaaagaggcagaaaaatgctcaagtttattacagccagcgacagtttcaaggaaagcttgtcagccaaagcggcctgccaggccatggcagatgggatcaagcgggtctttcccgaggccgaagtcgtccaggtccccatggccgatgggggcgaggggacggtcgatgcaatcttgtcctgcatccccggggaaaaagtggaaaagatggttactggtcccgatggcagaaggctcttggccagctatggtctgatcaatgacggggaatgcgcggtgatcgagacggcagcagccagcggcctgggcttgcttgcgaaaaaggaccgcgatccaatgacggcaactacttttgggaccggggagctggtacttgacgcgttgaagcggggcgttaaaaagattatcgtgggcttaggcggcagcgcgactaacgatggcggtgccggcctggctcaggctttaggggttaggtttttagataaaaatggccaagagctgccttttggcggaggaagtttagaccaattagccagaattgataccagcggcttggcttcccacttaaaagaagttgaaatcattttagctagtgacgtgaccaatcctttgaccggacccaatggagcatctgcggttttcggcccgcaaaaaggggcggacaaggagatggtccagaagcttgacgctagccttcaccattatgcggccgtgatcaaggagcaagtcgggaaagacgtagagaacgttcctggcagcggggcggctggcggcctgggagcgggctttttggccttcagcaattgccagatgcaggcgggcgcccagatcgtgatcaaggagagccatttggcggaaaagatgcgggatgctgactatgtctttacgggcgaaggcgggattgacttccagactaagttcggcaagacaccctatgccgtggcccaagttgccaaaaagcttggcataccggtttttgccctggctggccaggtcggagatggaattgacagcttatatgaagcaggctttacggggatttttggcattctgccaggtatctgcagcttgccggaagctttagcagacggaggagataatttagcccggaccagtgaaaacgtagcccgggtggttaaggccgccagagtaaatttacagtaaaggcttactattaaggaaaaatagcattttttcattttttgtctttcagccgattattttcgcatatgctctgtaatttttttcaaaagattgcgataataagaacagacgaggagagagaattcaaaaattaaagggtgcaaaaagatgaaagaatactatttagactatcgtgagcaagtgcggaacatcttggatgctttggacgacagcagtacatccttgcgcctgggagcagtcgcgattgaaaacctcttgaccctggccagagttgacctggatgatgaaggcgaagaagattctgatgactcagacgccattgaagaggcagatagcggcggggacctagcagatgcggaaacagaggacaagaagcaagtcaaaatcatccgtcatgaagaaccaaccgccagcattcattaccagatctcggctggcaacctgctctgccgtttttcccgggccttgaagggcgggagtttttacaccgagcagggggacctggtcagcgagatcaatgagctggccgtcaaaaatctgaacgtggaaaacggcgatttagtcgagctggaccccagcagccagccgccccgggtagtccggatagtggaagccggcaacctgccttctaatatcgcaactatgtcatatggagtggtagaaagggatcctgccggcgacttgtatgtcagccgcagcgccatgggcgagagcttgagtgagtgcgcgggcattgaccgctatgaggtgccggcgatcattgatgctcggcaaaccgagacaggttttgtccatgaaggcgacatcgttgacttggcctggtataagaacagccccagcaatatgatcgtccgctgggtcagccagactaagggagaagaagccccaaagaaggaaaagccggctgaaaagaaggtaaaaagcgaaaaggaagacaaggataaagaagagagcgtaacgaccttgaatttcgacctgcatggccgcagcgtggcggtggtcatcggcaatgagctccgcagccaggagattcagaagatggtaggtgagcaccacggccgctgcaaggtgattgacgccttcaagttttccgatacggaatctttttacaagcacgctctcaagcgggctgacgtaacggtcatggtgcagaatttgaataagcactcaaccagcaaggctctgcgcaagtatgccaagcggctggccatcgcggattcggcgggtctgtcttcaattgagcgggcgatctaccgggctatgcacggcctgccggcttatgagacatctacccagccgatcgcgtatccggtcaaggagctggcacttagttaatttttagaaaggttggcgataaagtggcatttttggacaaagataaattcgttgagatggataaaatcggcgcgacctggctggaccggggggcggaagcctaccggcagggggactatgaactggccctgcagtgctataaaaaggcagctgactacggcaattcccaggctatgtgcaatttaggctacatctatgcatttggccgggttggtgaagccgaccaggagaaggctttttactactttactcaagcatctttggccggcaacccgaatgccttctataagctgggggatgctttccgttttggcaattttgtaaagagaaacgacgagattgcctttcaatattacagcatggcggaaagcgtcctgcaggaaggcgacgaagacatgattgctgagatcgactaccgcctggccctttgctacgccagaggctgggggactgaccagcgctgggacctggccttgaagtatatcaatgaggctcagctttatgcctaccggaacaagcagcatggcgagtacaactggcaaaagaccagccagcggatcaacaagctgcatgatgagatagtacgcgaaatgttctcataagttttaagcagctgcctggggcgaaccgggcagctgcttttttctgatttatccaaaatagctattttctttggcctcgcaatcagcttggcttataattatatatgaaaagataataataattggatagatgtaaaagtgatagatagattatgggtgtttaaccagcatgctgctgtcaacctgctagactactatacaactattgagataattatttcatcatttattgctggcttgcttaccttggtctacaagaacatccactacagcaagcagcagaaacgcaacagctactggtctttaggcctcttgctaatcttgaacctcctacgactaaagtcgcaggaatctgggggccacccagcacattacacgtaagatcgacaactcttagaagtactcagagtgtttaggttagtttcacaactgcccaatgtcatctcgtcttcgttttgactcgctcagaagattacgcagataacacagtctagtgtgctaaggacgattgttccgtttcgcccgggctgtttttagtgctttaatcttagacttccgtcaccagtgacgaagggctaagattttttccttcttcggccgttttcttcagctttgcgtgatgctctggatggatcccccaatctaatatgtttcttgctgcgtttaaatctctgtctaccgtcttcttgcagcttggacactgccattctttctgaccaactttgagatctttgttgatgtatccgcagtcgtggcatgccttgcttgtccaaaatgaatccactttgacaaacctcttgttctgcttctttacaagcgactctaaaatagtcatcagctcatatggcttgaggaccgccagtctgcgattgatgccttttctttgagcagagcctttccc

SEQ ID NO: 2385 - DNA, 462 bp, Unknown
  gut microbiota DNA sequence
gaagaagtcagtgctgtttttgtcgtctcattcagccgatgagtttctcaagaccgtctacaccaacttctcacagtatcgcaagcgcttggtgaaagcagacaggagtatggacgagaaggctcgctataacttcaagatgaacgtaactaaagataagtacggcaagcacaagaaccagctccacaagtcttggtaccgcaagggatcgatcaactttttgagaaacggcgcgagctttagagacatcacctcacaaaagcttccagaagattctaaaggcggcatcagaattgaggacaagcatatagacaaccacaccttcttaacagtagccgactttggtactgttgaagtcattgaagacttgtccgaattaaacttgaaggatattgctttgacaaagataaagaagcttccagatggtacttacagactgcagctgactttttcattgcctcg

SEQ ID NO: 2386 - DNA, 377 bp, Unknown
  gut microbiota DNA sequence
cggtccaggcccaaaaccaatggcagataaaggataggataaaaggccaggttgccggcagcatgatacaagtcaaaggtcaggccactgacccagtaggcaataaaggccgcccagccgccccagccggccatgcccaggctgacgaagaagccgtattccaggcccagaaagccggccaggaactcctgcagccagaagaatttccggcttttcagcggcaaaagcctggcaaataacgccacggtcaaagcgcaggccgcgtaggcaaagatctgcggcaaggtccaaatgccaaaccccaggaagatattagagatcaccatgaccaaaatggccaggagaatccccgtccctgcccccagttccagcgtcgt

SEQ ID NO: 2387 - DNA, 250 bp, Unknown
  gut microbiota DNA sequence
gttctgacaggaaggcttcatctggcgcgccaaagtcgtcgccccacttgaagtccttgccagcttcttgcagcatcttaaccgcgtcatcgtaggacaggcgggtgtaattgccttcagcggctggacgcaatttgtctaagtcccggcccaggatgcttaattcgtattcgcagtgttccaaaacctggccaaccacgtaagacaggaagcgttcctgcaggtccagggattcatcttggtgcatcca

SEQ ID NO: 2388 - DNA, 1018 bp, Unknown
  gut microbiota DNA sequence
ggctttaacctgccggctaagtacatcatccatactgtagggccgatttactcgggttcacacagcgatcccctgcttttagctgcctgctacagaaacagcctacgggtggccaaggaaaatggcctgcactcggtcgctttttccgcgatctcaaccggggtctacggctatccgttggacgcggccagcaaggtggctttcggtgaggtccgcaagtggctgagagaacacagggattacgaaatgcgggtaatcatggtggcctacgacgcccggacttacgccttgtaccagaaattgctgggctaggaaatgcagattgacatctctctcataacggcttaaactaatgctaatttgaaaatagtgtaaattatatttttgcttacaagagagggatagaagatgttgagaaaatattacgtgacaatcgtctttaccctgctggctctgctaaatttgctgagcagctggggaacgctgcagtaccgcctggtcatgttagccttaaacctggtttgcggctttggcatggagtacctggtaaacaagaaggcgccggcagagaaatacaatttgtggaagggatgcacggcagctgttttgctggcagtcaacctgctttggatttttctgacaaaatagatttagaatcaaacgaaaaagcttcagtaacgcaatactgaagcttttttcattgttattcaaactcatctttcttgatttcccggtagatagccaggataaagacgaagacggcggagatgatggccgggtagaccataccgccgacttggacagcgttttccgctgctgcctggctcatttggttttctacggcgtatgagatgacccagcggttcatcaaagttggcgtcaaggcaaaggagatggtggagattaaggaggctaccgtcatcacgtgccgggagtaaggctctctgaagaactgggacaaaacgcagaaggccggggcgatcatcaagaggaagatccagaggatgatcatggtgcc

SEQ ID NO: 2389 - DNA, 233 bp, Unknown
  gut microbiota DNA sequence
gtcggtttgcggtacgggtgcaccgtttctggctagaagcttttctcggcagtgtgacgtcgcaaccttcgctactttaatttcgctcctcatcacgccttgtcattatgaaagcaagcatttgactcgctctcagacttgacgcttgaacgtggtatccagcaccacgcgctgctagcctcctgcgtccctccatcgctcataacgattcggtgcagtacaggaatttcaac

SEQ ID NO: 2390 - DNA, 209 bp, Unknown
  gut microbiota DNA sequence
tggtcatctccacagaaaactgctttctaggcacgtctgaactgaatgaaaaagtatttccttcaaatgcccaattcaagtcacacttcatgctagagccaagcctgcccgacttccgtgcccggtagtggtagcggtacgtaatccggcgcaggtagctgtgcgcttgcttgatttgcttatccgtcagtttagcttctatttcagtt

SEQ ID NO: 2391 - DNA, 444 bp, Unknown
  gut microbiota DNA sequence
tttggggcttagcatcaagcttgcagatggcataaaaaaggtcaatcgcatcgcaattaagccactgtcaaatggttataaactcacagtagcctacactccagttgcaaaccagaaagcgtatctgccagacaacggccgctatattggtatcgatccaggtgtagataatgcatttgcctgcgtctcaaatactggcgataaggccttactcattaatggccgtgcaatcaagtctgccaatcagtactacaacaagcgcatggcgaaattgaagagccttcaagctcaataccaccagctcgaaagcatcatcaataccaagcaaggcccaaaggcagtatacggccagaccaaatccatgcagcgcctaaccgattggcgcaatgccaagattcgtcaatttgcccacaaggcatccaagcgcatagtagattacgcgct

SEQ ID NO: 2392 - DNA, 855 bp, Unknown
  gut microbiota DNA sequence
tcaagttcaagacattcgcaggctacctgtgcaagatgttcctcctccatagcaagtggtgcatcataaagaatttcaacatcaaggttctgtaatacatgtgacttaggtacattacagaataatgcaatcttatccttaatccctggttcaagaggatgttctgtacggcagacaagaatatcaggctgtattcccattccctgtaactccttgacacttgcctgtgttggcttagtcttcatttctcctgatgccttaagataaggaataagtgttacgtggatgagtatagcattttcacgtcctacctcacgctggaactgtcttatagcctcaaggaatggctgtgactcaatatcacctacagtaccaccaacttcaataatggcaatcttagtttcatctgtggaataatctctgtagaaacggctctttatttcattagtaatatgtggaataacctgaactgttcctccaccaaagtcacctcttctctccttctggagaactgaccagtataccttacctgttgttacattggaattcttgttaagactttcgtctataaatctttcataatgtccaaggtcaaggtctgtttctgctccgtcatcagttacaaacacctctccgtgctggataggattcatagtaccagggtcgatattgatataaggatcgaacttctgcatagtcaccttaaatccacgtgcctttaataatcttcctaaagatgctgctgttattcccttaccaagtcctgaaacaacaccgcctgttacaaatacatactttacagccatttttcctcctaactgccatatggcatattggtttaaacataataattat

SEQ ID NO: 2393 - DNA, 209 bp, Unknown
  gut microbiota DNA sequence
ggtggaagcaaaatgcttaaagtctacactaaagtcggtgaccaggggaaaaccaagcaggtgaccggcaagatggtcgccaaatacgacccgcagatccagacgctgggagctctcgatgagctgcagtcctggctgggggttacggtggccaacctttctccggcctgccagggcctggaagaaaagctgatcaagctggagcggga

SEQ ID NO: 2394 - DNA, 230 bp, Unknown
  gut microbiota DNA sequence
atgactcttgcattctgatgcgacctctttccatacagcttagctgagaaaacagtgattatagataaaacatcttctacaagttctgaatttggatcaacgttatctgtctgattgatgacaaccagctctacatcgtttgcctgacagattgtctcaatcatttcaaagccaaaacggacaagccggtcttgataatttaccacgactcgctcgcactgcttcttgca

SEQ ID NO: 2395 - DNA, 214 bp, Unknown
  gut microbiota DNA sequence
aattgcgctatgtcatgatgaatccgctagaagccaaaagaaagacaaaggatgacctgcaccagaacaagaccgataagcttgatgccttgtaccttgccaagttgcagtctgagcacccgcagcggctggcctacgttcaaagcgaagaatatcaagaattgatggccaataaccgcatctatgagcaggcttcgcacgatctgataaccaa

SEQ ID NO: 2396 - DNA, 209 bp, Unknown
  gut microbiota DNA sequence
aatgggaaatctcatcttgaggggggcttcgcacttagatgctttcagcgcttatcccgtccgcacatagctacccagcgatgcctttggcaagacaactggtataccagcggtgcgtccatcccggtcctctcgtactaaggacagctcctctcaaatttcctgcgcccacgacggatagggaccgaactgtctcacgacgttctgaa

SEQ ID NO: 2397 - DNA, 211 bp, Unknown
  gut microbiota DNA sequence
cagtggcctgacctttgacttgtatcatgctgccggcaacctggccttttatcctatcctttatctgccattggttttgggcctggaccggtttaaaaagaaagtagggtggaagcaaaatgcttaaagtctacactaaagtcggtgaccaggggaaaaccaagcaggtgaccggcaagatggtcgccaaatacgacccgcagatccagac

SEQ ID NO: 2398 - DNA, 258 bp, Unknown
  gut microbiota DNA sequence
aacttgtcaggcgggcagaagcagcgggtggcaatcgcccgggccatgtacgccaacccgaagattttactggctgatgagccaacggcatcactggacagtgagcgggtggaagaagtcggccgcttgtttaagaagctggccaaggatgacaggaaggcgatcattttggtcacccacgacccgcggctggaaaaatacgctgaccacatctatgacatgatggacgggcagttgtcacaaagaaaataacagaag

SEQ ID NO: 2399 - DNA, 308 bp, Unknown
  gut microbiota DNA sequence
gtattgtggttccctaagaacgccaaggttatccaaatcgacgttgacccagaaaagcaaggcaagcgtcactcagttgacgtatcaatcctggcagacgctaaaaagagcttgcgtgctttgatcgacgccggtgaagcccgcgaagaatcaccactttacaaggctgctttggccgaccgtgaagaatgggatgcatggactgcttcatttgctgacgaccacttgaaggacgaaggccgcgtacgccaagaaccaatctgggatgtcatcaacaaggaagccgcagacaacgctgtcttcgctat

SEQ ID NO: 2400 - DNA, 871 bp, Unknown
  gut microbiota DNA sequence
gctcctcatccgtggtcactacagtcacaacgtcaccgccgtcagtatcttcttccgtatcagctggttcttcagtattttcctcagcggttggttctgtagaaagttcttcggacggctcggtagtcggttctgtcgttggatcagtagacggttccgtagatggttccgtacttggctctgttgatggctcagtacttggtttagtcgttggatccgttgacggttctgtacttggctgagtcggttcagttggagtcgttgggtccgttggctgtgttgcttccaaggcagccaggcgggccttagccaggttcaaagcgtacaaagttgcggccgcttttgccgtagcagtggccaacgcttccttcttttccgccaaatcagcttcctccgcgatcaaagcagcttgtgcgctttgcagcttcagccgtcttagcgttctcttgcgccgtcttcaagtcatcctggctggaactagcctggacgtcattagtagccgcgttgactggctgaggcaaatttgccgcccccaggctgactgccccaataccagcagccgcaactgcttccatctgcttgatccgggtctcgcttctcgctttcatgtttttccacttttcgctcttaaatagtaaaatcacatatatatctaattataaatgatggaaagattcccgggaaagcaggaagcaccggaaaagcaaagattcttttatctattaaaaagacaaaagtatcatcaaaaagcaataaagctgctaaactatttttcacccaaaggatcggtaattagcctataattttagttaaaccgtctgaaaaaagagcctttgcaagccaacttgtgctaggcttgtgatgcgaaagg

SEQ ID NO: 2401 - DNA, 237 bp, Unknown
  gut microbiota DNA sequence
atccagtactaaatagtaatatttcttaccaattcatgatataatgccggtatcaaaagattggaaggaagaaacgatgagcgaatacatgtccatatcaaaagcagctgagtatcttaacgttgccaagtcgactctccgcaattgggaagctgaaggactgattacgccgcttagaactgcctccaatcaacgtcgctacactaaagaaatgctagatgagcttctgcaaggcaa

SEQ ID NO: 2402 - DNA, 1804 bp, Unknown
  gut microbiota DNA sequence
tcagctgagagtacaactcgatttcttgaaacgctggttttttcgaatgaaaacatactgcaccgagatcatactttagcttgcgaaatgagctctcaatatccgagcgcagatgatacagatttctcatttcactaagtgggaagtcactcgggcttagattagtagctagtacttcccacttggtgcttcccgattgtgggtcgttgagcttaagcttaacgattctgcagtggaccggacaaaaactttcaaaatcccagtgcgctgtacggtacttaggtgaatatttgtccttatagcgacgattcggggcattgatcttgtgatactctggatgaagcttcttttgcttggcgctattggtgatgttaaacgtcatctcaaaatcgcattcttgatcgggaagagcgctaatttcccgaatagcacttttattttgagttcttagacggataacatagttgcagttagacagtcgattgccatgctcgaaaagattgaaggattcatagccgcgatccatcagtacgatatagcggtgttgaagtcttaagttctgaagcatgtgcacagctacactgcgttcatccatactctttcgtgattgcaataagcagtctaggtaacaacaatttgcgatatcgtaaaggatattggcatgaatcaaacatgtgcctttggtcgttaatttattatcgtccgaaggcttttttcttgtctgaatattgcatagaaacattgaattcttatcatacggcaaagcaaagtcactaccatcaattgccagcagccgatagccatgatacaaagcaggctgtttcaaagttgaattgaattcatacagaattgccttaaataatctaggattaaccttcgatttctgctgttcgtaagccgacgcggtcattcgcttagagggcttaggaaatgcgtcagctagctccttgttcaagcagtttccttgcatggcaagagtggtcttaatgaatgtcttagcatccagttttcttttacgcgtgaagtctttgcttggatgataaacaaagtaattgatacattcggcagccatgtctgtaacagaatcaagctgtcttaggacttgatgcttcttagtcatgaaaatacgccacctttgataaaatctctaaccaaatatagcgtaaagcggtttcaaaaattaagcaaaaaaacactcatcaaacttagatgagtgtcctaaagcattccccgttcaaagtcaatgtcttaacttaatgacattgagcatcgaggtgctctgcgttttgctttctattcaactttttctagtaatttactgtcgacgattttctcgatttgcgctacatcttcgttagaaagcttgaatcctttttcctgcaagatggcaacaattgaattaatgatgttctgcttttcctgatcagaaaagccaatccggcggtacagggcaacgtagtctgcaagaacttgctctactatagtaacaatttgctctagctttcggttctttacatggattcgccttaagatagttaacaaagctaggctaacgagccagatggcaaacgcaattaattcaggatatacacttatgagcttttcacctccgtcctttttagaatgtgctaaaattagaatataaattatttttctaagaggtacttatggatactaccgagagcataacctttactagcaagctaacattctgggataagtttaaatgcttttatttgctacacctttgcagtcttatttttttaatacgatttcaaaagaagtggcaaaagattcttattta

SEQ ID NO: 2403 - DNA, 258 bp, Unknown
  gut microbiota DNA sequence
gggatcgatcaactttttgagaaacagcgcaagctttagaaccatcacctcacaaaagcttccagaagattctaaaggaggcatcagaattgaggacaagcatatagacaaccacaccttcttaacagtagccgactttggtactgttgaagttattgaagacttgtccgaattaaacttgaaggatattgctttgacaaagataaagaagcttccagatggtacttacagactgcagctgactttttcattgcctcg

SEQ ID NO: 2404 - DNA, 496 bp, Unknown
  gut microbiota DNA sequence
ggttcccatcagttcatagcccccgcagatggccagcatggggttgccagcttggatgtagtcgttcagggtttccttgaagcgctgcaggtccttggccacgatgctttgttcatagtcctggccgccgccgaagaagacaaagtcgtagtcgtccgcgttgaactggctgcccagggagatattgtcgatctgggtctgccagccttttttctgcaaaaagtagcggaggatcttgacgtcaccggagtccccgtaggtgttcatcaagtcttcgtagaggtaggcaatgcgaatcaaattatcatccatagtcaaattcttccttattgtaatcaattacactaattataaactaaaaggcggaaaaataataatctaaaggccaggtccttttggtttgttttttttcacaaactggcttagactaaaatagtaagcgcttttgcaaaaaacggcgaaaaagcaagtaagtaaagtaagaaaaggataagtt

SEQ ID NO: 2405 - DNA, 15014 bp, Unknown
  gut microbiota DNA sequence
atgatcaattgtatagctatgacgtagccaaacataaccaaagacttttgtcataaaaattgatccaatagatattataacagcctcttttttgaaattacagagggtggctgtaattgtcatgccctaaatcagatatttgacttgattctccgggagctatttcccgattaggcctttatttcaaaataaaattgcctaaaatcattgataacacttgacttagagtagaaacaatagacagccccaatgtgcagagactaagcattaattcgctgatatttggaattctttgtaagaagacaataatcaaatcatacaaaaaatctattagcaaccccaccataaaggcgcctgaaaccttgactaagccatattttcgatagtaccaagtgaatagtatcaattccactacactagctgcgtttgtttcccatctcccttgcatggccattaagattgctagtatacatagtccgaaagaaaatattcgatcgcgataaccagtcagcttaatttctgctaaatggtaaccaacatatatatcaaacgcaaccgaaatagcagctgacaaaacaccagcgatcaattcaacatatagcttaatttcttccatggcgcttgtgatgcaataaacggaaaatcaaggaagcttcactatttttcacttgagtagcaccgccaatataaatacaaaatcctgcaatacttcccccaacaatctgttccaattcttcatctgtcagtgtttcaactttatgcaagttattatccataattttctttcctttcatgaaaaatcaactatttttatcctaacaaattttaactcaaacgtgaaaaagagacggattatgtcaaaattcagactgatttttcatccctcttccacatccagctaatcctcccggcaatgatataatagtaataaaactgaaaggagacgttttgatgcctgaattagaaaagatagtcgaacgccccttgatcaccatcaccaacctgatctggagctttaacaaggaaacccaccgggttcagctgcttttagtcaagcgcaaggacgaacctttcgcggaccgctgggccctgccggaaaccctccttcgggaaaacgaaagtgccgaccaggctgccgtgcgcttgatcaaagaaaaaatcggccttgaccttccggaatcttccaccgagcagctggccacctttacctccccccaccggacgcccggcgagcgggccctggccctaacctacatgacctacctgcccgccatgccaaacctgcggcccggctacggagccagcgatgttgcctggttcgcctttgaaaacttaggccacaagtatgagcttttttccgctgacaaggacctgacctttgaattagcggaaaaatcccacgccctggcctttgaccatgacgaaatcatcgccgtggccatccagcgcatccgcaacaaactggactaccagcccagcatcctgcagatccttggccccgaattcaccctccgcgaagcccgcgaggtctacgcccccttcttccagaccacagtcgatgagatcgacaactccaacttccgcaagacccacggttccctctttaccgagctaggcgtgcagaagaattaccacaagagcggacggccgccaaagctctattgccttaaggaaacgcaaagcaatatcctctggagaaaggctaacgacaagcaaggctaaaactgccttgctcttcttttgcaaaaaaccaccctgcctgagcagggtggcctgtaattctttaaaactaactaggaaataaccaggagacgacgtgaacaacttttggcaaagcagcctgctgcttatcaacttaatcgcctttgccctctacggcatcgacaaggctaaagcccggatgcacgcctggcgcatccccgaacggctactgcttacctgcggcctgctggcccctgccgggtccggcctaggcatgctggtctttcaccacaaggtccgcaaggcctacttctatttagcaatcttcgccggctttatcctctgggccgcgattgattaccttattctcagctttagctaaggctcttgagcatcttaaaggcggtctccgtactatgggccttaagctggtaaacgctggaccctttggcccaggtgatcaccgtgttcaaagagcccaggctttccccaacatcaacctgcacgctggacttcgccgccgtatccggcagaccatattgctggtagagcgccagcagcttttgcgccgttggcagcggcttttgcccctggacattgcttgcccggacaacaaaggaccactggccctggttgaactgcagataagtcgacccagccgccccttcttctgtcccagtcacattgccggcaatcttaaccgctggcagaccagtcttgggctcttggtaattaatcaagctgctggcgtcagccacattctttttttccgttaaaacggcatatggcttctcactagcaatccggctgtcatttaaggccagcgggctatttccgacgctgtagtaaacaacattctggctgcttgagctggtgtagcggatattcaagttgctgctgccctggcctaagccgtcagccgccggcaaaagcatccccggcagcttgacccttaattgactagttaaagtccccatccggtttgcatctgccctttggctgctggaagccgcggacttagagctggcctggcttgaggaggattttgtcgaactaacggcagaactggccgcggatttagccgccgacttagagctggccttactttccgccttcttctcgctcttagcctggctggattgactggactgactattgctttgacccgcgcaaccggcaagcaagctggccgccagcagaagcagggccaaatttttcctgttcttcttcattttttacactctttctttgtcaataattattcctactttccacccctaattatagatcttgccggatcttttataaagaaagttccgtttttgttggtaaaaaaacgcttaatttaccttctttgtctgaaaaacttgcaaattaatcttttctggagtaaagtttacgtcaagcgagtaaaagtttattttactttttgtttttatcctattttaggtaagttatacttttaacaaaagaggaagaaaaagatggaaaatgaagcactcttgatcattgactataccaatgacttcgtagatgacaaaggcgctctgacctgcggggcacctgcccaggccttggctggccagattgtcagcttggccgaccagtttttggccgccggcaagtgggttatcctgccaaccgacaagcactttaagggcaacccctaccacccggaaaccaagctcttcccgccccacaacctgccaaatacttggggccgggagttctacggacccctgcaaacttggtataataaacatcaagacgacaagcacgtccttgtcttggacaagtcacgctactctgccttctgcgctaccggcctggacctcttcttgcgtgaacgcaaggtcagccgggttcacctggccggggtctgcacggacatctgcgtactgcacaccgccatggacgcctacaaccatggctacgacatcacggtgcacgaaaaggcagttgccgctttaaacgacgcgggacaggaatgggcactgaaccacttcaagtcctgcctgggcgctgaagtcgtcgactaacctttaccgtttaagttcttatttttacttttaacagttatatttttgagaaagcagatttttacactatgtctttatcacacgcgttaattactgacctgtacgaattctcaatggctaacggctactttgaaaccctgccaagagataccgaagccgtcttcgacgtcttttaccggactgttccagacaacggcagcttcgtcgtctccgccggcctggaacaagtcgttgaacagctgcggggcttccactacaccagggaagacatcgactacttgaagtccctcaagctcttcagcgctgaattcatttcctacctggaaaccatgaccttcgactgcgtcgtatacgcgattccagaaggcaccccggtcttcccgcgggtgccaatcctgacggtcaaggggcctttgattcaatgtcaattgctggaaaccttcgtccttaacttaatcaaccaccagtccttgatcgccaccaagtcccgccggatcaacctggccgctgctggccggccagtcatggaatttggtgcccgccgggcccaaggtccggacgcttccgttctgggcgccagagctgccgttatcggcggctgcgggtcaaccagcaacgtcttgtcagcagccaagtacaacatcccggttgccggcaccatggcccacgcctgggttcaaagctacccaaccgaactcgaagcctttgaaaagtgggcggaagtctacccggacaacgcactgcttttggtcgacacttacgatgtcttaactagcggcgtgcctaacgctatcaaagtcttcgaggagctccgcaccaagggccacaagaagttcggcatccggatcgactccggcgacatcgccaaattgtcccgcaaggcccgcaagatgatggacgacgccggcttcccggaagcaaccatcactgcttccaatgccttgaacgaaaacgtcatccactcccttctccaagaaggcgcgccgcttgacagcttcggcgttggtgaacaattgatcaccagctccagctcaccggttctgagcggggtcttcaagctggccgctttgaagattggcgacggggaatggcagccaaagatcaagctgtccaactccaaggaaaaggtcaccctgcctggtgaaaagaaggcttaccgcctctaccacaaggggaccaagaatgccttcgcggacgtcatcgccctggctgatgaaagcttgccagaagaattcgtcggcattaacatggacccgatgatgactgaaactgaagccaacttgaaggacttcgatgccgtcctcttgactcaggtcgttgtcggcccaaaggccaagtccatcgaaaccgacaccttcaagatccaaaagcacatgtacgaaaagctggctgaactgccagaagaaacccaaagactgcttaacccggaccgctacccggtctacctgactcctgccctggctgacctgcaagccaagatgatcaaggaccacaagctttaagtaagtcatcgctttaattgcataaacaaaaaacgaagttgctcaagtagagcagcttcgttttcttttgcctgctattttattgttcagccattttttcttccaattgtgacgtacacatcgggcagcggctggcttcgatgtcgatctcgctcttgcagtaagggcagaccttggtcgttgcttcttcttcaacctcttcttccttcttgatcaaggacccggcccggttgaaggccttgacgatcaaaaacaggacaaaggccatcatcaagaagttgatgaccgcggtcaagaacttcccatatgccagggtcaccccggcaaatttcagtgagaactggtcaaaattcatcccaccgaccacccctaaaagcggactgatgatgtcgctgaccagggacttgacgatggtggtgaaggcaccgccgatgatgataccgacggccatatctatcacgttgcccttagagatgaaggccttgaactccccgaagaagcccttagtagattcgacagcctgctggccgtctggcagattaattcgctttggcataggatactcccaaacataatttagtacttatataaattagcgaatcaattatatcattctaagggaaaaattaacaagttttttcttactcataatctggcaaaacccagcggccgatcgcttccgccaccgccccctggtcaaaggtcttctctgtaatcttatcgcagtcagcccgcatttccgggctgacattggccaccccgacgccggtgccggctgccttgatcatggccaggtcattgaagctgtccccgatcgccatggtctcatccagctgatagcccagctcctggcacagtttctttaggcctgtccccttgttcaccttgagcgagttgaattccaggtagcggttggatgaaaagctcatctcactgactttttcaaaatctgccaggtccttccgcaattttttcaagcggggaaaatcagtatcgacgtaaagaatcttggcaaaacgggctccgctggcccgcaaggccgttaagtccccgcctggcaaagccgcgaagtcggcccggccttggcaaaaatcgatctcttcttgcgtaagttggtagccgtaaacctggtcctcagtgtagatatgcatccccagacctaattcctgcccccgtttgaagatttcctcaaccaggtccccgtccatcccggtaaaggagatcaagcgcggccccttgttctcaaaaaccgccccgccgttgtaacaaatcgtgtactggccggcttgatccacctggcccagttcttctagcgtctgccttaaagagtaaaagccgcgccctgtagcgggcacgaatttgatgcccagttcctggcattttttaatagcccgcagattttcctctactacccggctgcccggccccagcaaggtctcatctaagtcgctggcaatcagtttgatcatcatttttcctccttgctcatcatttttctaccaccatgatagcgtttttaggagcaaaaagaaaacaaaaatgaaaaagaaaatggaaagaaaaaataaaaaagctgccttaccgcagcttaatcggtgatggttacctcaccggcaatatccttgttgaaaaaggcccggacgtcctccaggcccatcccctggcccagggcccacatcagcttggttacagcactttcactggtcatgtcccggccgctgatcgccccttccagcatagccgcccggccaacctcatacttggtcaagtcagttcgttcatacaaacactggctgcaggccaccacggggactccccgcttgatgatctccccgatcgccttaaccatgttccgccgcatgtagttcatgccgccaaggccataggcttcgatgacgatccccctgaccccgctgtcgaccatggcggacaaaaccgccgggtcaaagcctgggaaaagcttgatcatggccacctggggctccaccttggtgttcaaagtgcagatggcgtgctcgcttggcacgtattcaaagtctttgtgcttgatgtcaatgccgtctgaagtcaccatagccaccgggtcaacattgatgctcttgaaggcgtcaaaaccggtcgtccggatcttaacgcagcggcagccccgcatgatctgccggttaaaagcgatatagatccccggcttgcaggttgcggccgcggcaaaagcaacccggaggttatctggagcatcgcttaagatggcctgcatgggcacctggctcccggttaaaacaacgggcaggtcaattccctgcaacataaaggtgagcatagacgccgtgtaagccatggtgtcagtcccgtgggagacgacgataccgtcaaagccccggcgcaatttataaatctgttcggcgataaaagcccactcttccggctggatgttggaagagtccaaagacaaaatgtccttgacctcgacttcataaggcaggccgcccagggtatggagcaattccgccccggactggcccgggattaagccctcttctgaagccacggacgcgatcgtccccccagtcgacagcagcaatattttcttattggtcatctttttcctcgcatgcttcccgattttcctcagccaaaagttcatacaaacggtccaggtacttttctagctggcttagttcttgcccgctgtagagctgctccaccttttcctgcagcttgtgcatcccctttttagcgctggcgcaaatctgccggccctcatccgtcaggcagacgatcttcacccgcttgtcgctttccgccaggtggcttctgacatagcccttgccttccaggcggccgacaatcccggccatggtggcctgggccacttcaaagtggttttccagctgctttaaaggcgcctgctggcccgcgcatttctccagataaaccaggcagtgaaactgtgaaaaggtcaggcccaatttcttgagctcatagttgccccttttggccatcaaatcattgatcttcttgactcttaaccctaaatccatcgtttcctcggctcctaatctaccaacaatacctaagagcctattttaccatttttgccggttaaaagtcctcttctagccgcttggcctggtcgatttgctcccgcaacttgcttaaatctgccattgtttttccctcaaaagtccccctattttccaagtatttttaaaaaaagcacccttagtactttacgaaataaaatgaaagtattatcattaggatgagaaaattacgattaggttgagcgtaacaccaaacgctgaactttatctgtggcaaattgttattgttatcagtgtaatttttcacatcacagagaacgcgaaccagccggttcgcgttttttgtttctctttattttgcttaagctgtcttggtcacgtccacccaggccgtatagtcagaatatttttccagagccgggatggtcaagcggacagcgctgttgcttgagccagctgccgggtagacctcagtgtggcgcttgagggactcgtctaaatagaccttgacgcccggcttgacggcaaaggggcaaaccccgcctggggcatggccgatatagtcttccacctggtcaaaaggaatcatcttggccttcttgtggaaggtggccttgtacttgtggttgtcagtcctggcttcccccgccataacgactaggatcggggcatcgtcgaccaaaaaggacagggtcttggcgatctggtccggctcggtgtccagagcctgggcggccaaggccacggtggctgaagactcaggaagttcaattacgttaacgtcagtatctttgaaaaaatcttttactcgttcaactgccattgtttaacctgctttctctgctcaagaagcttattaatctaagattagaaatattttaaaaagcagtataaccctttttgaccgcggcggcaagtccggcgatatcttccggcatcgtcgtgcagcagcccccgaccagttttgccccggccgccagccaggcagcccccgcctggccaaagtccgcggcttctggggggtagacccactttttaacagaaggatcgtattcggccccggaattagggtaaacgacgattggcaatttagaagcgcggagatttttcaccacatcgacagtccaggccagcttgaagcagttggccccggccgcgaagacctgggcataggcgctgacttcctcgaccgcttcagttaaaggcaggccctcgctgatactagccggatcctttaaggaaaagctgacgtaaaccggcaggtccgggtacttggccttgaggtagtccagaatagctctgacttcgctcagcttaggctgagtctcaaccgccaggcagtccaccccgccggcaactaattcttcaatccgcggggcgtgaaagtccacgtattcttcatggcttaaagcatagtcgccccggtattcactgccgtcagccaggtaggccccgtaagggccaactgaaccagccacgaagttgtggatgccggtcgctttttcaaagtcgtctctggccttaatggccacggcagctgactctctgattaaggctcgagccgcgtcctcacttaatccgtgcttcatgaaggccggcaggctggcctggtagctgtcggtgatcgtgacccgggcgccggccttgaagtactcctggtggacccggtagaccaggtctgggttatccgcgagggccttggccgtccagaggtcggaattggtgtcttcgccccaggcttcaagcggcgtggacatggacccgtccaaagtcactgggccttgggccagaagggttggtaaatctgccatcgtttttcctccatcatgtgttatcatgttactgtttattttaataaaaaaccaatctgttttgaagaggtatttttatggctcaacaagaaaaagtcgaccacctcgagcggaagatggaagcccggcatattcagatgatctccctgggcggggtcatcgggaccggtctcttcttaagctcgggctataccatcagccaggccggacccatcggcacgattatcgcctatttcttcggggcgatcctggtttacgccgtcatgctctgcctgggcgaattgtcggtggccatgccctacacgggttccttccacgtttacgctaagaacctgcttaatccggccaccggctttacggtcgccattctctactggctgacctggactattgccctgggcagcgagtttaccgcggcggggattatcatgcggcactggtttccctctgtccccgtctggatctggagcctggtcttcatgattttgattttcctctccaatttcttctcggtcaagattttcgcggaaagcgagttttggttcgcggccgtcaaagtagcggcaatcgtcgccttcatcatcttagggggactggcggtggtcggagttattcctttaaaaggcagccagggagcaccaggtttgaccaacctgaccaaggacggctggttcccgactggttttggcggggtttttaccactatgctcacggtcaactttgccttctcggggacggagctgatcgggatcacggccggggaagccaaggaaccagaaaagaccctgcctaaggccatccacaccaccttatggcggctgatcatcttcttcatcgactccatcttcatcatggcctgcctcatcccctacaagcaagccggcgttaccgaaagccccttcgtccacgtctttaacatgatggggattccttttgccagcgacttgatgaacttcgtcgttttgacggccatcatctctgccggcaattccggcctctatgcctcaaccagaatgctctggtccctgggcaatgaggggactattccagttgtttttgccaaaaccaacaaaagagggattccggccatctccttgctgataagcatgctgggtggggtcttctccctcttgaccagtgtctacgcggctgacacgatctacctggtcctggtttccatctccggcttggcggtggtcttcgtctggatggcgatcgccctgtgccagctcaagttccggcagaagtggctgaaagaagggcatacggaggacgagctcaagttcaagacccccctctatcctttcacgccttggtttgcctttatcgccagcctggcctcctgccttttgatctggtttgacccttcccagagggtagccttgtacgcgacgattccattcgtgatcttctgctacgtcgcccaccatttctatgccaaacaccaggagaaaaagcagaccagccgttaaccagagcgccttcgggcgcttttctttttgcctggggatcgaatcaaatcaagtaaatctaatcaaatcaaatctaatcaagtcattgacgagattgacgcaattcgctaaaatatgattagattgcaagcagcaaaaaggaggcgcgccatgcttacgccaaatgattccagcagctttgaaaaccagctttctctccgccaggacttgaccttcaactccctgcaggccctttttgaccagcagggtctcccctttagcccgccgtccagccagttcggcatcctccagttcagtaatttcgacctcctggtctctgaccagtgcccttacacgatcaagtgcgctttttttaaggggacagaccaggatgaattcctggaccggcaggagtttaccgggtccctggccgctcaattccagcaggtctacgcttttttggaaaagcacaacccagtagagagccagattaagggactttaccgggaagaccggccagcctaccccaagcaggccttaagggaagccttgatgaacgcgattatccacagggactacagcaacccggccagtagcttgatcaacttatacacagaccgggtggaattcatttcttttggcggcctcatgcccgggattaccctggaagacatccagctgggcctgtcagtttgccggaacaagcgcttggctgacctcttttaccagctgaagctggtggaatcctacggaacggggttagccagaatcaagagtgcctacaagggcagccgccttgcgccccagattttagccgctcccagctcttttaaggtggtcctgccccattaccaggcagctgttaaagcgacttctaaaccagtcaaaaaggcggtaacacctgctccttcccctagcccagcccccaagccaaaggcccgggcaactggcaatgaagaaaccgttttggcttttggcaaagagcatggggaatttatcagaagcgatattgaggagctcttaggggtcagcccagctacggcgacccggctcttgcggcagatggaaaacagcggcttggttctcaagcggggcaaggccaaggccatccgctaccggatcagcgaaaattcataagcaaacagttcggttcctgcctaaacgtgctaacataggtagggacttttttcatccaaaaaattacaatccaatagaaatctggcaacaatcatgcaacaatttactccgattcttttaggcagcgacatcaatgtttacgggatggcccggtccttccacgaggcttacgggatcaaggtccaggcctggggcgcgtccactttagccccgacccggtattcaaagatcgttgacatcgaggttcacccgggctttactgaagacccggaattcatcaaggttatgcgcgagaagatcaaggaatacaagaagcacccggaaccggtgatcttgatctcctgcggggacggttactcagaacttttagccaagcacaagcaggagctggaagaggccttcatcgttccttatatcgactactccctcttggaaaaactgatctctaaggagggcttctacgaggtctgtgaagaatacggcctaccttacccgaagaccaagatcatcactatgtccgcttacaaggatggttcttacgccgacgtacccttccccttcccggtcgctttaaagccggaagacccggtttcctggctggacgtccagtttgaagggcggaagaaggcttttgtcatcaaggacctggacgaattcaaggatattgtgggcaagatctacaccaatggctacaaggaagacttgattttgcaggacttcatcccgggcgatgactccaacatgcgggtcttaaacgcttatgtggacaagaatcaccaggtcaagatgatgtgcctgggccaccccctcttggaagacccggacccgattgccatcggcaactacatggtaatcacgccggactatgacgagaagctctaccagactgtccaggcctttttggaaaagatcaactacacgggcatggccaactttgacatcaagtacgacgtccgcgacggccagtacaagttctttgagatcaacctccgccaaggccggtccagcttctacgtcactttaaacggctacaacctggccaagtggtatgtggacgactatgtggaagactcgcttaaggaccagccggttgtttacggcaaccaggatccggccaagcacaagctctggttgggtgtaccggacaagatttttgaacaatacgcggtcgactccctggccaaaaaggaagccttggcacttctgcgggccggcaaggtaggcaccacggtcttctataagccggacatgaacgtcaagcgctggctcttgatgaagcacatgtaccacaactactacaaggattaccagaagtacttcaaggtcaataaggagcagtacttcgagaaaaagaagtaagaagcataaacttatgcacaggaaaaaaggaagcttacgggacaatgtcattaagttaaggcattgactttgaatgaggaacgctttaggacactcatctaagtttgatgagtgtttttttgcttatttttgaaaccgttttacgctatctttgattagagattttatcaaaggtggtgtattttcatgactaagaagcatcaagtcctaagacagattgattctgttacagatatggctgccaaatgcatcaattactttgtttatcatccatgcaaagacttcacgcgtaaaagagaactggatgctaagacattcattaagaccactcttgccatgcaaggaaactgcttgaacaaggagctagctgacgcatttcctaagccctctaagcgaatgaccgcgtcggcttacgaacagcagaaatcgaaggttaatcctagattatttaaggcaattctgtatgaattcaattcaactttgaaacagcccactttgtatcatggctatcgactgctggcaatcgatggtagtgactttgctttgccatatgataagcattcaccatttctatgcaatattcaaacaagaaaaaagcctttggccgataataaattaacgaccaaaggtgcttgcttgattcttgccaatatcctttacgatatcgcaaattgttgttacctagactgtttattgcaatcacgaaagggtatggatgaacgcagtgcggctgtgcacatgcttcagacattaagacttcagcaccgctatatcgtactgatggatcgtggctatgaatcctttagtcttttcgagcatggaaatcgactgcctgactgcaactatgttatccgtctaagaactcaaagtaaaagtgctattcgggaaattagcgctcttcccgatcaagaatgcgattttgagatgacgtttaacatcaccaatagcgccaagcaaaagaagcttcatccag

SEQ ID NO: 2406 - DNA, 177 bp, Unknown
  gut microbiota DNA sequence
cttaagacttcagcaccgctatatcgtactgatggatcgtggctatgaatcctttaatcttttcgagcatggaaatcgactgcctgactgcaactatgttgttcgcctcagaactaaagataaaggtgctattcgggaaatcagtgctcttcccgaccaagaatgtgatcttgagat

SEQ ID NO: 2407 - DNA, 248 bp, Unknown
  gut microbiota DNA sequence
ctttggtctggtccactgcagaatcgttaaacttaagatcaacgacccactattgggaaagactaagtgggaagtactggctactaatctaagcccgagtgacttcccacttagtgaaatgagaaatctgtatcatctgcgctgggatattgagagctcatttcgcaagctaaagtatgatctcggtgcagtatgttttcattcgaaaaaaccagcgtttcaagaaatcgagttgtactctcagctga

SEQ ID NO: 2408 - DNA, 363 bp, Unknown
  gut microbiota DNA sequence
accgaagaaacgcaagaagttcttgggtctgctttaaagtagaaatttggatgaaggagaggaaaaaatggatatgggagttagcagtccagcatatgttaaacagtccaaagtcaagggccgccctctctaccacgggatcaagcgtctctttgactttctggcttccttggttgccttgattctattatcgccgctttttctggtgctggcgatcaagattcatggtgaagatggcggtccggtcctatattcgcagatcagaattggcaaggatgaaaagccattccggatctacaagttccggtccatggtggtcaatgctgagaagctgaagaaggatctgctggagcaaaatgaagt

SEQ ID NO: 2409 - DNA, 354 bp, Unknown
  gut microbiota DNA sequence
gtgcttggcccgggcgatcgcgtcgagatcgcgcaagttgattgacgtcgcatttgattgctgcttgttaaatgacttgtgaagggtagtgtagccatagcccgactctttcgccacccggtaaatggtcaggtgcttgtcgtcgaggtatcgaagaatatcgatcttcatcgttctcactcccctacgccaactattataccacatctgtgatataccacaagtgtgaaataacgatttttttaaaaaaatcgcgaaaaaaagaccagctcgtcaaaagctggtcaaaaagctatcttattgggccacgcgggcagcgtgccgcttcaaaatcatgtccaccagggcattagc

SEQ ID NO: 2410 - DNA, 534 bp, Unknown
  gut microbiota DNA sequence
atgaattaccacaaaatatttctagactggaagccaaaagaaagacaaaggatgacctgcaccagaacaagaccgataagcttgatgcaatgtaccttgccaagctgcagtctgagcacccgcaacggctgacctatgttcaaagcgaagaatatcaagaattgatggccaacaaccgcatctacgagcaggcttcgcacgatctgataaccaacaaaaatagactgcacaaagccattcagctcactttcccagagattgagcacctaatggctaatccgagaggaaaaaactactggagtattgttctcagattcccgcaccctgatatcgtactagaaacaaaagaagccgatatcatcgacttcttaaagagcttatctggtattggtgaaaaacgtgccaatgatctggcgcagaggcttatccggctggccaagctcgcatgcccagctttcaaaaagagcagtacacatattcgtggccttgaaatggcccattaacaatattctgagcgctgaaaaggcgtgccag

SEQ ID NO: 2411 - DNA, 450 bp, Unknown
  gut microbiota DNA sequence
acgctttaaaaaccctaaccaattaaatgccttcgttggcgttgaccctcaggtttatgaatctggcaacctcacggcccagctgtcaatttcaaagcgtgggacagatattggcagaaaggtgctgtacttgacaatcaaccaaattcagtcggctaagaaagcgggaacccccttgtcatattgcggattattacgagaaacgaaaacggtcttctgagactgcaagtcacaagaaggccgctatcgcatcgatccataaattactacggatgatcttcgctttaattaagaatgatcaattgtatagctatgacataaccaaagacttttgtcataaaaattgatccaatagatattataacagcctcttttttgagattacagaaggtggctgtatttatcatgccctaaatcagatatttgacttgatccttcgtaagcacccaa

SEQ ID NO: 2412 - DNA, 342 bp, Unknown
  gut microbiota DNA sequence
acttctacggctcctacctatcctgtacaagttgtacaaacacccaatatcaagctacagtaaagctccatggggtctttccgtcctgtcgcgggtaacccgcatcttcacgggtattataatttcaccgagtctctcgttgagacagtgcccagatcgttacgcctttcgtgcgggtcggaacttacccgacaaggaatttcgctaccttaggaccgttatagttacggccgccgtttactggggcttcaattctgagcttcgcttacgctaacccatcctcttaaccttccagcaccgggcaggcgtcagcccctatacttcatcttacgattttgcaga

SEQ ID NO: 2413 - DNA, 501 bp, Unknown
  gut microbiota DNA sequence
catgggattactaacactcatcatcggtttggtaatgctggttaaccccacattggcaactgagacagctacaagtgttgaataaatacatttcttgttactttttaaaccggaccagaaattggtccggttttttgcggcaaaagtttgctcaagtactaaggaaatttgtataattgatatagtttttgtggggggaagagtaaatggacaaattagccaagtggtgcatctggctgcgccgccgctcctttttcagagtggcccagcggacctttgccgttctgatgccgatcgcgacggtcggggcctttttccaggtcttgcagtacagcgtctttgcgccggaaagttttatctataatatatttgattttgacaaaatcatgagtgacctcttctgggacatcgggaccaacctgtcacaatgcgtggttgaagttatcttcggtcttttttgtctgttcacggtttatttctcagcttcctttacggctaaaa

SEQ ID NO: 2414 - DNA, 212 bp, Unknown
  gut microbiota DNA sequence
aggtagataggccgggagtggaagagccgtgaggcttggagcggaccggtactaatcagtcgaggacttgaccaaaagagcaaagcaatgaggttttgacttggtaaaagatattcagttttgagcgtgcaagctcaagcaaagagtgcggtggcaatggcaagaaggatacacctgttcccatgccgaacacagtagttaagcttcttaac

SEQ ID NO: 2415 - DNA, 271 bp, Unknown
  gut microbiota DNA sequence
ctgccggtgacaaaccggaggaaggtggggatgacgtcaagtcatcatgccccttatgacctgggctacacacgtgctacaatgggcagtacaacgagaagcgagcctgcgaaggcaagcgaatctctgaaagctgttctcagttcggactgcagtctgcaactcgactgcacgaagctggaatcgctagtaatcgcggatcagcacgccgcggtgaatacgttcccgggccttgtacacaccgcccgtcacaccatggaagtctgcaatg

SEQ ID NO: 2416 - DNA, 240 bp, Unknown
  gut microbiota DNA sequence
tgacgattcaagtgataagtcgtcaagctcaagttctagttcatcttcatcaagcaaagctaaaaactatcgtacagatgtaagctatgactcattagctagagaccctaagacatacaagggtgagtacttgcaatacactggtgaagttatgcaagtcttagaagatgattcttacactgatttgcgtattgccgtaaatggcaactatgatgatgttttgtatgtagaactcgataa

SEQ ID NO: 2417 - DNA, 209 bp, Unknown
  gut microbiota DNA sequence
aagtcagaaaagacggagccgcagcgaaagcgagtctgaagagggcgagcagttggctgacgcagacccgaaaccaagtgacctacccatgaccaggttgaaggcgcggtaaaacgcgctggaggaccgaacccacgtaagttgaaaattgcggggatgagttgtgggtagcggtgaaattccaaacgaacttggagatagctggttct

SEQ ID NO: 2418 - DNA, 209 bp, Unknown
  gut microbiota DNA sequence
ggtggtgcatggctgtcgtcagctcgtgtcgtgagatgttgggttaagtcccgcaacgagcgcaacccttgtctttagttgccatcattaagttgggcactctagagagactgccggtgacaaaccggaggaaggtggggatgacgtcaagtcatcatgccccttatgacctgggctacacacgtgctacaatgggcagtacaacgaga

SEQ ID NO: 2419 - DNA, 209 bp, Unknown
  gut microbiota DNA sequence
aaggttcctgcctaccggcaagagaaagacttgcggcgtatgggccttccgcttgatcacaagacggtttcgaattggcatatcaaagtctgtgagtactacctctccagcctttacgagctcttgagaaaagagctgctaaagctggatgtcattcacgcagatgagacgccatatcgagtcttagacagcgaaagagccaaagacta

SEQ ID NO: 2420 - DNA, 209 bp, Unknown
  gut microbiota DNA sequence
gcgaccgccccagtcaaactgcccgtcaaacactgtcctcggcctggatcacaggcctgagttagagcatccgtcaagcaagggtagtatcccaacagcgcctcagataagactggcgtcctatcttctccggctcctacctatcctgtacatgcttgacagatacccaatattaaactgcagtaaagctccatggggtctttccgtcc

SEQ ID NO: 2421 - DNA, 4267 bp, Unknown
  gut microbiota DNA sequence
atgactcttgcattctgatgcgacctctttccatacagcttagctgagaaaacagtgattatagataaaacatcttctacaagttctgaatttggatcaacgttgtctgtctgattgatgacaaccagctctacatcgtttgcctgacagattgtctcaatcatttcaaagccaaaacgaacaagccggtcttggtgatttacaacgactcgctcacactgcttcttgcagatcatgttgatcagctctgtcaggccctttttcttataattgagaccagatccaacgtcttgaatgatcttaaactgatagccattgacttcgcaatatctggacactacgtccttctgtctttggagatcttctttttgatggccagaagaaacccggcaatagccgatggtcagcagcttcttaggcttagctgctttcatattgccttgcagaagctcatctagcatttctttagtgtagcgacgttgattggaggcagttctaagcggcgtaatcagtccttcagcttcccaattgcggagagtcgacttggcaacgttaagatactcagctgcttttgatatggacatgtattcgctcatcgtttcttccttccaatcttttgataccggcattatatcatgaattggtaagaaatattactatttagtactggataaaattaatactttttaacagtcacaacctcttttgacaatgcaggcagtaggtggttccccgcccgctgatcttgatcttgacaaagtcttccccgcagcgggggcatggctgcccctccttaccatagaccttgagcttttcctggtagtggccggaccccccttccgcgtttaagaagctgtggacggtggtgccgccgtatttagtagcttcttctatggttttattgatagctgaatggagctgtttgacctggtccttggttaattcgttagctggcgttaaggggttaatccggctttgccagaggacttcatcaacatagatgttgcccaggccggccaccagggtctgactcatgagcagactcttgatgttcatgctcctcttcttcaagcctttttcaaagtactccaagataaattctggactatttgcttcaacgcccaaattcttcaagccggtgacctggaattcagttccagtttccaccaattgcaggcggccgaatttgcggacatccgcgtagcggaggctgcttccatcggtaaaggcaaactgcaggtgctcatgcttgtctaccggtgcatcccaggtcgttagatggtacttgccttccatccgcaagtgggaaacgaccgtcaagtcgcctaaacggaagagcaggaatttggcatagcggtcaacggcggtaaaggtcttgccctttaactcccttttaaaagtttccgggtcgccggtgatgaccttgtcgtaccaaatatcgacatggtcgatcgttttgcccacgaccaagggccgcagggtccggcggaccgtttcaacttctggcatttctggcattttctacctcctactttgcttcataccagtcatggccccagccggcgtcagcgactaaaggcacgtccaacttaacagctgcctgcatgactgacgggacaatcttctggatagtttccagttcatcagctggtacgtcaaagatcaattcgtcgtggacctggacgaccatcttggtctttaatcccagttcatccagcttcttttgcatgttgatcatggcaatcttcatgatgtccgcggctgacccttggattggggagttgatcgccgttctttccgcgaaagagcggacattgaagttcttggcgtggatgtctggcagatagcggcggcggtgcatgatggtttccgcgtagcccttttctctggcgtctttaacggcccggtccatgtaggcctggatgcctgggtattggtcaaagtattcgtcgatgaattccttggcttgcttgcgggagatgtccaggttcttggagaggccgtagtcagagatcccgtagacgatcccaaagttgaccgccttggcccgccgtctttgcaaagacgttacttcgtcaacgctgcttaagtggaagatcttcatggccgtgtgggcgtggatgtcgtagccggtcttgaaggcttcctgcatgttcgggtcggctgagacatgggccaggacccggagctcgatttgggagtagtcgcaggagtagatatagccatccggacttgatgggacaaaagcctttctgatctgcttgccttcttccgttctggttgggatgttctgcaggttagggtcaactgaagacaggcggccagttgccgtcaaagtctgcaggtagcgggtgtggatacggccgtcacgctcatcgatgacgtctaagaggcccttaacgtaggttgattggatcttggaaatctgccggtattccaggatgtcactgacaaccgggctttgttctttcaattggttcaagacttcaactgaagtggagtaaccggtcttggtcttcttgatgactggcaagcccagcttttcaaagaggatgactcccagctgctttggtgaattcaggttgaattcttccccggcttccttgtagatcttctcttccagttcctttaaacggacagcaaagtcgttttctagttccttcaagcgggaaggctggaccttgatcccgttcatttccatcttggccaggactctggccgttggcagttcgattgaatcgtagaggtcatcttgctcatggtcttttaactgctttaaaagactgtccttcaaagccgcgatcgccgcggtcttgccagccaggtggttgaagaagaccgcgtcatctgccggaatcttggcattcttccccttcccgtagacttccaggtcggtctttaagtcatagtagtcgtagccttggaccagttcacccaggtcgttggaatttttctcattgtcaaccaggtaagaagccaggagcaggtcaaagctcaaagattcagccttgattcccagccggtagaggccgtaagtggtccgctttaagtcaaagacgttcttttgaacggcagaatcttccagcattcccttcaagggtctttcctgcaagaggaagacgtcccggctgacgaaagtttccccgccgattttcaaggcaaaaccggcgaagtcggccaggtggtagttgtcgccaaacatggccaggtagaaagtaacttcagcagcctttggcagctggtctaagttatcagcactgagcacgacatagtcctgctttttaacttccgtcttgttttcagtcaactcccctttttgggccaagtcggccagaaagcggcggaagttcatcttttcgtagaagcgacggaggtcgtcgatattgctgccctcatagctaaggtcatcaagggtcacttccaccgggctgtcgcagttgatggtggccagctttttacccaaaagggcattgtccttgccggcgatcaggttttccttcagcttggacttcttcatttcatcaacgtggtcatacaagttctccacgctgccgtattcctggatcaatttagaggcagtcttggggccgaccttggccacgcctgggtagttgtcggacgggtcacccatcaaagccttcatgtcgatgaactcagtcggggtcaccccgttgacttccttcatgtggtctggagtgaaggcttccagtttagttaccccggacttggtcacgtagacggtgacatggtcactggccaattgggtcaagtccttgtccccggaaacaacggccacttcatagccggcttcagctccttttttagccatggtgccgatgatgtcgtcggcttcatagttggccagttcgtagctcttgattcccatgtccttgagcatttcccgcaggtaagggaactgttcggaaagttctgccggggtcttgtcccggccgcccttgtagtctttgtacatggcggttctgaaagtagtcttgccggcgtcaaaggccaccaggatatggcttgggtcttcctgcttcaagaccacgtccagcatgttcttgaaggcatagagggcgttggtgtgaagaccttctggattcttaaacttgtccagctgctggtacatggcgaaaaaggcccggaaggccacggaattgccatcgattaaaagtaacttcttcttgttcattgtcattccttgcaaaataaaaactgtcaaaatacctatatgtattttaacagtttttgctagttcgttaattat

SEQ ID NO: 2422 - DNA, 232 bp, Unknown
  gut microbiota DNA sequence
cctgcttaaggtcacccagcagctgattgaagcctaccatatcgttggagatggcatagtcattaactttttggccattgaccataatgcatacgttagacttctggctgctaacatcaataccgaaaacagttttcaataaatccataagaataaacctccgctttactcggagatgagctgccttcacccaattcaatcagatctaattttctcaacaggactttaacag

SEQ ID NO: 2423 - DNA, 227 bp, Unknown
  gut microbiota DNA sequence
gatgagcttctgcaaggcaatatgaaagcagctaagcctaagaagctgctgaccatcggctattgccgggtttcttctggccatcaaaaagaagacctccaaaggcagaaggacgtggtgtctagatattgcgaagtcaatggctatcagtttaagatcattcaagacgttggatctggtctcaactataagaaaaagggcctgacagagctgatcaacatgatctg

SEQ ID NO: 2424 - DNA, 213 bp, Unknown
  gut microbiota DNA sequence
tttataggagtcagccgcctaaggcagggcagatgactggggtgaagtcgtaacaaggtagccgtaggagaacctgcggctggatcacctcctttctaaggaaagcggatggatggagagcagaaatgctaagagaagtccaccagttacggaagcacactgcaaaagaaactttgttcagttttgagagtatcagctctcacttgtacgttg

SEQ ID NO: 2425 - DNA, 209 bp, Unknown
  gut microbiota DNA sequence
tagtctttggctctttcgctgtctaagactcgatatggcgtctcatctgcgtgaatgacatccagctttagcagctcttttctcaagagctcgtaaaggctggataggtagtactcacagactttgatatgccaattcgaaaccgtcttgtgatcaagcggaaggcccatacgccgcaagtctttctcttgccggtaggcaggaacctt

SEQ ID NO: 2426 - DNA, 209 bp, Unknown
  gut microbiota DNA sequence
gacgctaagtacgacaagaccccaatggttgccctggtagccaatgttccaactcctcgtcaagacatcaacttcttccaagcctttgacgaaacgccatggttccgtgacgttgccgtttgggtccaccaagccaagaccaaggaagctttgccagttttgatggacactgctatccgtcaagcttacgcaaagaagggtccagctgt

SEQ ID NO: 2427 - DNA, 218 bp, Unknown
  gut microbiota DNA sequence
tcagaacgtgaagctgactacgacaccttgaaggcgcaaatcgaagaagcgggcctcaacctggacgactactcctggtacctggacctgagaaagtacggaagcgtgccgcactccggcttcgggatgggctttgaacgggttattgcctggatctgcaagctggaccacgttcgtgaagctgtcccattcccaagaatgatcaacagaatgcagcc

SEQ ID NO: 2428 - DNA, 209 bp, Unknown
  gut microbiota DNA sequence
caatcataatgagcatactcgaaaccgccaagcaaaatggcttggatcaattcaaatatatcaactatcttctagacaagctgcccaatgagctgtcattattagacaatcaacgtctggaagcctatttaccatgggctgagaatgttcagctccactgtaagtaaagtcccataaactgattaatcccatcttagcattgctaggat

SEQ ID NO: 2429 - DNA, 214 bp, Unknown
  gut microbiota DNA sequence
tgcagtctattcttgttggttatcagatcgtgcgaagcctgctcatagatgcggttattggccatcaattcttgatattcttcgctttgaacgtaggccagccgttgcgagtgctcagactgcagcttggcaagatacaaggcatcaagcttatcggtcttgttctggtgcaggtcatcctttgtctttcttttggcttctagcggattcatca

SEQ ID NO: 2430 - DNA, 257 bp, Unknown
  gut microbiota DNA sequence
agctcgcttgattgcggcgtctgataccttgatccgcttgccgtctgatgagcaaaaagcctcattgccagccatgttccagtcaaagccttgaatagtttttgcctcctgattcttgcgaggcaatgaaaaagtcagctgcagtctgtaagtaccatctggaagcttctttatctttgtcaaagcaatgtccttcaagtttaattcggacaagtcttcaatgacttcgacagtaccaaagtcggctactgttaaga

SEQ ID NO: 2431 - DNA, 209 bp, Unknown
  gut microbiota DNA sequence
ggtggaagcaaaatgcttaaagtctacactaaagtcggtgaccaggggaaaaccaagcaggtgaccggcaagatggtcgccaaatacgacccgcagatccagacactgggagctctcgatgagctgcagtcctggctgggggttacggtggccaacctttctccggcctgccagggcctggaagaaaagctgatcaagctggagcggga

SEQ ID NO: 2432 - DNA, 209 bp, Unknown
  gut microbiota DNA sequence
aagaaggtgtgcatctgtgtctaatgaagaaaagtatggatttaccagacaataccatgtgttgctgactgacaagcaaaaaatccagcatgagaaagcgttgagaactcagaatgctttgtttcagtacgctttaaagtatctctttaagacttatggcgttaagcatatcggacgccctatgccatttagccaaaagcccattcagt

SEQ ID NO: 2433 - DNA, 275 bp, Unknown
  gut microbiota DNA sequence
gctctaagaatcattagtgagcttggggatatcagacgttttaacaaccctagccaattaaatgccttcgttggtgttgatcctcaagtttatgaatctggcaacctcacggcccacctgtcaatttcaaagcgtgggacagctattggcagaaaggtgctgtacttggcaataaaccaaattcagtcggctaagaaagcgggaaacccttgtcatattgcggattattacgagaaacgaaaacggtcttctgagactgcaagtcacaagaaggc

SEQ ID NO: 2434 - DNA, 209 bp, Unknown
  gut microbiota DNA sequence
ctgtctttcgttactcataccggcattctcacttctagaagctccacatgtcctctcggtcatgcttcaccgccgctagaacgctctcctaccacgtgcataaacgcacatccacagtttcggtatcatgcttagccccggtaaattttcggcgcggcgtcactcgactagtgagctattacgcactctttgaatgatggctgcttctg

SEQ ID NO: 2435 - DNA, 298 bp, Unknown
  gut microbiota DNA sequence
tctttcgaactctctcggtcgctttgcaatgttttcattgatctcaatgattctcggttttttcttggaattaagatattcagttttcaacgtacaagtgagagatgatactctcaaaactgaacaaagtttcttttgcagtgtgcttccgtaactgatggacttctcttagcatttctgctctccatccatctgttttccttagaaaggaggtgatccagccgcaggttctcctacggctaccttgttacgacttcaccccagtcatctgccctgccttaggcggctgactcctaaa

SEQ ID NO: 2436 - DNA, 299 bp, Unknown
  gut microbiota DNA sequence
cagattgtctcaatcatttcaaagccaaaacggacaagccggtcttgataatttaccacgactcgctcgcactgcttcttgcagatcatgttgatcagctctgttaggccctttttcttatagtcgagaccagatccaacgtcttgaatgatcttaaactgatagccattgacttcacaatatctggacactacatccttctgcctttggagatcttctttttgatggccagaagaaacccggcaatagccgatggtcagcagcttcttaggcttagctgctttcatattgccttgcag

SEQ ID NO: 2437 - DNA, 209 bp, Unknown
  gut microbiota DNA sequence
gagctcgtgaattctattgatttcacgagcttttctggtattcttatgattatgaatcaaggagggacaacgaccatggctgacaaagaaactttagctttaattgaaacgctcaaagcaaataacgaagaattgctcaagcaggttgcccttcttactgaacaagttgcttatttgactaataagctttacggcaagtcttccgaaaa

SEQ ID NO: 2438 - DNA, 1081 bp, Unknown
  gut microbiota DNA sequence
cgaatctgctgttatctgatttgacgcctttttcttttacgaacgtcaagtcttccttggcaatgaccgccggatgctctgtctcgatcattctgtttatcgcacagttgataaagcttctgacagtttcatgagctgagcggtagctcttgtcatacgactttctgccgatattgttctgctccagattcttgagcttgccaagcagttttattttcttcctcaaagcagtcttagacaaaggttggtttgccttctccagttgctcaagctgctgattgagctgccagcgcaaactcatatatggctggcgatttgcgtttcgcttgccgtatttgtcaacgatggcattggcaagcttgctgaagtttttaccatattcattgccgctgctgcaggaaagcagggtggcgagccccttgtcaatgcctattgccttctttgaatcattgctgtaacgcttgctagagatcagcttatgaacttcaaggcgctgcttgatgcggtcaagcaccactgtgatatcgccggtgcgtggataactccacgggctggtcatctctacagaaaactgctttctaggcacatctgaactgaatgaaaaagtatttccttcaaatgcccaattcaagtcacaattcatgctagagccaagcttgcccgacttccgtgcccggtagtggtagcggtacgtaatccggcgcaggtagctgtgcgcttgcttgatttgcttatccgtcagtttagcttctatttcagttaaagcttcagtgtattcttctggcagctcaattggcttgtgaagaagagcggcttgccatgcgctcttaaatttcaaaataaagaacagaaggtggcgctgatctgcagaaagattttcatttccttggatcactttcttcaagcgattcgccagattcgaccacatgctttttatgttggcacatgcttcacggagagcgcctacccagtgcttggtctgaaagttgtagactgtttctagcttgccttttgagcctttaaccggcttgtcccacttgcgaacttggttgcgcagagcctgccagttattaaccgctag

SEQ ID NO: 2439 - DNA, 364 bp, Unknown
  gut microbiota DNA sequence
tctgccgtatctttcaaaaaagtcggacattctggcaaattcttcatcgcttatctttttggagtaaactataactgtcttgggctgagtctttttcactgtctgcttgactgaagagtttcttgctttcttggatgactcttgcattctgatgcgacctctttccatacagcttagctgagaaaacggtgattatagataaaacatcttctacaagttctgaatttggagcaacgttgtctgtctgattgatgacaactagctctacatcgtttgcctgacagattgtctcaatcatttcaaagccaaaacggacaagccggtcttgataatttaccacgactcgctcgcactgcttcttgca

SEQ ID NO: 2440 - DNA, 230 bp, Unknown
  gut microbiota DNA sequence
ttgataatcttgtcggctggcgcttcatcactgcagtgctggcacttgtaagagtgttggatgtgatcgattctcttaacctgggctggaatgtagagcagctcctgtctagcacagaagctgccaatctctttcagttcgtgctggcagtctggacaagtaagatcatccaaacgatgatgaacctcctcgcccggcagagagtctaagatatcttgctttctgccgac

SEQ ID NO: 2441 - DNA, 209 bp, Unknown
  gut microbiota DNA sequence
ggtcgccttgaactatccaacaacagagcagaacgagcaatcaaagagatcgtcatgggacgcaagaactggctcttttcacagagtagtaccggcgccaagtctatggcaatcataatgagcatactcgaaaccgccaagcaaaatggcttggatcaattcaaatatatcaactatcttctagacaagctgcccaatgagctgtcatt

SEQ ID NO: 2442 - DNA, 377 bp, Unknown
  gut microbiota DNA sequence
cggtccaggcccaaaaccaatggcagataaaggataggataaaaggccaggttgccggcagcatgatacaagtcaaaggtcaggccactgacccagtaggcaatgaaggctgcccagccaccccagccagccatgcccaggctgacgaagaagccgtattccaggcccagaaagccggccaggagctcctgcagccagaataatttccggcttttcagcggcaaaagcctggcaaataacgccacggtcaaagcgcaggccgcgtaggcaaaaatctgcggcaaggtccaaatgccaaaccccaggaagatattagagatcaccatgaccaaaatggccaggagaatccccgtccctgcccccagttccagcgtcgt

SEQ ID NO: 2443 - DNA, 209 bp, Unknown
  gut microbiota DNA sequence
cgtggtgctggataccacgttcaagcgtcaagtctgagagtgagtcaaatgcttgctttcataaggacaaggcgtgatgaggagcgaaattaaagtagcgaaggctgcgacgtcacactgccgagaaaagcttctagccagaaacggtgcacccgtaccgcaaaccgacacaggtagtcgaggagagtatcctcaggtgagcgagagaa

SEQ ID NO: 2444 - DNA, 1653 bp, Unknown
  gut microbiota DNA sequence
ttctttaaaccatgtatttgagtattaaccttaaacttcccacaccaaaaagaactatgaagccttgaaaactcaatagtttagccagtaaatatttaattaagctactagtgatggcgataatacctcttgcatgtactttggaaggcgaaaaatgaatgctttggtgaatctttccatctgctcttctgtcggttggaagatctctttcacggtctcgaacatggcttctaccaggacctgaagggagtgatggaaagtgatgtccccaagctcgtctatcatgcagtaaaatagctcgcccatagtcctatcgtcttcatcatcgcgcttttcaaccgacatgaacatgtagcgcaaaaagacgaaagccgtatgggcagtcaatgcatcatatgaaagaccatggtattcagtgccaagcttcaagaaactcttgcaagtcttgaagaagacctcgatgtcccatcttttgccgtaaattctgatgatctcattttcatcgatcgtcatgtccgtgcaaataagagcgatccagtctttgcggttggagcgatttcttacgcagactattctggcatcaatctgggcaccatctttggcagggtcgccaacctttacagggacggacaggagatatcttgaacgaccgcgatgcttcttgcatgcgttgaagatctgcttgacgttcatccgctttccttcgaactcgtatgtgatcttggagcttttcttcaccatggcgattacgttcaaaccacgttgactgatttggacaatctgatgaggattggagaaccaagtgtcaaacatgacgtacttggcagtgagccctgctttcaaggcttgatcgagcagctggataactatacatcgatcccctttgattgggccataatccgccccttggccgcgcttgtgcgcttgtcgctcttcttggtcggtcctgatgacattctggtcgttctttgaggacaagagtgataaagcgattgggacaaaggaggatccatcagtccaacccatggtcatcatccgaaagccctttttgtaggtcatcgaaacgtggtcgaatactttggcagccagctcagtcttcttgtatccagttctagattagagcgaatcgtcaaagacgaagcaatcggcacgttgatcagaagtcagatctttcaagtgcccattgacgatcctctcagctagcagaatagtgaagcgaagccagttgatatgtgggttctgcatgaatcgatagtaggtgtttttggagaagccagcagtacacttgccagacttctgttgcatgtacatgcttctgtctcgaaacacattactgaagatgtatgaaaggaccgaccaaagtgggattcctttggacttgcgaagcccacatctacggagaagctccataactttgtagtccttgaagaacttttcaacagaacgagaaatttggggttcgcttttggtatcgaatggtagtaaactaggcatagcacaagcctttcgtttgatattgatgatgttgtagttgaattatatcaagcgaacaaaggccttttgctttttttattagctaaactattgaattttcaaggtacaagcccacttttgtaagtgggaagtttaagtattaactcagttatgttttag

SEQ ID NO: 2445 - DNA, 121 bp, Unknown
  gut microbiota DNA sequence
gatagtaggtgttttttgagaagccagcagtacacttgccagacttctgttgcatgtacatgcttctgtctcgaaacacattactgaagatgtatgaaaggaccgaccaaagtgggattcc

SEQ ID NO: 2446 - DNA, 209 bp, Unknown
  gut microbiota DNA sequence
atcctagcaatgctaagatgggattaatcagtttatgggactttacttacagtggagctgaacattctcagcccatggtaaataggcttccagacgttgattgtttaataatgacagctcattgggcagcttgtctagaagatagttgatatatttgaattgatccaagccattttgcttggcggtttcgagtatgctcattatgattg

SEQ ID NO: 2447 - DNA, 209 bp, Unknown
  gut microbiota DNA sequence
gggaaaggctctgctcaaagaaaaggcatcaatcgcagactggcggtcctcaagccatatgagctgatgactattttagagtcgcttgtaaagaagcagaacaaaaggtttgtcaaagtggattcattttggacaagcaaggcatgccacgactgcggatacatcaacaaagatctcaaagttggtcagaaagaatggcagtgtccaag

SEQ ID NO: 2448 - DNA, 26774 bp, Unknown
  gut microbiota DNA sequence
agatcaccaaacagcatacggctcagttcaccgacattataggaactgccaagaacaccaatgaccgtttcctcatgaaaaaccggaacgccaagaactaccttcgtctcctgatccacactgctcttgagcggatcactcaacgtacggctgccgctgatcccttccttaaagtatctccggtatgccacattttttaccagtccattatcgtagtgtgcatcaccattcggctgaatcagcgccgtgcgatccagcgcggtactctcctgaaatgttgtcagcatctgcatattttcctcgctgagaaggtctccgccctctcccatcttctctgcaatgccttccagatacgaataatgaatatttaaaatggttcggagatgttcgctctgtctcgccacattgtttctcattctctcctgcgaactgctctcgatcgttctctgtactgccacaaaaaagaaaaccagaccgatgataatcgccaggataaataccgcaattgctcctacatagcttcctcctggattctgctttttcttcttaaaaataatctccaactcctcccctgtttcttcttttaatataccagaaatatgtcctgaatactacttgtttctctgtttttcgctcgacacttttataccttgcatttttataccgaacgcttttcaaaactccaaatctgtactataatcaacgagataaaataacatgtataccgtttacaaaggaggcccttatggaaccaaatattattactctgacagaccagtacggcgaatctgttcgttttgaacttctcgatattgtggaatacgaagatcaggaatttgctgttctctatcctgccgatggcagtgacgatgaaccggttcatattctgcggatcacttccgaaaatctcgatctggatgaaatggaattcgaaggtctggatgacgaagacctgatcaatgccgtgtttgatctgttctgcgaacgtaacgattttgaataagaattttttaaataaaacggagaaatcgcttgacattttctccgttttattttatattagtattagtaacaattactgttattaatcaagaagggaggatcgtaatggcaactctgaaatacagccgtcaacgggaatccatcaaagaatttctgatgacacgtaccgatcatcctacggctgacaccgtctatcatcagttacgcaagatttatccgaacatcagtctcggaaccgtctaccgtaacctggcactgctggcagatatcggagagattcagaaaatctgtaccggcgatggtgctgaccgcttcgacggacaggtcacccctcattatcatgtaatctgcacccgctgccatcaggtgatggatctggatctggaatacatgaaagaaccggaggatctggccgcacaacattttgaaggaaagattctgggacatgtgacaaacttctatggaatctgtcccgactgtctgaaaaaagatacgatgtaaacgcttcctggattgtcagaggaacaaaacgaaaagaacaaaagagttttaaaatcatcttgacaaacaggaagtaatatgttaatctaatatcagtaataattactattattaattcaaactcaagaaagcgattcaccgtatagggaatccgttttcaagataaactacaaaaaagaaaaggagaatatgaccatgaaaaaatttgtttgtactgtatgtggatatgtttacgaaggagaaaccgcaccggaagtctgtccggtttgtaaagcaccagcttccaagttcaaagagcagagcggagaaaaaacatgggctgctgaacatgtagtaggtgttgcacagggtgttccggaagacatcctggctgacctgagagcaaacttcgaaggtgaatgctctgaagtcggtatgtacctggctatggctcgtgtagctcacagagaaggatatccggaaatcggtctgtactgggaaaaagctgcttacgaagaagctgaacatgcagcaaaattcgctgaactgttaggtgaagttgtaaccgacagcacaaagaaaaacctggaaatgcgtgtagatgctgagcacggcgcaaccgaaggaaaattcgatctggcgaaacgtgcaaaagctgcaaacctggatgcaatccatgacaccgttcatgaaatggcaaaagacgaagcaagacacggaaaagctttcgaaggtctgctgaaaagatatttcggttaagatttaaaaggaactcaaccccggctgacagtttgcagccggggttatttttttatgctgacagcagggaatcaccggatttctaaaaattttcttaaaccttcctcttctgcgctcctttcactggcatctttgccggttttcctgtatactgaatattaacagcgatgaacgtgacatattactgtttggaggtgtttatcatgaaagacaatttaggttatgtacatgtatattgcggggatggaaaaggaaagactactactgcgatgggactctgtacccgtgccgcaggttatggatataaagtactgatctatcagtttatgaaaaataataagaccagcgagcgaaatgttctgcagcaggttccgaacattacttttgtcaacggactggagcaggaaaagttcagttttcagatgacgctttccgagaaactggaacggaaaacctactatgaaaaacagttccggaaaattacagcaaaagctgccgaagaagactacgatcttctgtttttcgatgaactgatctatacgatccgcgccggactcttcgatgagcagattcttctggattatctgaaaaaggaaaaaccggaacatctcgaagtcatcctgaccggtcagcagccaagtgatgaactggtggaacttgccgattatgtctccgagatccgtaagatcaaacatccttttgatcagggacttcctgcccgcccgggaatcgaaaaataaaaatataaaaaatcagaaagtatagagaaaatatatggacgcattaaaatatgtatcacagattctcgacgatgcggactcctgggaaaccatgatgtttctctacgatgccgcacttcgccagatgtccacaaagattgatattctgaatgaggaattcatccatattcataattacaatccgatcgaacatgtgaagtcccggatcaaggaaccgaaaagtatcgtcaagaagttaaagcgccagggacatgaagtcaccctggaaaatatgttaaaatatatcaaagatatcgccggtatccgtatcatctgttcatttacccaggacatttaccggatcgccgatatgctggcaaaacagtccgatctgcgtgtggtggaactgaccgactatcttacccatccaaaagtcagcggataccgcagctaccatatgctggtagccgtcccggttcatctttccgaccgtgtcgtggatatcaccgtggaagtacagatccgcaccatcgcccaggacttctgggcaagcctggaacataagatctattacaaattcgagggcagtgcaccggaatatatcagccgggatctccgcgcctgtgcagagtttgtagccgaactggatgaaaagatgctttctctgaacgaagcgattcaaaaagaagcgattcagaaatcagaggaagccgaggaaaagaaagaggagtagctgtttaaaacagtcactccttatttacatcccataatttctattccatgcctgtgtcaaccttgatggcttcgtgaagacaaatatcctccataaaatgaggagtgcccggatacctctcagtacccgggctattattatgaaaaaattctatgtgtaatgaacccattacaaacaattttgagatgttcctttcggaactattattatcatagcaacagtttatgaacaaattatgaacgcaatatgaatttatggttaatttgcacaattcatttttcttttttctttgtttttatgacactttacactgttctgttgtttttgctttttcacttcatcctgttaattcgtcaaatcatccgtcattttctttttattttccggaatttttcaacacattatccaaagatagaactccagaggttcttgcaccagcttacgatcttagcaaaaaatcctttgacctgctcctgattgatgttcagatccaggctctccagtttattgtacagatcttttgcctgctcttttaacgcatccacatccagatccaggctgctgatcttctgcatcaggcttacgatcttctgtttatcctcgtctgacagctgaatgtccatttcttttgcagcgtcatctacaaccgcttcgatctctttcggatcagacagatcgttggagacaactgcttcttttaccgctccgaccagttcttccgcctgttccttatctccgatcgactctcccagatcactggtcgttaccagttcctccgtggctgcgtctgcattttccgctttcagcgtctcaccggtcatattgctgtaggcttccattgcacctaccagagctgccgttccggagatgttgaacggtcctgccacatgcacatctgcatccgtcacgccggcggttgccagtgcattctgatacataccggtcgtacagtaggtgatattgttggtggtcactttgatcccgtttcctttgtccttcttttcgatcagtacggaggaaagtgctctggttccgatcacgctggaatccagataggaatccagatatttgtgttcgtccgcatttgtcacggtgatgacctgataatggctcaggtccgcttcattgatctccagcagacttaataccgtagatttttctgtctcgttcagatccgcacccagtgccagatacggcgcatcaatctgatctgcctttacactcatcggcgccgcaagacttcccagtacggttattgccgccaacattcctgccatgattctctttatcttcatctttattacctctcttttttcttcttatcctctcggaattgttctttcagtcctctctccgactgatactccgtagtataacacactttttttctgtgatacacatattcataaatcttttcccattcattcataaaatcttcacaacttcaacacggttttctcacatttcccggatatactataaccataaaataattaatacaaattattttataacttttctttttcatatgtcgatgaaaatcgacactccttcctttaaaaataaaattaaaacgtgttgaccggaatttcctcgttctggtcaacacgtttttattttacttttttatttggcatgtccgagcacatttgcaagttttgcaaattcttccagggaaagggcttcccctctcaccgacggagaaaatccacattctgcgattgcagcctctatcgtctctttttcaaacgacaatccctcataattcttcagcccattcgccagggtctttcttctctggttaaacgaagcacgaatgatctgaaacagcagcttctcattttccacctgcaccggtgtctgtgcatggcgggttagacgaatgaccgcacttcccaccttcggtcttggcataaaacagttcggcggaacatttgccacgatatacggctctgcataatactgtactgccagcgacagtgccccgtaatctttcgttcccggtcctacctgcatccggtccgctacttctttctgtaccatgacagtgatggattccaccggcacatggctctcaaacagccccatgatgatcggtgttgtgatataatacggcaggtttgcaaccaccttgatcgggcggccgccatttttctcttctgccagttttgcgatatccactttcagaatatcttcattgatcacggttacattatcataatcactcagcgtatcctccagaatcggaatcaggcttttgtcgatttctaccgcacatacttctctcgccgcatatgccagatactgtgtcatcgttccgattcccggtccgatctccaggacaaaatcatcttcggtaatctccgctgcacggatgatcttttccagcacatgggtatcgatcaaaaagttctgcccaaactttttctgaaatgtaaagccgtatttattcagcacggcgatggttgcctggggattgccaaggtaaggctctctcttactcatagtttttcctttctcttttattttctcgttgctcgcatatcaaaaattgatccagtggatcaatttttgattatcgcgacagtcgtcaaaatctcgtgcaagcacggactttgactcgttgctcgcgtaaaaacagggcatagctttctgtcgccatgccccatattgtcatgttcttgtaactgtgaaggtactgaacagttacgtgttcttttataagtcaaaatccttttcgtaaagaagaatccgtccttctgcatccgtgtgacgtttggaaagttttcttcccagtttgacgccgcttgcttttcggatcgctccgtctaccatctcttttacttttccgacggtgatcggttcgtcttctttctggttgtcaccgatcatggtatagagggcaagtacacccatctcatccatccggaaaccattttctcttgcatacgttcttgcaaaggttaccagctcatcgttggtaaataccgggatcgaaatcaccgtttcgaatttctctgcaaattccggataatctgccagcatcttacgcatgttcgctttgtcatcctcgatcagaagaatcagactgtctgtacggaaatccatcgcctgagaaagtttctcgatggtctccggtgtcataaagcttgcacgctcgatcagaagaaatcctcctgccatcttgctgatgatggttgccggatcttttctgttgatgtcagacgcatccagatttgcgtatttgactgctttcagacccagttctttacagatcgctttcacaagtccttcgctcagacgggtttttccggttccgtggcttcccatgatcgcgatatttccacgatgagaggtcttctcactcgcgtgttcatacgctccttggatcgcatccaggatctgttcatccataccaggtacttttgcaaaataggaaaacagctgtttctgttctgcggtcagacgttccggtctggtattgttcaggatccgctggcgtttttcctccggtgtctcccgttctaccgtcatatcattgatatccggctgcatctctgcttctgccagcatcttttcgatatgattgttctctgtctcctccggctcttcttcgtcggtgtcatcggcttctgtatgtgattcttctgcaatattttcttctgccgacggttctgttttctcatccgcaaaagcaacttcttctacagacggtgtctccggttccagttccagacttaccggctgctgttcctctttctgctcctggaatacttccaggcttccaagagctgcccgcagttctttttccagattaaattcctgtgtttctcccggcgtctcctgctctgcgctctgtgctgttatatccggaatgattctcgttgcatccagatcttccgtttcctctgactcttccggttctgtgaccgtttcttcttcagcagcctgttcttccgttacttccacaggcgcttccggttccgcgtccgctgcttccggcacttccgtcgaatccccgttttcttctccgaagtccagagaaatattggaaagactcgcttcaaaagctgccatagcttcatctgcagcgatatcttctgctgatttttcttccggtgcctcctgaatcgtgtcttctttgacgttttcctcttctacagtttctgccggaatctcttccgtttcttccacaatagcttctgtctccggttcttcttcagccgtatctgtcagttctgattctatctcttccactgccggttcttcaatgattacatcctccggctctgcaacagtttcttcttccagaaccgcaccggatgcatccacggtttcctcggcgaccacatcttccggttccccgatgatctcttctgtcgttacctcttccacggtcggttcttccgcagattcctctgccggtacttctccgcccgcttcttttgccagggaagaagaagtctctgcaaacaacgcatccagatctacttcctgtacactgacaatttctttatcctccggtttttccaccttcggtttttctatcatttccagttcgtccatctcggttctgctcacgccggcaaccccgctgtccgcagaaataatgccttcgtttacagcctccggttcgagatcctgtacatgataatcttcaatattttcttcctcctgcggttcctgtggaatctctgctcctgcggctcttcccagtgcctcaaaagcatctaccgccttggtacggttgaatccggaaagaatctcctggaagctcttggaaagacgttcctgaagcttttcggtatcaatatgaggaatctccggctccggtcttacaggctctgtctccacaacggttaccgtttccgtagttccttgtgcatcctccacagttgccgctgcttcttcctgcgcctgttcccgtacttcttccgctttctgaagatttgccatcgctgccgcagatacccccggcagaatcgtatttttcacttcttccgtctgctgcggtttcgcactggtctctccagccgctttcgccttctcatatttctctttctgggacggtgacaacggtgtataagtcatcttcagttccatcgccttggttacatatttaccctcgccaaaccacagaaccagatcgtcacaggtttcgatacatttcttttcctgtcctgctttcttatacagctttgccagttcgtatacccagcgttccgtatattcccgttctttatactcctccaggatctcaatctgatcttccagaggtgctttctttgctttgtaaatcttgtatttcagaatgtatttggaggtatcgttggatgccgtttccagatactgattataatattttacagcatcatcatttaaccccatcttcaaagccagttccacctgacggtacagaatcatctttccgatggatgaacgtttgtatgccagctgcagcatcttcatgctttgttccagctcaccattcacttcgtagatatctgctaccatacacaatgtccgcacactctttactctgcgccaatcgatggaatcggcaatcgtaagagccccttcataatcctgtgcgtccacaagtctgttgatttcctccaatttcaaatggtattctgtcttatccactgtactcacctctgctttttctatcaaatctgtaactgtctgagactttcacagttacttatttttatagttatccataatctttttaagtgtatcatactgcctgtttcttgtcaaaatataactgccctgtaccggcacagttattgataaaatgtatgaatagaagaacgaaattaattttctggaaagtaaacaagggatgccgccttctgacaacacccctcttatgtatacgggagtcaggccccccttttcggttcttctgtcacccgattctcagtttaaacttctgaatttctttttcactggtcacacgttcgatctctgcgcccaagcttctcagttttccttcaaaatcctcatatccacgctggatatatacgatatcatctacgatcgtaattccttctgctgccagtccggcgattaccagtgccgcacctgcacgaagatccggtgcgctgactcttgctcctgtcagtttttccacgccgtcaatgatcgctgtattgccttctactttcacagaagcgcccatacgggtaagctcgtccgcatatttgaagcggttttcaaagatactctctgtgacgatactggttccggttgccagcgccagtgtcacggcgatctgcggctgcatatcggtaggatatcccggatacggcagtgtctttacatgagttctgcgcagtttctttgccgagatcacacggactgcatcgtcaaattcttctacctcgcatccgatctcttctaattttgcggtgatcgcttccagatgcttcggaatcacattcttgatcagaatatcaccccgtgttgccgctgcagcaaacatataggttcccgcctcgatcatatccggtacgatagaatatgtggtactgtgcagtgtttccacaccacggatacggatcacatccgtaccggcacccttgatattggcacccatgctgttcaggaagttcgcggtatctaccacatgcggttcttttgctgcattttcaatgatggtgtttccctttgccatggaagctgccatcataatattgatcgttgcacctactgacacggtgtccatgaaaatatgggttccgtgaagtccattcggtgcggatgccacgatggcaccgtatttgatatcaacagtcgcacccagggcacggaatcccttcagatgcaggtcgatcggacggcttccgatgttacagccacctggcagaggtacttctgcttttttgtattttccaagaagtgcgcccaacagatagtaggatgcacggattttcttaatatattcgtaatctacactgatatcaccgatcgtggaaccgttgatcactgcagtgtggcggtctacacgctccacctttgctccgattcctccgatggcctctaaaagtacatttatatcattgacatccggaagattttccagccggacggtatcatctgtcataatagcggctgccagaatcgcaagtgctgcattctttgctccgccaatctctacttctccaactaacgggtttccacccttaataatatactgatccatagttcacctctatgttttattcagcccaatacaagtcccgataagccctctcattcatttttatgttataacaaatcaaagtctttgtaaataaattttaaagatttcttatctttttgttcatattgtccactgaacttttccaaatacttttacagcgtatcgataatactctgtaaagtctcctctaaatttttattttcctcatcaattgtgatatctgcatatttttcatacagtaccacacgctcttcatacaggtccttcaatgtctgtccgtcccgtaaaaccacgccgcggttcttcaggttgcccagacgttttctcagggctttgtaagaaagtttcagataaatgaccgtggcaatctctccaagatgctccatagcctcttttccgtataccacgctgccccctgtggcaattactgtgcggtctgcttcgatcgaagcattcacctgattttcaattgcaataaagccttcgatgccctcttcactgataatttcttttaataatctcttctcctgctcctgaatcagcaggtctgcgtctacaaactgatatcccaattcttttgcaagaattactccaatggtactttttccgactccgggcattccgattaatactatgttcttcatatctctcatccttatcgcagcttatcattttatcatattatcttggttaatacaagtttttattcctgtttgttattggataacaaagaatgtgtcctgacacatttttttaatcataccacaattttccctgtaagggaacttaaaactcacgaataaaggattctactacatccgaatgttcttcgtttctccacaccagcagaacatccgtcgtcagttccttctctctgatcggaaccggacagattttttccgactgatctttcatagacgccggaagaatcgctgtccccagtccgctggctgccaggctcatggctgttcttgcatcctcacattcataataaacatcgctggacaggccgtgtttttcaaaaatagacagcacatactttctgtgacgcttggaaaggatcagatgatgtcccgccagttcttccagtgtcagttcccggcatcctgcttctgcctgcccctgtggaaccatcgccagcaattgttcctgtttcagcagtttggaacagaatccatttaaagcaataggagtacgaagtgtcgttacatcaaggattccgttttccagttcgtcttttaatgtaaaggtagatccatcatggatcacaaaacgaatgtccggatgatgactggtgtattttaccagatattttgccatcatattcaccgtggatggcgtcacgccgagatggatcgtcgttgcctggctaactttgatcacttctcttttcgtaatatcggtcatggtaagaagactttccgcccgcacatacagtgcttttcccgcctctgtcagccggatatgtttgctcccccgtacaaacaggcgtacctgcagttcttcttccagcattttcatctgataactaagcggcggctgtgtcatatgcagggctctggccgcaccgctgatggttccctcatctacaattgcccgaaaatattccagctgtttgatctccatagtttcctccgttttcctttcttatatctatatagaaattatttcttattcatataaaaacaatatttttcatatattataatttgtgctacactaaaagcgcaacagcaatttacctaaattttacaccgatgcatgacggtagcacaacgcatatatctgcatcatctacctcatacacaaaggagttttatcatgaaacagattgactttgaacatgggaaaatcaccgataatatcttgcgggcttccattccgatgcttgtggcggaggttttaagcctgctctacaatattgtggaccgaatctatattgcaaggatcccggatgtgggaaccacagcgcttggagctgtcgggctgtgttttccgatcattacgattattcttgctttcagtaacctcttcggttccggcggtgcgccgcttttttcgatcgagcgtggaagaaaagatacgaaagaggcttcgatgatcatgaacacctcattctttctgatctgtgtctgtgccctgcttctgatggctgtcggtatgatctttgcgaaaccgattctgcttctgttcggaagttcggaaaacggactgatctacgcgtatccttatctgatgatttatctgatcggaacttttccttctatggtttctaccggtatgaatccatttatcaatgcgcagggatacgccaccacagggatgttttctgtagcgatcggtgcaattgccaacctgatcctggatccggtttttatctttgtgttcggactcggtatccgcggtgcggcgatcgctacggtgttatcacagattctttctgcagcgtttgtcctgtattttctgcggaaaaagaccgaattgaaagtccgtcttctgtccgaagaagagatccgtgactgcggaaggcgggcaaaaaatattatcagcctcggaaccgcaggttttatcatgcagcttaccaacagtctggtgacgatctgctgcaacaatgtactttcggtcaccggaggcgatctgtatatctccgtgatgacgatcgtatcgagtatccgacagatcatcgatacaccgatccatgccattaccgaaggttcctccccggtcatcagttataactatggcgcacgccggcctaagagagtgttccagtcctggctcaccatgagcgtgatggcgatcctgtatacactgctcgcctggggcgtgatcctgtttgcgccgcgtttcctgatcggtatcttcagttccgaccaggcgctgatcaccgatgcgatcccggcactgaaactgtacttcggagcctttgtttttcaggcactccagtatgtgggacagacgatgttcaagtcactgggcaagaaaaaattcgcgattttcttctctctgcttcgcaaggtcatcatcgtggttccgcttacctacatccttccgtatctgttccatatgggaagtgacggtgtcttcctcgcagaaccggtatccaatgtgcttggcggaagcgcctgcttcatcgtgatgctgtgtacggtaatgccggagctgaaacgaatggcaaaggaaaattctgattgctagttgctagtttacataattttaatttcagatatcattgcagatccacagcaagattcatacgccaccgcaaacatctgcaatataatcttggtttctttactccataaaaaaactccagcagacacaatagctttcttctgtctgctgaagttttttattttttattcaaatcttcttatttctgtttctgaacatccgctgctctctcttcttctcggagccgttccagtttctccttcaccgtaggataccgctccagatcggtatggggaagtgcctgtgctgccaccattgtattcagaaaatcttctaccgctgcgaactggatatataccattttctccaggatctcctccacttcttttgccacaccgcgatccagcagtgcacataccgcaccttccagagaagaattgcccgcatggatgatccgatcccgttccatgtccgggtacatgccgatagcgatcgcggattctttggacacatgttttccaaaagcgcccgccacatagaatccttccagttccgaaagttcgatcccggactcccgcagcatgatcgccaccatcgtgtatgccgccgcttttgtccggataaattcttcaatgtcactctggtaaaaatacagctccggtgcatagttcaccgccagcatcccgtctttctccacgatccaccggcttttctccggctgtaagatcccccggatatcgatccatccatgcaaaaacaattccgccagaagatccacaatcccggatccgcagattcctttcgccgttgcctccccgatcacgtggcagtgcagttctccatcttccatttttacccgatccaccgcgccttccatcgcgcgcatgcccgtctttaccacaccgccttccagtgcaggtcccgcagctcccgcaccgcataacagaaaatcccggttccccagtacgagttccccgttcgttccgatatcgaaaaaagcgttgatcttctcttttttatagattcccgtagccaccatgccgctgatgatatcgccgcccaggtaattggactttgccggataaatgtaaacatatcccttcaccggcagttccagatctcttgccgggagaaatccgggctggtctgcgtgcaccgcatacggagtgtggaagacacagaacgcatccatcccaagcagaaaatgaatcatcgttgtattgcccccgattgccatcgcgatacagctgttttccggtaactgctgctgtgcttccagttctctcacacaggtggtaatgctggttgccgctgcttttcgaaggatctccagcgttccacggtcttcctgacagtgaaagattctggtcagaatgtccgttccataggggatctgcccgttgaacgtgctggtttcgcccaggatctttcctgtcgcgcagtccaccagacgggcaaccacggtggtgcttcccagatccaccgccacaccgtaatgtaacccggtggtatctcccgcttccagatccacgccatgccacgtctgaccgtcccacgccagcgacacggtcactttccactctgcctcttcgcacagcggatatagttttcgcagtacccgcaggcttacttttgcctcaatcccctgttcctttaatctgtcctggatccttctctgatcggaccggttatcgtcctcggtcggagcctgaagttccagatatatttttttactgattccgtccatgattattcctctttttctattgcgttgcttctattatacctctttcttcccaaataaccaagttatggattgcgtcggagatccaattaacgtatacttaattttatataagaacatactttctggtaacagatgcggatatccgcagaaaggaggacattcatggatcgcatcatttttcatatcgatgtcaattccgcatatctgagctggagcgcaattgatctcttacaggcaaatccggacagcgtggatatccggacgattcccgcgatcatcggcggcaaccgcaagacccgccatgggatcgttctggcaaagtctctgccggcaaaaaacatgtatcatattcacaccgcagaaccggtggcaaatgccctgaaaaaatgtccgacactcactatcgttcctcctgaccacgactcttacagccgccacagcaaacagtttgtcggttttctccgcacactgacaccggagattgaacaggtcagtgtggacgagtgttttctcgactacacttcgatcgcttcccgtttttcctcaccggaagaaggggctgcctacatccgcaactatatttacagccatttcggttttacggtcaacgtcgggatttcttcgaataaagttctggcaaagatggcttctgattttgaaaagccgaataagacgcacacgctttttcctgaggagatccagcagaaaatgtggccgctgccgatcagcagtctgttcatggcaggacatgcctccgttgcggttcttcagaaactcgaaatccgtaccattggcgatctggcaaagatggatccggcaatcctgaccatgcatctgaaaagccacggcaaaatgctgtggaaatatgcaaatggaatcgataattctactctggagagcgaaccgtctcaggcgaaaggaatcggcaattccaccacgctcgccagtgatcttacgaccgcgcaggaagcataccccattctcctgcagctctccaccaaagtaggacaccgtctcgaaaaggccggacaatctgccaataacctgtgcgtggagatcaaatacgcgacctttgaaaaatacacccgtcagatgccgttatcctcaccgacgcaggatggaaaaaaactgtatcgcgcagcctgtcatctttttgatacgctctggaacggaaacccgatccgtttactgggagttcgcgccggaaagctgtcggatgctgatgaaccggtacagctcgatctgttcagttatgatccgaaagccattgaaaaagagcagaagatggaacgggcaatggacaagatccgggaaaaattcgggaaagatctgatacagaaagggattcactgactttaactctttattcgcataaacgagaaatccccacagtggccgttgaatatccactgcggggatttctgtttattgtttgaacattacttattacttacgtttgaaaattagcagataccctgagctaacatagcatcagcaactttttcgaatccggcgatgttggcacctactacatagttgccttcgaatccgtaacgttttgctgcatcatccatattgtgagtgatgttgatcatgatgcttttcagttttgcatctacttcttcgaatgtccagctcagtctctcgctgttctgagacatttccagtgcggatgttgctacaccaccggcgtttgctgctttaccaggagcaaagattacgttgtttgcctgcagatactgtgtagcttccagagtagtaggcatgttagcaccttcgcatacagcgatggttccgtttgctaccagctgttttgcatcttccagatgcagttcgttctgtgttgcacatggcagtgccagatcagctttgatctgccatacacctcttccttcatggtattcagcgtttgtgcgaacttttacatactctgtcagtcttgctctcttcacttctttgatctctttcagaagtgctacatcgattccgtccggatcgtaaacccaaccggtagaatcagaacaggtcagaacttttacacccagctgctgtgctttttcgattgcgtagattgctacgttacctgcaccggatacaactgcagtctttcctgcgatgtcgataccatttaattttaacagttcctgtgtcaggtacagcagaccataaccggtagcttctgttcttgccagagatccaccgtaggtcagtcctttacctgtcagaactccttcatatacgtttctcagtctcttgtactgaccaaacatgtaaccgatctctcttgcgccggttccgatatcaccagccggtacgtcggtatctgcaccgatgtgtttgctcagctctgtcataaagctctggcagaatttcatgatttcacgatcagattttcctttcggatcgaaatcagaaccacctttaccaccaccgattggcagtccggtcagggagtttttgaagatctgctcaaatcccaggaatttgatgatacccaggtttactgatggatgcagacgaagacctcctttgtaaggtccgattgcactgttgaactgtacacgatatcctttgtttacatgtgcctggccctgatcatctacccacggtacacggaacataataactctttcaggctcaacgatacgctccagcaaagcttcttttctgtacttttcttcatttgcatcaattaccggacgcagagaatccagtacttctttgacagcctggtggaattctggttcgttaggatttttagccacaacgttttcatatacttcatctacataagacatgttacacgttcctccttagaatttgctcattgctttttgaatacgcagacattatagcatggtaaagtgttaaacacaagaaaaaattttcgttttttcgacctatttcctactttttcgcttggatttacgttttctcacactgtacccgaaagtaccgagctgctttcctacaccatagtacgttccgtgggaatacaccatcgggtgtgcgctgttcagatcaaaccggccattttcatccatataatcttcgtctgcatgaacagcaactacctgtgcaagaaacatgtgatgggaaccaagcttctctgtttttacgaccttacactcgatattcaccggtgactccccgatcattccacagttcacctgggaggcttccacacaggtcagtttcatctctttaaatttgtccacgtcttttccggaacggacaccgcagtaatcggtcgcatacgtaagtgcttccgtagtcagattgatcacaaaaacaccgctctcttcgatcatatgatacgaatagcgctccggccgcaccgagatggataccatcggcgggttggtacacaccgtacctgcccacgctacggtaatgatattgtcttttccttcgttatcccgcaccgataccataaccgccggaagcggatacagcatgttgccgggtttccactgttgtttcgccatatatttttcctttactgctgtaatgcattcataaacttcggaatcagctgtttttttctcgataccacaccttccagacgacaggaactgtcttccactttctctccgaatgcctcatataccagtccatccgatccctctccgtaacacagaagttccgtggactccttgatgatgttggtcagcatgaagaacaccatcttgattccatgtttgccacattctttttccatatacggcatcaggcggtctttgaccgtctgcagttcttcctcggacatgaagctgatctgtcccacaccgaatgccaggtcatccacgataaatttcttataatcctgataaaagatttcttccggtgtcttgctgctcagattgcttccggcacggaacattttattggcaaagctttcgatctcgatcttggcgatctttgccagttcctgcgctgcctctttatcacgttccgtacaggtcggcgagcggaacatcagcgtatcagacaggatcgccgcacacagaagtccggcgatattttccgggatctccaggtatttttccgcgtagatctcatacatgatagttgcggtacagcctaccggctggttgcggaacatgatcggctggaaagtttccagtgaaccgattctgtgatgatccaggatctccaggatctctgcctcttcgatattgtcaaccgcctgggatctctcgttatgatcaaccaggatcagctgttttttcttgatgctcatgaaatttcgacgggaaacggtaccgatgtattttccacgggtgttgaccaccgggaatgcacggtaacgggtcttcgtcatgatatctttgatcttatcggtaaaatcatcactccggaagatcaccagattgtcttttttcataaaatacttgatcggaatactctggtggatcaggcgggcaacggtgaacgaatcgtacggtgtggaaatgatcacctgatttctctcctctgccagtttctggatcgtctttccgactttcgctcccagacacacgatcaggcagcttgcgtttgcttcgatcgcacacagctgatcttccgcacggtttccgagaataaccagatcgtcctcatcgataaaactctccatcgtatccggctgggagagtcccatgactacttttcccttgataaagtatccgtgttcatttcccacgatgatctgtccgtccacggtatccgcgatgctccggtactgggtacgcgcctgggcaagcaatgtgttatcgtaagcatccatataggatttcgcgatatctccggtggtgatcagaccttccacttttccttctttgtccgtgatcggcagcgttaccgcgttatgctcctgcatcagtttccatgcccgtttgaccgacatgctgtttgccgctcccggtgtctcgtgaagatccatgtctttcacctgagttcctacatccggcagataaccgggtgccggcacatgaaaatatttcagtacaaattctgtttcttcgttgatctgtccggctctcttcgccacatacgttcccttcgttgttcgattcttgatgtcggcatatgcgatcgcagaacagatcgaatccgtgtctggattcttgtgtccgatgacataaattttattatcttttctcacaaataatcccctaactgttgttcccggcatctatcagatacttcttctgttttctgccgggatctgcttggtctataattttctgcttttcatattagcatacttaaaaaaaatcagcaaacagatttgatcggtttttatgtactattccccgtacaccgatccggtatgtgcctgatttatgcccgaatccttctattttctgttgccagatttcgtgaaacaacgctataatagaaacagcaaattcggtacaaagaaaggatgaacacaaatggcagaagaagaaaaagtaacaccggttgccgaagaggcaacttcgatggcagattatgagaaggagctggaggcttcttttaaaaagatcgaagagggcgatatgatcaccggtacagtgatcgctgtggacgaagaagaaattacactggatcttcgctattatacagaaggaatcatcaaagtttccgattacagcagagaacctggatttatggtaaaagaagaagttcatgtgggcgatgaagtcacagccaccgtgatcggcagagacaatcgccgcggctgtatcctgttatcccgcgtggaagccaacgatgtgctggcatgggacaaactgcgtcagttaaaagaagacaaaaccgtgctgaacgttaccgtaaaaggcatcgtcaatgcaggtgtcatcgcatacgtggaaggaatccgtggatttatcccggcttccaaactttccctgaactatgtggaagatctgaacgaatacctgaacaaagagatcccggtacaggtttttgatgtcgtagaagaggacaaccgtctgatcctctccgcaagagaactgctgagagaaaaagcggatgaagagagacgcgcaaaagtatccaacgtggaagttggtcttgtgaccgagggaaccgtagaaagcctgcagccatacggcgctttcgtcaatctcggaaacggtctcaccggtctggttcacatctcccagatcagcgaaaaacggatcaaacatccgtccgcagttctggcagtcggcgataaagtaaaagtgaaagttatcgctgtcaaagacggaaaactgagtctcagcatgaaagcactgcaggatgtggctgcacaggagatcgaggaagaggtttatgaacttccggagacagaagaagctactactacacttggctctctgtttgcaaatatcaaattatcataagttctgtcaaaccacggtatttctgtaaatcttcatgacagatatctgatcgtatcatcccgtgaattcccggggaaattattttccggtggaatttacgggatttttttctcattttccaaaaaagtagttgtattttcctgataaagtgtatattataatatcataacatagttttaaaaactacataacagagtttttaatttcatttgagataggagttgatcgtatgacattcaaattaaaagatcccggaagtgcaattactcattttattggtatgatgatggctttgcttgcaaccatccctctgttggtcaaagcagcccgagaaccggactggctgcacctgatcgcattatctgtatttgctctcagtatgtttcttttatatactgcaagtaccacctaccattcactggatatcagtgcaaaggtaaaccgacggcttcagaaagtggatcatatgatgatcttcgttctgatcgcaggaagttacacaccgatctgcctgatcgctctgaaaggtcacaccggaaagctgttatgtatcctggtatggagcgtggcactggttggaatcatcgtgaaagcctgctggatcacctgcccgaagtggttttcttccgtgatctacatcggcatgggatggctgtgtgtgctggcattctcccagatctttcacgcactgtccaaaccggctttcggatggcttctcgcaggaggcattatctatacgatcggcggtattatctatgcactgaaagtgccgattttcaatgcaaagcataaaaatttcggctcccatgagattttccatctgttcgtgatgggcggaagtgcatgccactttgtgacgatgtttatgctggcgtaatatgagcgggcatgcgtgggtgtcatgcactataaaactgtaaaatcttcaaaaaccaaaaatcaatatgttgcaagaaaacactccggacatggctaagaaaagtcatatccggagtacttttatttccatttccccgatacatttttccaaacgagtcaaattttccccataaagaaagactgtacccgaactgtgaaactttcaggtacagccttattatacaacttgtctttttgatatgaaaattgttttttgttgtttttgtatttcctgatctcaggtgaattttgccgggttaaatccgggaaccgcctgttcccagctggtttttttgatcagtggaagggcaaatctggtgtaggtcatataatatcgggtgtccatgtatttgaatacatcatacgcctgttttttggtgtacgctgtttcgagtgcacccggtttgcaggtccacagtcccagataaaatccctgtgccgtctccacgctgtgatccacctgacggtgtaccacaaaggaatccaccatatcatttgcctccgcaagataatagccgtaggcaatcgctgccgcctgcacatcctgtttttcatttccgttggaaaccgaggtgaatccgcactctgataaaatgatccttcttccctctccgtaatttttctttacataatcggtaaaatacgacagatttgccatcgtaatgatcggcgaattctcgctgtcgatcacattcagcgttttattccagaaatcagactgtaattccggtgacgggtacgggtgaaacgcaatcatccagtccgggatccctttggtcttcatcagctgtgcaaaacaatccagaactgccttgcttgtatagcagttggctctgcggttatacgtccaggtgtgatcgatcgacatatagatccgtccgttggtatacgcatgtttgacactgttatacagcacctgataagcctgcgcataatattccatgtactggtcaaaactgatatttccgcagtagtgataatccttccatgcattgacttcatttccgcagacccagttcaccacacccatatccggcgccgtataccgtcttgccaggaaagagcagattgcctcaagatgttttcttccctccgtctccacggtattccagccgtacagattgtatccgtaggttcttgctcccggcaggatcagatcctgtttctgataatcccactgcaacacgataaccgctgtaatgaccatgccattgttatgaagttctttgatctgccggtccagttcatgaatatatgtcgtattcatataatatgtttttccttcatacacatattcgattccgctgccggctgccgccgaattcagcacgatgttgatcaccgcatgtttcacgccaaggcttgcagcatcatccaccattccgtccttcacctgcaatcccttcttcgtcgccgttgtcgggaaccgatagttgtacagggtatccggcagcacaaccgtactgtccacccaggcaccgttggagtttacataataattatcaatccaggtatttgccgccatgctgcaattcggataaaaataataccaggttcctccgatcacctgccagccggtcagtgctgcaccgtttggattcaggtaataccagcttccgctctgcgccagccagccggtctgcatcgctccgcttccattggcataataccaggttccatggatctgataccagccggtctgcatcgctccgctcgtcggatccaggcagtaccaggttctgtccaggcagatccatccggtatacatcgctccactgtccgtcagataataccagacatttcccagtcgcaaccagcctccggactgcatcctgccgctgccatcgaaataataccagttcccgccgatctttgaccatccgatctgcatggctccgttctgcgggttcagatagtaccaagttcctccctggttcagccatccggtatgcattgatccactgttggtcagataataccagctgccaccatgccggagccagccgttcgccatcatcgctccgcttccgtccgaataataccagacgccgtttacctgataccagccggtatgcatcgctcctgattcagcgtccaggtaataccaggttccccggttctgcttccagcctcttgcgattgctccgctcggctgaacccagtaccagtttccccggatctgtttccacccgttccccgagagcatccgtcctgcggcatccgtatagtataacgttccactgctatcctgaaaaaatccggttttcatgcttccatctgccggatccagatagtaccagcttccctggatctgtttccagccggtcaccggactgccattctcgatgtagtaccacgtttcgttttccttctgccagccatcccggatctgatagcggtttccatttccatcgtaggtgtaccggatcccgtcgacctcgaatgttcctgcctgactttttccctgtgcgtccagatagaaatagccttcttcattctgcatcggtcctgcatgattctgcggattttccagcagaccatctgcatttgcaaaataccagacagtcggatcttctccggggtgcacccaggtgtccgtgagataccttccctgttccgggtgtgcattttctttggtatcatccaactcatagaaataataatatgttcctgctgccagctttccttccgtgttctgttcggaaatgacaggcgtctcttcggtgatctccgcacttccctttgccagaaccggctgccatacctcttctccatccggatcttcttcctgcacccggtatatttttatgtaataaattccatcttccagtgcatagacacccgggctgcacagactttcctcgttgttttcatccacagaccataactgccatccaatatcgggggcgtatttccaggtgtatgatgtctgttcccggtcttcgttttccgaattattttctgtgtattctgtattctcctgtgcctgtccctctggcagattttcctgctcctcagacggtggttccgtttcctgtacctgctgtgtctcctgcccttcttctgcaacggtttctgtctgtacttcattttccgccgccacggttacgggcgtctgaaaagccagcagtgccgcaagtccaagcgccagcaggcgatgtcctctctttctcattccttcctctccctcttataagatcagcttttctttctcttttctcgacagctgtttgatctcccactcgcgccgcatggcttcctctttcgtctcaaaagcctcgtagtacgcaagcgttaccggcagacgagcccttgtgtattttgcaccttttccctcgttatgggttttcaggcgcttcgccatatcgttcgtccatccggtgtagtatgtgccgtcgctgcactttaagatatatgtataattcattctgttcacttcccgttctctattatacacatccttcctctaaaaaggaaccacaaagaacacgatctgacataatcccggtaatccgagatatcatagccgttgtcatcgttcggtgatttaaaacacgggcacagtacaacagcaaaatccgcctgtccgaagcagaacttcagacagacggatctttctattctgtcaccgtctcgatatagatcatcgggtcgatggggttgccgtcttggg

SEQ ID NO: 2449 - DNA, 22660 bp, Unknown
  gut microbiota DNA sequence
gggagaaatgtgcagtgtggcacagaaagaatttacccagtattttccgaagccgggctgggtagaacatgatgccaatgagatttggtccacccagcttggagtagcggtggaagcgatgtcaaagatcggggcatctgcggaagatatcgcagccatcggaatcaccaatcagagagaaactgctatcgtctgggatcgtcataccggggaaccggtgtaccgggcaatcgtctggcagtgccgcagaacttcagaatactgtgattctctgaaagaaaaaggactgacggaagtgttccgtaaaaaaaccggactgatcatcgatgcgtattttgccggtacaaaggtaaaatggatccttgacaatgtaccgggagcacgcaagagagcagaaaaaggagatctgttattcggaacggtggaaacgtggctgatctggaagctgacgaagggtgcggttcatgtgacggattattccaacgcatcccgaaccctgttatttaacatcaatacgctggactgggatgacgatatcttaaaagaactgaacattccaagatacctgcttccgaaaccgatgccgtcaagctgtgtatacggttatgcggatcctgcatttttcggaggaaagatcccgatcggcggggcagcgggagatcagcagtccgcactgttcggacagacctgttttgcaccgggagatgccaagaatacgtatggcacaggttgtttcctgctgatgaacaccggggaagagccggtattttcggaaaatgggctggttactacgatcgcgtggggcatcgacggaaaagtgtattatgcgctggagggatcaatcttcgtggcaggagcggcgattcagtggttgcgtgatgaactgcgggtgattgattccgcggcagattcggaatatatggcaaagaaagtaaaagatacccacggctgctatgtagtgccggcatttaccggactgggagcaccgtactgggatcagtacgccagaggaacgatcgtgggactgacacgtggtgtaaataagtatcacattatccgggcaacactggagtccatcgcgtatcaggcacacgatgtcatcaaagcgatggaagccgatgcgggcatccggctaaccggactgaaggtagatggcggagcaagtgccaacgatttcctgatgcagacgcaggcggatatgatccaggcacaggtcaaccggccatcctgcgtggagacgacagcgatgggagccgcttatctggcggggatggctgtaggatactggaaagaccaggaagaagtaaaagccaactggtccattgaccggaccttcgaaccggaaatttccgtggaagaacaggaaaaacggatgaagggatggaaaaaggcggttcgttattcgttcgactgggcgaaagacgaagactgaaaataacagcaaaagtagttgttaaaataaaacaaacaattcaataagaacttgcggagaacagagacaggcaggaaagacatccggtgatgggtgtttttcggcttgtcttttttcattttatctatcgcgtttatttacaggagggaaagattatgtatgatgtaataattataggctccggtgtcagcgggagtgctgctgcccgggaattatcccggtatgatctgaaaatcggggtactggaaaaggaagaggatgtctgctgtggaacatccaaggcgaacagcggaatcgtgcatgccggatttgatgccagcccgggtagtctgatggcaaagatgaatgtgcggggaaaccggatgatggaacagctggcgaaagatctggatattccgtttgagcgaaacggttccctggtactttgttttgctaaagaagagaggaatcgtctggaaaaactgaaagaacagggcgaggaaaacggtgtggaaggacttcaaattctttccggcgatgaagtgcgccggatggagccggatctttccgaagaagtgtatgcagccctgtatgcaccgaccggcggtatcgtgtgtccgtttgaactgaaccttgcacttgcggagaatgcctttgaaaacggagtagaattttattttgacatcgcagtggaacagattgaaaagacagaaggcggctaccggatccatgcagaagaaaaaatatacgagacccggtgtgtggtcaatgcggcgggtgtctatgcggatgtctttcacaatatggtaagtgcaaaaaagatccatatcacaccgcgaaagggagaatattatctgctggataaaaaagcgggtacaaccgtgcaccatacgattttccagacaccgggaccgtatggaaaaggcgtgctggtgacaccgaccacacatggcaatcttttagtgggaccgaccgctttggatattgaggagaaagagggaacgaacaccacaaaaggaggactggatgaagtggcacagaaggcggtgcgaagcgttccgaagctgccgcttcgccaggtgattacctcgtttgcaggactgagagcgcatgaagccggacatgaatttatcattcaggaagtggaggatgcaaaaggattttttgactgtgcgggaatcgaatcgccgggacttaccagtgcaccggcgatcggagagctggtggcagagctggtgagcgcacacctgcatgcgaagaagaaagagcattttgtggaaaaaagaaaaggacttgtggatccgaaaaaactttccagagaagagtatcaggaactgatccggaaaaatccggcttacggcaatatgatctgccggtgcgagacggtgacggaaggggaaatcgtggaagctattcaccgcccgatcccggcaaagtctcttgacggagtcaaacggagaacccgggcaggtatgggaagatgtcaggcgggcttctgttctccgaaaaccatggagattctggcaagagaatggaacgtaccgatggagacaatcacaaaagcaggaaaaaattcccggctgatcaaaggatacaataaggacagactgtaggcgaggaggagtaagatgaaggcaacatatgatattgtaattatcggcgggggaccggcaggacttgccgcagcctgtgcagcatatgaccagggggtacaggatgtcctgatcctagaacgtgacaaagagttgggaggtattctgaatcagtgcatccataacggatttggactgcatacatttcaggaagaactgaccggaccggaatatgcaaaacggtacgaggtggaaacggaaaagagaaagattccgtatcttctcgagacgatggttctggatatcagtccgaagaaagaaatcacagcactgaaccggaaagacggattatttaccattcaggcaaaggcagtgatccttgccatgggatgcagagagcgtccgagaggggcactgaatattccggggtatcgtccggcaggcatctattcggcgggaaccgcacagcggctggtcaatattgagggatatcttccgggcagagaagtcgtgatcctgggttccggggatatcgggctgatcatggcaagaaggatgacacttgaaggggcgaaagtcaaggttgtggcagaactgatgccgtattccggcggtctgaaacgaaatattgtccagtgtctggatgattttgggattccgttaaaactaagccataccgtggtggatatcaaaggaaaagaacgggtggaagcggtgacactggcacaggtggatgagaaccggaagccgattccgggaacggaagaagaatatacctgcgatacgttgttgttatcggtaggactgatcccggaaaatgaactttccgataaacttggtgtccgcctccatccggtaaccggaggtccggtggtcaatgagagtctggaaacgagtatcccgggtgtatttgcctgtggaaatgtcctgcatgtgcatgacctggtggattttgtatcgcaggaggcatctatggcgggaaattgtgcggctgcatttgtaaagacaggaagaacggaggaggcagcggaagttttagtcaaatgcggaactggtgtgcgctatacggttccggcgaagatccgtccggcatatatggaagaaaaattgacggtgaggttccgtgtgggggcggtgtaccagagggcaagtatcgtggtacgatccggtgatacggtactgttgagaaaaaaacgcccggtcatggcaccgggagaaatggagacagtatacataaaaaaagacgctctgttatctgacgagagaccggaagagataaccatcagcatagaggaggagtaaaccatggaagagaaaaaactgacctgtatctgctgccccatgggatgtcagctgcaggttacactgaaggacggacaggtggaaaaagtagaaggaaacacctgtaaaagaggagcagaatacgggaaaaaagaggtgaccaatccgacaaggatcgtgaccacgacggtgcgggtacggggaggcagcctcccggtcgtatcggtgaagacagcttcagatattccgaagagtgcagtgatggactgcatccgacagttaaaagaagtggttgtagaggctccagtgtacatcggggatgtggtgctgacagaagttgcaggaacaaaaatcgcggtaataattactaaaaatatcgaaaaactttgtgaaaaacagaacttgtgatccctcagactcttaggtaaaataaatcgtaactattcagtaggtagtatctcgcgaggcgttttggctcgtaactgtgaaggtaccgaacagttacaataaatcaaataaaagcaagaaaaggagacgggaaggaaataattatggcgataaatgaaaaaaatatgaccagcggatctcctgggaaactgatcatcacctttgccattccactgatgcttggaaacgtgttccagcaattttatacgatggcagatacgatgatcgtcggtcaggtggtcggtgtggaagctctggcagcagtgggggctgcagactggcttgtctggctggtatttggtatcatgacagggatggcgcagggcttttcaattctgatatcccagtattacggtgcaggagagaaagaaaatctgaaaagagcagtagcaaaaagctatgtactgacagcgatactttcaataattgtactggtattgagcgaagtgaccgttcaacaggtactgcagtttttacatactccggagaatgttatcggactgagtttgatgtatatacgaatggtatttgcaggaattccaatcattgcagcgtataacatttttgccgcaatcctgcgggcactgggaaacagcagatctcctctgattgccatgattgtggcagcgtttatcaatgtgggactggatcttctgtttgtggcagtgtttggctggggtgtactgggagcagcgattgccacggtgatcgcacaggggttttcagcagcgtattgtctgtcggtcctgcggcacattccggatgtgcgtctgacaagagaagattttcatcagcagccggcgatgagtctgcggcttttaaaactggcagctccgctggcaatacagaacgtgattatttctgtaggaggacttacggtacagtacgtggtgaatggatttggattcctgtttgtggcaggatttacagctgctaataagttgtacggtgtgcttgagatggcatcggtatcctatggctatgccattaccacgtatgtaggacaaaacctcggtgccaaaaaatatcgcaggatccgaaatggtgtccgcagtggcgtttacatggcactgatcacatctattgtgatatccggtgtgatggtgattaccggaagaaatatcctgtcactgtttgtatccggagaagcggggcaggtaaaacaggtattggatattgcatacaagtatctgtttataatggcaatatttctgtgggttttatatcttctgtatgtctatcgttcagccattcagggactgggcaatacactgataccgcttgccagcggtgttgtggaattctgcatgcgagtgggtgtggcgctgttgctgccgaaactgatcggtgaggatggaattttttatgcggagatcagtgcatggagcggagcggcgattttactgatcgtcagttatgtggtaattatacgaaaatataaagaataaggtttcctcttcaatttttcccggtttcgtggtatgatgaagccagttcgggattgtccgggaagtgaccggcacagagagaggaattattatgaaatgtgaagaagcactgacaaaaatagaagcgtatatcgatcataccctgagcgggcgggagctggaagaatttctggaacatgtaaaatcctgccgggagtgttatgacgaactggagacctattacattatcagtgtgggtatgcggtatctggaggaggaaaatctggaatcctataatatcccgaagatgctgcaggaagatctgcacaccagagaacggcaggtgagacggagaaatattttccggaaaacagcggtttttcttggtgtgctttttttcatagtattactggttctggtgctttcctatctgggacatctggaactgcccagacttttttgaaccgggtaatcggggaaaagtctgagaaaggaataaaacatgagtgaaaaaatcttactgattgacggacacagcattttgaaccgtgcgtattacgggctgcccaacctgacgaactgggaagggctgcataccaatgcggtgtacggatttttaaatattatgacgaaggtgttagaggaagaaaaaccggaatatctggcagttgcattcgaccttcatgcgcctacgttccgtcataaaatgtatgatgcttacaaaggaacgagaaaacctatgccggaagaactgcgggaacaggttccgctgatcaaagaggttctgacagcgatgggtgtggctattgtcacgaaggaaggatacgaggcagatgatctgctgggaaccattgccgggatggcggaaaagaaggggatggatgcaacgatcctgtcgggtgaccgggatcttctgcagcttgccaccgatcatgtactgatccggattccgaagaccaaaggcggaaagacagaggtggaagattatcacgcgaaagaagtactcgagacgtatcaggtgacgccgccgcagatcattgaactgaaagccctgatgggagataccgcggataatattccgggaatcccgggcgtgggtgaaaagacagcgacgaaaattatcgcagcttacggctcgatcgagaatgcccatgagcatctcgaggagatcaaaccaaacaaagcgaaagaatccctgcgggatcactatgatcttgcggtgctcagtaaaaaactggcaaccatcgatacagaaagtcctgtagaattttcctgggaggctgcccggatgggtaatctgtatacgccggaagcgtatgattacttcaaacggctggaattcaagaatctgttatccagatttgaccagcagaagacggaacagaaagaactaccttcctggcggatcgtagaagattttgcagaggcggaaaatatctggaaccaggcagaaaagtccgcacagaccggcgtggctgtcgtggacgggatggaaggaatccgcggtgtcgcggtggcgatggaagatcaggaagtggtgtatttcccggtggaaggcttccagaccgaaggtgtgttatgcggtcatctggagcggctttttgcgggcagttccgagattggagcctgggatgtaaaatccatccgtaaaaagatagagattccggaacggaaaggaatctttgatcttggcatcggtgcatatctgatgaatccgctgaaaagtgattacacctatgacgatgtggcaaaagaatatctgggagagcagcttctgtcgcaggaagaagtattttcaggaatgaaaaagccggagccgaaaaaagcagacaacgaacaggcggcagcctacggagcctatcaggcgtatgtggcacttcacggaaaggatgccctgaaaaaagccttacaggaagccggtatgtggaacctgtttgaagagatcgagatgcctctggtatttaccctggacgatatggaaaaagagggaatccttgtaaaaggagaagaactgaagctgtacggggaaaaactggaagtccgtatccgggagctggaggagaagatttacgaggaagccggagagacctttaatatcaattctccgaaacagttgggtgtgatcctgtttgaaaagatgcagatgccgggtggaaagaagacaaagaccggatattccaccgcggcagatgttctggacaaactggcaccggactatccgtttgttgccgacattctggaataccggcagcttacaaaattaaaatccacgtatgcagacggactggcaggctatatcggggaggatggaagaatccattccaccttcaaccagacgatcacagcaaccggaagaatcagcagtacagaaccgaacctgcagaatatcccggtgcgtatggaactgggacggctgatccgaaaagtatttgttccgagagacggttttgtattcctggatgcggattattcacagattgaacttcgtgtgctggcgcatctttccggggatgagatgctgatcaaagcgtaccgggaggcgcaggatatccacaggatgacagcttctcaggtttttcatatcccgtttgatgaggtaacgccgttacagagaagaaatgcgaaagcagtcaacttcggcatcgtctacgggatcagctctttcggactgagccaggatctgagtatcacaagaaaagaagcagccgattatatcgaaaaatattttgccacctatccgaagatcaagagttatctggacggagaagtggaaaaagcgaaagcggacggatacagccttacgatgttcggacgccgccgcccggtaccggaattaaaatcaagcaattttatgcagcgctctttcggggaacgaatcgcgatgaactctccgattcagggaacggctgcggatatcataaagattgcgatgatccgtgtcaatcaggcacttcgaagcgaacatctccgctctcgcctggtgctgcaggtacatgatgagctgctgatcgagacggcgaaagaagaagtggaagaggtatctgcgatcctggagcgtgagatgcgccaggcggcagatctgtctgttccgctggaggtggatatgcacacaggagaaaactggtatgaagcaaaataattgctgtccggaatacgggaaacggtaacgaaagaaaggggagataccagatgaaggtgataggagtaaccggcggagtaggagccggaaaaagcgaagtccttggctatatcgcagggaactggaatgcgacggttgtggaagcagatgaagtgggttatctggtcatgcggccgggaaaagcctgctacagtgccattgtagatctgttcggagcggggattttaaaggaagatgagacattggaccgggaacagatcgcaaagattgtctttgaggacaaagagatgcttgcaaagatgaacgcgatcgttcatccggcagtaaaagaatatatcagaaaagcaataaaacgggaagaagaaaatgagacagacatcttcatcgtggaagcggctttgctgattgaagataaatatgatgaaatctgtgacgaattgtggtatatttatgcggatgaagaaacccgcatggagcggttgaaacaaaacagaggatattcagaagaaaaatgccgcagtatcttcagaaaccagctcagcgaggaagaattcagcaatcactgcgattttgagatcgacaacagcggtgatttcaaagaaacaaaaaaacagattcaacaaaagatgcaaaggatgcagattgatgagactatgtagtattgcaagcggaagcagcggaaactgtatatatgtggggagcgatacaactcatcttctggtagatacgggaatcagtggaaagaaagtggagttcgggctgaattccctggatcttaccacgggggacctggatgggattctggtcacacatgaacattcggatcatatcaagggactcggtgtggtggcaagaaaatgcggggtaccgatctatgcgacagcgggaacgatccgtgccatggaagattccggaagcctcgggaaaatgccggaaggtattttccatgaagtaataccggatcaggactgcccgatcggggatctcaccgtacacccgtttcggatctctcacgatgccgccgagccggttgcctaccggatcgggcagggtaaacgggaagtcgggatcgctaccgatatgggtgtttatgatgattatatcgtggaaaacctgaagggactggatgccctgcttctggaagcaaaccacgatgtaaatatgctgcaggtaggaaaatatccctactacctgaagcggagaatcttaggggataaaggtcatttgtccaatgagacggcaggacagttgctttgtcagctgcttcatgataatatgaaacagatcctgctgggacatctgagcagagaaaacaactacgaggcgctggcttatgagaccgtctgtgcagaggtgacgatgggggataatccttataaagcaaaggatttccggattgatgtcgctcacagagatacagcatcagaagtagtagaagtgtaaaggagaagaaagatgaaaaaaacaattatcacagtagtaggaaaagatactgtaggaatcattgcaaaagtttgtacttatctggcagacaatcaggtgaatattcttgatatcacgcagacgatcctggatggctacttcaacatgatgatgatcacagatgcaagcgcatgtgaaaaaacaaccggcgagatcgcagaagaactgaacgcactgggtgaagagatcggtgtaaatatccgttgtcagcatgaggatatctttaacaagatgcatcgtatctaagaccggcgcaggagggcagaaaaatgattaatatgttcgaagtaaacgaaaccaataagatgattgagcaggaaaacctggatgtgcgtaccatcacactgggtatcagtctgttagactgtatcgacagtgatctggaaaaagtcaatcagaaggtttatgaaaagatcacaggactggcaaaaaatctggtacagaccggtgaagatatctccaaagaatacggaatcccgattgtaaataaacgaatctccgttaccccgatcgcactgatcggcggtgcagcatgtaaaacaccggaagactttgtcacactggcaaaaacactggataaagcagcaaaagaagtaggcgtaaactttatcggtggttattctgcactggtatccaaagggatgacaaaagcagatgagctgctgatccgttccatcccgcaggctcttgcagaaaccgagcgtgtctgcagctccgtaaacctgggatccacaaagaccggtatcaacatggatgctgtaaaactgatgggtgagatggttcttgccaccgcagaggctacaaaagaagacgattctctgggctgtgcaaaactggttgtattctgtaatgcaccggatgacaacccgtttatggcaggtgctttccacggtgtgacagaagcagacgcaattatcaatgtcggcgtcagcggacctggtgttgtaaattacgccctgtcaaaagtaagaggcgagaacttcgaagttctgtgtgaaaccatcaaaaagactgcattcaagatcacccgtgtcggacagctggttgcacaggaagcatccaagagactgaacgtaccgtttggtattgtagacctgtctctggcaccgactccggcaatcggagattctgttgctcagattctggaagagatcggtctggagcgtgtaggcgcaccgggaaccacagctgcacttgccatgttaaatgaccaggtgaaaaaaggtggtgttatggcatcctcctatgtcggcggcttaagcggagcatttattccggtcagcgaagatcagggaatgattgatgccgtcaatctgggagcactgtctctggaaaaactggaagccatgacctgtgtctgctcggtaggtctggacatgatcgcgatccctggagatacaccggcaactacgatttccggtatgatcgcagatgagatggcaatcggtatggtaaaccagaaaaccacagcagtccgcgtgatcccggtcatcggaaaaggtgtgggagaaaccgtagagttcggtggattactcggttatgcaccggtaatgcctgtgaatacgttccgttgcgatgatttcatcaaccgcggaggaagaattccggcgccgatccacagttttaaaaactaagaggaatatttttcaaaaaagacttgcacattgggtgcaggactgttatactgggttctgtcagatagttctttatctgacagaaccttttttggttcattccggcagttctgccatccattccattttatgaaaaacgaaacaagaaggtcaggagcagagtatttttgcgcctcaacacaggaaaagaggggtgatcgatataagaacaggataaacaacattttcaacatttccatttcaatgaaacatatcaaaaaacacatgaaaaaacacatcaaaaaacatatcaaaggagatcacaaatatgaaaaacaacacatggaaaaaatatatgggtatcactgcaatcacagctgtccttctggtaggctccgtatctgcgtactttaccgatcaggacgaaaaaaccaatacctttacggttggaaaagtcacgattgatttggaagagccggagtgggacaaaaaaccggatgaaaacgggaacgacatcccggacgaagcggaaaacatgacaccgaatcagaccatcgagaaagatccgcaggtaaaaaataccggaacgaacgatgcgtttgtttatatgaccgtggaagttccgtgcaaaaagatcgttacggtaaacaatgacggcacaagaaatccggaagcagtgagagaactgtatacctatcagacagacagctcctggaaattactgggatctgtggatgtcacagatgagacaggagaaaaaacagcagtcaaacatctgtatgcctatgccggagcacagggaacctgtaccgtggtaaaaccacaggaaaccacaaaaaatctgttccgcgaagttacgtttgtcaatgcaatggaaggtcagggactcgaaaacggcatgtataagatcggaatcaaagcatttggtatccagacaacagatctgaacggaggaaccaataatgcggtagaaatctggaagatcatttccaatcagagagaactggcagaaagtttttcatgatagaaaggaacgggaggaatgaaaagagtcatgactgttacaggactcctgtctgcgctgctgatgatgctgctgctggtcggtggacgaaccatatacggctggtttaccgaccagagccggcaggataatacgctttctgtcggtatgaatgaagtggagatagaagaggaatttccggatccggaactgaaaccgggggaaaagatcaaaaaagaagtgacgtttaccaataccggacggggtccgatgtatgtgagagcctgctgtctgttcagcagtaaagaggcagaagaaggagccagacttctgatgggaagcagccggtgggaacttgcagaagacgggtattactattataccgatatcgtaaatcccaaagaacgtacagaggtgcttctgtatggactgacttgggagagcgaggaagaaatcacggattttgatctgaccgtctataccgaaagcgtacaggcagcaggacatgaaaacagcagagaggcatttgcacatctgatggaacgggaagaagggcaggaaaaatgaaaaagacaggaaaaatcggcagtatcttgtgtttgcttgcgcttctcgggctgacaggaatctatgcactcccgaaagtatatgttctgtatcaggcaaataccggaaaagtggatatctgcctgaaagaatatatgctggaggaaggaaaagaagtaccctggaaaaacggaaaagatgtactgcccggtggttttgtatcaaagattccacgaatccgaaatgacggagtggaatgttatgtgagggcaacggtgtctttttcctcacagaaagagtcagaaaaaccactgtcactggaaaatctggaaggaatcagcagtgactgggtacgggatggtgattacttctattataagcatacggtaaaaccgggagaaaaggtggagctctttcagggaatccgaatcccatgggaatggaaaacaccggatgaagataatgtgtggaaagcctgtgtccgtgcagaggcagtacaggcagaatatttttcaccggattttaccggggaagatccgtgggggatgaaggtgtacacctttccgattcagtatgcaccggagggagacatacaggaacagacggcagacacagaggaagtggaactgttacttgccgagcaggtgcagggatttgcggtagaacaggaaggatgcatgaaaacactcgaaacctttgttccgggaaaaagccagacgggaagtatccggctgaaaaatacgaccgaaaaagaacgggaagtatttttcagagcggaaacacaggaacagagtgtattgctggaaaagatggaactgaaggtggaactgcttgaaaaagaagaaaaccggattctgtatcagggaagtgcggcagcatgtacaccaaaagaactgcaatccctgggaaaacttgcaccacaggaggaaaaacagctacggtttacgttttcccttgcgaaggacgcggataatacttatgcgctgcagaaaggaaaaataaagttctggtttaccacaggagaagaagaaaccggaaaaatagcaactgcagtcagcaccggagacccgcagaaaccgatcggttatctggtgacggcagtcggtgcggcaattgttttacttttcatgctgcttggcagaaagcggccggtaaggaagtgatgagcagatgagaaaaatgatcagatatgcagagtatggactgcggatccttctgacattgacaggaattgcaggggttctgctgtttatttttccacgggtggcgggctgtacaccgagaattgttgtgagtggatcgatggaaccggcagttccggtgggaagcattacctatacctgcccgaatattccgccggaacagatagaaaccggagatgtcattgcatatgaactgaaaaacgggattgcggtacttcaccgggtggtaaaaaaggatgcagagaaagaaatctgggtgacgcagggagatgccaatgagacagaagatcccgcagccgtatcgtacgggcagtatcttggaaaaatggtatttcatgtgccgtatgcggggtatgtggcgaactggctgcaaaaaaagaagattctgtttctggcagtggcagcagctgttttactgctgatcgtgcacccgacaggagaagaaaggagacagatcacttgagaaggtggataaaaagcaaacatacggtttcggggctggcatttggaatctttctgtctgctctggctctggcaggtggaatgaaaatttacggagccggaaccgggatgcaggaacaggcggaagtatatcaggaagaagaactggaagaaaaggaaacaaacgaagaagccgcagagcagcaggaggaagaaggcatccagttttatctgaaacaacagacatcttcggatatagatacctattcttttgacaacagtgcgacacttcctgtatccaatgtccgttatgacaagtttttgtcaaaaaccggaggatcgggaactacatcaacaccgaacatgggaatgggaatcaagtacatcgaaggcgatgataaaaatgtagacggcgggggaaagtggcgctatgtctattgtgtggagtttaagaaggactgtccgatcggtggtcttggaatggaatttatcggatggaataaccggaaaatagcctatgcgatgtactacggtgcgctttattacgggtatccgtgtcggtttggtccgtattctaccggggactggcagatggattattttgtcacgcaggtggcaatccatatcctgaacggagagtatacccttgcagcggcaagaaacggaatgaaccagagcaatgcgacgacagcggaaaagaacctcgcgtatgacaggattgaaaagatcgtaaacggggcaaataacagcaataattacggaggatttaccggggacggctggctgaatatggatcaggcaaagttttcactgaccggttacagcgacagctggcagctgatcaatggaaattatctgtccggtggaacgtttcacggtgtatttaccagctattacggatatgatttccgggaacagctgaccggatatgagatatcggttccgcagggtgcttatgtcgagaaaagcggaaaggagacgtacagtgatttccgggtgggtataccggaaaaacagtacaaacgctggcagctgaccgggaaaaagataccggtcacggtaaccgcaagtattccccggtactggggagcgggaatctaccgatgcaaggctgcatccaattttcaggacgtatgtctgctgacatgggatggctccggtggaaccaccaagatggaacagacggcaaatctgaatatcccacaggttacggcagatctgacgatttataaaaaagaccagaatgacggaagcagtctgaaaggtgcaaaattttcactatggggatatgagggcaatgcgtacagtaaaaagatcggagaatttgaagatatgcaggatggcagctatcagctgaaaaatattgcatataccgatacggaagacggatggtttctgatccgggaagaggagccgcccgaacattatagcgcgaagtatcagctgaaaaacagcaaagatgaggaagaatatcaaaaatacggaggacgccaggtacgaatgaatgagaatggattttattctccatggatcgaggagccggaggttttctgcgatgaaaaagcagcttccgggatgcatgtggcggtaaagaaatacgacggcaaaacaaaagaagtgcttccggatgcggagtttcaggtgtttccctggatacaggaaaacgggacatacagtaccgtcccggaacagacactgatattcaacagcgaaagccggcagtatgagacagtgcagatgctaaaggccgatggaaagaatcaggggaaatttctgattcgggaaacaaaagtaccggcgcattacagcggaagatggcagcaggagattacggtaacagaagcaggaacaacagatcttgtgctggaagcatacaattatccggagcggaagttcacgatctggaaaaaaatcagggcagacgaggtggtatgggatcacggtacgccgactttcttttttcggatctcgggaaaagatctggatggcatccagcgctggtatcagtgtatgattcattttacgaaagaatccgtgaaggagcaggaatatctggttggaaaagcagaagtgaacggcattccggcaggacagtatcaggtggaagaacttccgttgacggcacggtatattctgacggatgcatcgtcctcagatccgaatgtgaccgtaaaaaatacattgctggataccgtaaacggaattcagaaaatccgatcggagattacggcggatttgacactggaagacggaagtgtgatatttgagaaccggaaggtattttttgatgagtactctcacgatgatgtggaagtcaatcatctgaaagcatcggaggagaaaaacggaaaaaaacagtaaaaaactgccaataaccggggaaacagttatcggcagaaaatgagagctctgtatcagggaagaatgataagaggtttctgatattcatgcacaaacggggtgtgatatttttcacaccagacactctcgtaaagattggaaacctccacattttttgcaaaaacagcagcggattcgtcggacaacagggaagatgcatccgctgcctttgtaatgaacgggatggaactgtgctttttgagtgcggagagtaccggtgatgcctgacggcgaaaaccgagcaggcgggcgtaggaaagaggcggcacatcggaaatctgcagcagacagtgcatcagcatccggcagattcggctgtaggtaagttcccgcgtctttaaaagtgccgcatattgtccccagctctcataagaacctctggtgtgaaaaagacgctgcacaaagtccggtgtgacatcctgataagaagccagctgtgctttgtctgtcgaaaacagaagccagcgaagataaggggaaaaatcttcctcatccagaaactgcgggcaggagaaagtctgcgaaagaagcgcagatacggcgggcggaaaacaggaagatacagtagaatctgacatcttgcagtccgcagatttccacagggcacggatagcggaagcagaaggaaactgttcttttaatgattcctcgtgataggcgtttccttcgcgtttcaccgtaaacggccggatcggactgttccgtcggcagagtgccttacagtattccacaccgagaatattattcggcgtctgcaaaaaggttccggtatctgtatcggtgtccgaaagcagttcctgaagggcaagactgcgcgctttggggaaggattcacctttcttcagatattcttttaaaagattctgatattccggcgtctcggtggcaagaaaagctccgagctgtaaaaaaggttcgatgtctccgctttcgcttccaaaagaaagaacatccacacagccgagtccgtcaagcagtccgacggcactctgcgcaaagaattccgcactctcgcaggcatgggttgccggcagttcgaagaccaggtccgcaccgccgagaagtgccatccgggtgcgcagatgcttggaatacaaggcgggtgctccccgctgtacaaaatctccgctcatgacaacgacgatataatcggctcctgtaagttctcttgttttctgtatatgataggcatgtcctgtgtgaaacggattatattccgcgatgattccggcaattttcatggttgcacctcaaaaaatacataaattattttctcattctaacagggaaaatgcagaaaaacaaggctttccggagaaatagagaatatatgttaaaaaattaactaaccttgtcactgtaaaggaaaaagagtataattttatgtagtgagcaaaataggaaaggagtcatgaaatcatgggatttattgacacaatcaaagcaagagcaaaagctgataaaaaagtaattgtacttccggaaaccgaagacagaagaacatatgaagcaactgcacagatcctgaaagaaggaatcgcagatgttgttctggttggtagcgaagaagcaatcaaaaaaggcagtgaaggactggatatttccggtgcaaagatcgtagatcctgctacatccgaaaaaacacagggatatattgacaaactggtagaactgagaagcaaaaaaggtatgacaccggaacaggcaaaagagatcctgttaaaccagtatctgtactacggtgttatgatggttaagatgggcgatgcagacggaatggtatccggtgcatgccattctaccgcagatacactgagaccgtgtctgcagatcctgaaaacaaaaccgggaacaaaactggtatccgcattcttcctgatggtagttccggattgcgaatatggcgcaaacggtactttcgtatttgcagattccggactgaaccagaacccgaatccggaagaactggcagctatcgcagcttcctctgcagaatccttcaaactgctggttgaagaagaacctgtagtagctatgctgtcccattctaccaaaggcagtgcaaaacatgccgatgtagataaagttgtagaagctacaagaatcgcaaaagaacagaatccggatctgaaactggacggagaattccagctggatgctgctatcgtaccgagcgttggtgcttccaaagctccgggaagtgaagtagcaggaaaagcaaacactctgatcttccctgacctggatgcaggaaacatcggatacaaactggtacagagactggcaaaagcagaagcatacggacctgtaacacagggtatcgcaaaacctgtaaacgacctgtcccgtggatgctcagcagaagatatcgttggtgttgttgcaatcacagcagtacagtgccaggctgaataaaacagatacataaaagtatgtttaagtggaggaagaaaacatgaacgtattagtaatcaactgcggaagttcatctctgaaatatcagctgatcaactccgatacagaagaagttctggcaaaaggtctctgtgagagaatcggaatcgacggaagactggtataccagaaagcaggatgcgacaaagaaatcacagaagcttccatgccgacacataaagaagccatccagatggttctggatgccctgaccaatgataaaacaggtgcaatcgcaagcctgaaagaagtaaatgcaatcggacaccgtgtcgtacacggcggagaaaaatttgcttcttccgtagttatcacagacgaagtaatccaggctgtagaagagtgtaatgatctggcacctttgcacaacccggcaaacctgatcggtatccgtgtatgcggcgaactgatgccaggtgtaccgcaggtagcagtatttgataccgctttccatcagaccatgcctgcaaaagcatatctgtacggtctgccactggaatactacaaaaactacaaagtaagaagatacggtttccatggtacaagccacagctttgtatccaaacgtgccgtagaattcctgggactgaacccggaagactccaaagtaatcgtttgccatctgggtaacggatcttctatcagtgccgtagtaaacggaaaatgtgtagataccaccatgggtctgactccactggaaggtgttgttatgggaacccgttccggtaacatcgatccggctatcatggaattcatcgcaaagaaagaaaacctggatatctcccagataatgaatgtactgaataaaaaatccggtctgttcggtctgtccggcggtctgtcaagtgacttccgtgatctgaacgaagcagcagaaggcggaaaccaggatgcagcaaatgcaatcgatgttctggcatacggtatcgcaaaattcgttggcggctatgtagcagctatgaacggtgtagatgcgatcgtatttaccgcaggtatcggtgagaatgcaattccggtacgtgaaaaagtagtaagctatctgggttacctgggagttacactggacaaagatgcaaacggacacagaggagaagaaatcgtaatttctactccggattccaaagtaaaagttgcagtaatcccgacaaacgaagaactggctatctgccgtgaaacagtagctctggtataaaaacagagaaaaactgtaagattatatataaaagaaagtccccttttgactgtaagccgaaggggattttcttcccactgaaagacaggacaatctataattattgtaaaaatatttcagaaatattgcaggttgtcaggaaaaaacagttgacaaaaagaaaatgcttctgtataattggagaagtgtggttaggagtgaattatgctgattgatttatccaaattactgactcatgaaggaaagcaacaacaggtagaaatattgccgtcaggagatactttttcctgtgaactgggtgagttttcttatggagagaacgagccggtgatgctgacgatcaagcacaaagagaatcagattctgagtatccgtgcggaaggtcaggttgctgtatggattccatgttccagatgtctggagccggtgctggtatcatgtccggtcgattatgacgaggagattgatatgaagctgtccgaggaagaacggattgaggcattggatgaaagcagttttatccagaacaaagagctggataccgataagctgttgcataatgaaatactaatcaattggccaatgcgggtactctgcaaagaggactgtaaaggaatctgtagccgttgtggagcaaatctaaatcagggatcctgtgattgcgatacggcagatttagatcccagaatggctgttatcagtgatatatttaagaattttaaggaggtgtaactgatgtccatctgtccaaagaataaaacatccaaagccagaagagataaaagaagagcaaactggaaaatggctgctccgaacctggtaaaatgcagcaaatgtggtgcgctgatgatgcctcacagagtatgcaaagcttgtggttcctacaacaagagagaaatcgtttctcaggaagcttaattcaagcaattagaaagcagatccgtatgggtctgctttttttgtatgggaaacaggagacaatttcttccacagcgttctagtcagggcacagcgatggaaggataatgga

SEQ ID NO: 2450 - DNA, 764 bp, Unknown
  gut microbiota DNA sequence
ttttacgagcctttcaactcttacggatgaatcttaatcacaccttttacaatgtctgccttattatgcacactctcatccatcgctctctgtacatcatccagatcgtaaatattcgtaacgattccttttacattcactttaccggaagctaccgcatcgattgcgattggatagatatggcggtaacggaagaccgttttgaaagtcagttctttgtcgagaaccaggctcatcggcagggtcatctcaccgctcttgctgtagccgaccagaacgatcgtggaacccttcttcgccatatggatcgcctgtctggtggtgatctctgtaccggcggtctcgatgatcaggtccataccggccccgccggtcagttcctgtgctttggcgatcacatcctctttttcgccgttgagcactccggttgcgcccagttccagggctttttccagacgtttttccatgatatctaccacataaacctcagatactccacgggctttcagtgccatcatggaaaccagaccgatacatccggcacccatcaccactgctttctgtcccagatgagcatctccctggatcgctgcgtggaaaccgacagccagaggttcgatcagcgcaccctccagtgtgcttacattctccgggagtttgaaacagagatctgcctcatgagcaacatactcctgaaatacaccatctaccggtggagttgcgaaaaatacgacgtccggacagagattgtatttgccctgttt

SEQ ID NO: 2451 - DNA, 409 bp, Unknown
  gut microbiota DNA sequence
tcaactggaacaatattatgtttacactggcacttgtgcttgctatgatctgggtgatcgatgtactgaaagaaaagatggcgtcactaccgaaggctttgtggtatttcgtatcatttctcattgtagcggtgttgtgcattgtagcaatgaatgcaagtctggactacgaacatcatgcggtactgatcggttatttctgttatatttttcatgagagatgggcacttggaattccgttttgttacatctctatgtttaaagagccgtgggctctgcttggatttggactgacacttacttacaatggagagcgtggaaaacagaataagttagtaaattatcttttctatccggtgcatttgctgattttaggaatcataagaatgtatcttggaatttaaaaaga

SEQ ID NO: 2452 - DNA, 3685 bp, Unknown
  gut microbiota DNA sequence
ggcataccggactgcccggctgcagattgccgcttacatccagaagttttgctccctcttcagtcaatgttccggcatcctctcctgccgccagcacctgtggcaggatctcccgcagtttccacggatatcctttttcttttatcagttcgtcgaactgttctaccattttccggttgtagtctaccgtctcggaatcaatcgggaacataccggaagcatcgcccacaccgagcactttctttccggtcagtctccagtgaatgtagcctgccagtgtggtgaaaaatgtaatatctttcacatgctcttcgccgtttaaaattgcctgatacagatgcgcgatgctccagcgctgcggaatctgctgtccgaataacggggtcagcacatccgttgctttctctgtgatattgtttctccaggtacggaacggaaccagaagattatcctctttgccaaatggcatgtagccgtgcatcatcgcactgaatcccatggaaccgatcctggtcagtgtctctccgtactgttctttgacatcttttgccagttcctgataactggtctgcagtcctttccagatatcttccagactgtaggtccagataccgtctgccagctgattttcccactcatagcttccggaagcgatcggtgcgtgattttttccgatcagtaccgctttgattcttgtggagccaaattctattcccaggctggtttcccccgcctggatctctttaatgatctgatttttctctgtcatttttctacctctagcgatttaacatataatacatggaattccatttcagttcgctcttgaactgtctgatttttgtatctttatcgatatatacagcctcgatgcccattgcttctgcccagtcacccatctgttctgcggtgatatcgtaggagaatgcggtatggtgtgcgccgcctgcgaggatccatgcctctgctccggttgccagatccggctgtggagtccagaatgcggttgctaccggaagtttcggcatctctttttctgtcttcttgcagtccacatcgttgatgatcaggcggaaacgattgccgagatctaccagtgaggtcgcgattgccggacctgtttttgaggtaaataccagtcttgccggatcttctctgtcacccatggacagcggatttactttgatggagatcggaccgtccgcaatggtcgggcaaacttccagcatatgcgcttccagaacgccttcttttccggggatcaggttgtaggtataatcttccatgaaggaagttccttttgcatctttctttccggcggtcatgatcttcatcagacgaaccatggctgcagtcttccagtcaccttctccgccgaatccgtaacctttttccatcagtctctggattgccagtcccggcagctgctgcagggcaccaagatcaccgaaatgcgtaacgatcgcctgataattcttctcttccaggaatctctcgaaaccgatctcgatctgtgcctgtacggctacatgttttttgaattcttccggatcacgtccctctaacaggatctggtatttgctgtaatattcttctaccagtgcatcgacatcgccttttcctactgactgtacagcttctgcgatctcgttgaccggataggcatctacttcccatccaaatttgatctgtgcttctactttatcaccttcagtaacagctacgtttctcatgttatctgcgatacgcatgacgcggatatggctgctttccataacaccgactgcggtgcgcatccaggaagcgatcttttcctgtacttctttcgttgcccagtgtccgactaccactttgcggaccatacccatgcgggatacgatatgtccaaattcacggtcgccgtgtgcagactggttctcgttcataaaatccatgtcgatggtatcgtatggaatctcttcgttgaactgggtatgcagatgtagcagcggtttccggtattcctgcagtcccaggatccaggattttgccggggagaaggtatgcatccaggtgatcacgccggcacattcttcgtctgcatttgcctcattaaaggttttacggatgacttcgtttgtgatcagggttggtttccataccacttcgtatggcaggatcccggatttattcagttcgtttacgataatttgggaatgttctgctactttctgcaaacactcatctccgtacagatcctgtgaaccggttgcaaaccagaacttgtaattttttgttgttttcatgtaagaaatttctccttattcttttatgttgttcctgtcttcttgtttttccatatccaccagacagaagattcttctccgtctgctgattttcttatttttctgtcattttcgagccatacacgacttccggatcactaactccggttcgatcaggcggcggacttttgactcttccggtggaatgccgtgaagcagttccagcaataattctgctgccatctccccgagtttttcctgtggatgggaaaccgtggtcagttccaccggaccggttcttgcgatcatcgaatcgtcgtatccggtcacagacagatcttccggcacttttttcccgatccgctccagcatccggatcacttccaccgcgatctggtcattatagcagactactgcgtcaatcggaagttctgcctccagcatcatctgtaccatcaccgccggttttactttccgatcctcggtgtgaaaccacaccaccagttccggctgatacggcattcctgcttcctgtaaggcttttacatatcctttatggcgttctgcaccctggctgtcatctgccttgaaaacaccggcaatctgtcgatgtcccgtatcgatcagatattttgtcagcagatacgcacctttcgcatcatcgagaaggatcgtcggtttgtttttcatctgcgggtaacttccctgaataaagacatacggaatacccatccggtcaagttgttcgtacaggggcatatttctgcacaaaatctgacttttgctcggctcgatgatcagtccgtccacatctttgttcaagatatcttcgagacactgggcttctttctgccggctgtttccagtatttttcagtatgatactgtacccctgctccgtcagcacccggtccatgccctggatcagacgtggaaaaatataatcggaaatataggttgtgatcactgcgatattttttgaatttttccggtgtgccatccggtcagagcagaaggttcctttgccatgttccgtcgtgatatacccgtcatttgccagaatcgccagtgctttccggaccgtatgacggctgatcccatattcctgtgccagttcattctccgacggcagcttctcaccgggtcggatttcgccggaaaggatcttatttttcagttcttccatcagggacacatatttttttcctttctccgtaatacacacctcctgcctgtctgaagttctgtttcctgtacccttatcttacaacttgtatgcacaactttacaagttgtatttgtgcttttctttttaaattctcttgatttttattgtctgatatgctatattctgacctgttgcaaagcccacaaaaataaggtcttacagggctgaccgccgattcccggcgtaggacatat

SEQ ID NO: 2453 - DNA, 66878 bp, Unknown
  gut microbiota DNA sequence
tcactgttcagttatcaaagatcatttttcgcattgccgtttgtctcaaacagctttgctattatatcatgttgttttctacttgtcaagaagtttttcaactttttttgaagttgtttttgtttctctcttgcagcaactctgatatcttatcacatccaaccggctattgtcaagaactttttttatttctttttgacagctttgtgatctctgcgagatctctcagacgcaactctgataggataccaccgctggcaggatttgtcaataagttttttgaatttttcttataatttatttattcgcgttatttaccatatttcagacagctattcttatagaagaaacagaccggcaggacgcttcctatacttcctgccggtctgtttcttctatactatatataacacggtgtattagttaccgcactcaatactgatctcgttaaacttctccaggatcgcatcgacgttcatattcttcttttcgtctccttccagatccatcaccgcatgaccctgatgcatcatcagcagacggtctccatactctaccgcatagcgaaggttatgggtaaccataattgttgtcagctgtttttcccgcacaaccttatcggtgagttccatgatcagttctgctgtttttggatccagcgccgctgtatgttcatccagaatcaggaaatcgatcggtgtcatcgtggacatcagaagagacattgcctgtctctgtccgccggataaggagccaacctttacttgaagcttatcttccagccccagattcagctgacgcaactgttcctgatagaacgggattctgctcttattggttcccatgctcagaccgaagaattttcccttgtggtctgccatggacatattttccagaatggtcatattcgggcaggttcccatcgccgggttctggtatacgcgtccgattctgcgcagacggcggtattctttttctttcgtgatatcctgtccctcgatgaggatctttccactgtccgggttgatacttccacatacaatatttaacatggaagtttttccggaaccattgcttcccactacggatacgaactgtccttttttaatagaaaggttaaaatcctcgaacaggcacatttcatttaccgtacccggattataatatttatgaatatgttgaagttcaagcattttttcctcctttctgaccggctgccatgcctttggctttctgttttctttccatactgatgacaagaatcaccaggaacagtacggccgtgatcagtttcatggactgtgggtcaaagaaacgaatggcgattgccacgcatcctttatagagaatcgagccgatgataacggctgttgttgtttttacaaatgtcagttttttaaacaggctggttccgatgataacactggcaagaccaataaccatggatccggtacctgtagagatatcaaatactttctgttcctgtgcaaatacacagccggataaggctaccagtccgttggagatggcaaggccgagaattttgacatttcccttatcttttgccagagccgttaccagattgtcgttatctcctaccgcgcgcagaagataaccggatttggtcttcagatagaaatccagcaggaattttgcgatcagaacaacaagtaagatcagaacgatcttcatgtatcccggaatcgtctctccgaagatggattccagcatactgtttttaaacatagtttcctgggaaaacaggggaacgttattggttcccgctattttcaggtttacggtgtacagtgcggtcatcatgatgattccggataacaggtcacggactttgcattttacatggatcagaccggtacagatacctgccagaacgccgaccagaaatgcaatcgggatggtcaggtaaggattgaccccatgagtgatcagtgctgctgtcacagccgctcccagagggaaacttccgtctacggtcagatccggaaaatccagaatcttatatgttatataaatacccagagtcaggatgccgtagatcagtccctgctccacaatcgtcatgataaaatccatcacatttttcctccgcttttatttagccttcggaaatctcggagaatgtttccactgcacggtcgttcatgctgtccggaacggtgattccaagattttctgctactttttcatttacatacaggttactttctgtcagcagctggtattccatatcttctgcttttgcttctcctttgaggatctttgctgccatcttaccggtatcttttccaaggctgatataatcgattccttctgctgccaggcatccgattttgacctgttcaatctcacttccgaataccggaatacctttttcatttgcctgatccaggattgccggaagagaacttactacggtgttgtctgtcaggttagtcaggcagtctactttggtcagcagatctgcggttgcaagagaaatctcggagctgctggtgatacctgctgtctccagggtaaatccatactggtctgccagttcttcgtattgactgatgctgtatacggagtttgcttcactggtggtgtaaaggattccgatggtttttgcatccggaaggatttcacggatcatctttaactgtgcttctaccggaagctgatcgctggttccggtaacagcgcctaccggcatcttgtcttcggttgccagctctgcctctaccgggttggtaactgcggtgtatacaaccggaattcctttttccattgctgcgttgtaagccgcctgtgcgcttggtgttgcgatcgcgcagatcagatccacgttatctgtcacaaagctctgtgcgatctgggatgcggttcccatatctgcatctgcattgtttacttttacggtcaggttctttccttcttcgatgccttcttctttcagaccttccaggaagccttcacggcagttatccagagatccatgctctgcaaactgagaaataccgatcgtgtagctctctccgtctgtagcttctgttgcatctgtgctttctgcatcatcggtgctgtctgttgtttcggttgactctgctgtgtctgtggtcttcgcgttgcttcctccgcaccctgccatagatgctaccattgctgctcctaagattactgccaatactttcttcttcataatttctttctccttttcttttccttttttgatggttcaaaagcaaaagagatggaattttgtttttataaaaacaaaaaccgcctcaagcatttagcttgagacggtaataaaattctttattatcgcggtaccactcaaattgacgaatcgtccactttacacgtactatcatacgttcctcattgataacgggtttggttcccggcagtgcctactcttttcttacaagatctttatttcgggctgccctcgaaagtccattcagctataaaatccatgcgacaatcacaccacctgccactctctgaaatttcttttaaagcttactcctctttctcatcggttttgcttttgatggtcttattttatgctctattctttcatttgtcaacactttagcacgaaaaagttttattttatcactcgattgccaccgggcgcatcacagaagacaactgctgccgatattgatccgccttttcctgattcccctgttcttttcgtaccagcttcgtaattcccggatactgccccggaaaactctccagcatgatatcatctccatagatcaggtaaacgtccccatcctgcatgtctgcctctgtcatcttctttccgttctcatctgtgagtttatccggtatcgttccagagaaaatcgtgtcggtatccagatctgcaaaataccagctgccgtcatccgcctgaaaatacaccgccgtcatcggcttttccccgcatcccgccaggcagaacgtaacaaggactgccagcatcatgatccattttttcattgcttcacctcctgtaacaaaaaaggtaactgttcgattgatttttccagttacccacattctaccatattttcttcttcttttgtctcataatccgagacttttgtctttcgatttcctttcttttatctttctgtttacaagagccagtatccagctttgtttttcctcttcgctctttaaatggcgaagttctcttttcctccgcatcgcttcttcccagatctcatcccatatctgacggcgttcttcaactgtcaggtcacaggatgatctgtgcaagatttccaacgcctgttcgctatatctctgataaagctcatatactttccggctgtcgaaaatcattctgtcttcccactcatttatctttattccctttcggaactgttatcatcatctgtaaattccactacttcttcgggattacaatctaaagctttgcagattttctctaacgtatataatgtcatatttccatttttacgcaaggtatccaacgttctgttatcgattccccgccgaagcagttcgtactgtgaaatgcactttttcttcatcgtcttccgcacgggcgcatagcttataattgtaatcaccacctttaccgtacagtgttactcaccgttttttcggtcctcactgtctgtgttcttccaattatatttcccctgtttgacaattcatattgtgcatatcttcacaattgcaaaagtaatgtatttctttgcttttctggctatttttattacttttaatagtattttgtatttttgaagtattttatgtaacgttttatcgtgaaaaagaggtctgcaaattcgaatcttcttctcctttgcagacctctttttcagatacttagaattctacttttacagctccctgcggacggatgtgcataacatatgcggatccctctcccagcgctttgttgatatattttgtaaatccttcggtttcttcttttggaaggaatgcggcgataacaccggcaaatccgcctccatggacacggcatacgccacgaccgatcttatccagatacagtttggtcagagccagtgcaacagtaatggactgttcgtccggagtctcgttgcagtagcagttctgcagccatttccaggaagaatcaccggactctgtgattttgttaaagaaggtggcgaaatctttcttttccagtgcttctacttctgcatccacacgtttgttttcttcaaagaagtggaatgcacgcagaaccgcacggtcaccggcgaattcacgaatagcttttacattctcaatcacatcatcttccttgcactgttccagaacttcttttccgaagtattctgctacttttttcatttcattcggaactgcagaatactctgcactcaaatctgcatgaccttttccggtgttgatgataaccagatcatggcccatctcatcaaaatcgcatttgatctcacggatggccggattttcgatatctgcaaagtcgatggtgatcataccgccaacggcacatgccagctgatccagaagaccggaacctttcagccagtatttattttctgcatactgtcctgcttttgcataagtgacaacgtcgatctttccttcgttaaacaggtaatctacgataacacataccagcatctcaaaagatgcggaagagcttacccctgccccaccgattacgttggaagtcacataagcgtcaaatccttctactttgcatcctttttccagcagtcctgcaaagattccttttaacagcggttcggttcctgttgttttttctgtcggagccaggtcatccagatcgatcaccagatgctggttatatgtttcactgatcaggtttacggtatgagttccgttcggtgcagcggctgccacacagtccagatgtacgcttcctgccaggacttttccgtggttatgatccgtatggtttccaccaatctctgttcttcccggtgctgagaagaattcaaaggctttatctccgaattctttggcaaatccatccgctaccagctggtatcttgctgcattttcctctactctgttctctccgtacatctgtttcaacagtgcaactacatgttcactttttactgcttctgctacatttgctgttttcatgtttcttctccttttttattttcacatactgatattgactatctgctaattatcattataatgagaatcatatagcatcacaataactatattagcttattttataaatatattgaggttttttcatgcaattacagttagacaacaacaaaaaggaattaaagtctcacggaacctatgctttcccggtcaacgtaagctacgaacagctttcccgctatgaaagaaagtcttttctctggcactggcataaagaaattgagctgacgattctccttcagggcgagatgcaatatcaggtcaacgataccatctatcacctgcaggccggtgaggggcttttctgcaacagcaaccgtctgcataccggttcttcctgtcatgattccgattgtatctatatttccacaacctttcatccccgctttctttacggatatgaagacagcgtgatccagaataaatatctgaacactattacaaagcatcccggactgcatagtctggcattttctcctgacattccctggcaaaaggaggtgttggatgaactgtctgccatctggatgctttccaaacagccctccgccacttatgagatggaattgcaatggcgaatcacccatatctggatgtttctatggaaccacctttcccatcagactagcagttccggaaacagtgaatctaagcataccgatcgtctgaaaaatattctgatgtacattcaggaacattacgcggaaaaaatcactctggctgatattgctgcaactgcaaatatctgtcagagtgagtgttgtcgctttttcaaaaaacatatgaatgagtctttatttgattatcttctttccttccggattgagaaaagccttcctctgttggttgaccagcagctgtctattactgaaatcagtaatctatgcgggttttccagttcttcttattataccaaagtatttcgggaacatatgggatgcacaccaaccgcataccaggtcggacacttcgtctgatcagacgacatcagcggaacaaacaataccgtaacacctgaaagatccgtatctatgccgcaactatcatccaggacagcaacacagatacggatctgttttattttttcaggtcatctttaataatgttttctacttctttggcttcctcgcggatattttgaatattcttgcgaatctcctgctcttcttccaggatccggggatgttcttccagttcttctttgataaacatcaggaggaatcccacgaaaagcaatccacaggaaacccagatggttcgttcatgtagcaggaggatcagatggcctccgacagcggcacctactgcaaacattccgatgattccaagataatgaccggctttgtacagcttttctttatcctttgtctttccatagatacacagagattccatgccgcttcggatattgccgatacacatggtgctggcaaatgcatagccattgactttacggaaggtctgcacctgcatggcacaggcaaaggataccatggcattggccagaaggttgcatgctgttggaaggaatccgaccacaagcagtaaaagcatttccatcagtaaaaccaactgtctccagtgaatcctctgtacatttttatatttttgccggataccttctgccgctacgattcccatggcaaaaaatcccaatgggatcaggtaatgaatcaccgtggaccattttcgttccacaaggctctgacttaagagcacaatgtttcctgtctgtgcattggcaaatacctcgcctctgcatatataggtataggcatcctgcaaaccgccggatatagataaaaaagctgctgtcagaaaggattctgacatctgtcttcgtgaattttgtttcaatgattttccctcatttctacacaactttctgtcttattctcccagttgttttatttttccagcggtaaagtatactctgtcaaaaacggtatttcaagttttttattttatacattactgttttttccagcattgatcctgggtctggatctcttttccttccttcgccgcttcatccatcatcagaaacagataggtgtcctgcagtgcctcttccagcggatacacttcctttcctgtctctacatatgttttcatgccttccatcatctgggcaacagcgatttcctcgtctgtcagacgaagatctctgtctgcatatggatttctatacagaatctctccgttcagcctcagacttctcattccgtagccttccaggttagaatactgtcccagttcgtctctctggatggttccctggaccggataaccgtcctgaccaagccaggctgcctgctgatcatgaacttctccgcaatctccctgaagtgtcagatgacgggtacggaaatagttaaaatactgctcaccggcaaaatcaaagaatccaacctttccatccgggaagacaaattctgcacgttttcttgtatccacgatggttttttcccccttatgaaggccctctcttccgcagtgataattcaccggaaaatcataggttctggctgtgatcctgcagttttccatacttacaccaagtaatcgtcgcatcacgctcatgccatggtaatcatgggcctgggaaatatccagattgctgatcgttcccagtttaccctggtcgatcatatggatcagtgcctgataataaggctggaagcaatactgttctgccacctgtacttttccgttgtatttttcttttgcctgataccaggcctgtaattcctctactgttgctgccggcggtgtctcacacagaaccggaattccctgttccatggctttctcggcaaatggaagtgcagcaccgtattttaacataaagactacacagtccggctttgttgccagaaattcgtcatagtctgtatacaccttccccgggaaatttttctcttcccgctccctgctggactctgaatgcacatacactgccgatacttcaaattcttctcccagtgctttcattacacgcacatacatctgtgctctccatcctgttcctgctaatcctactttcatgtaaaaatcctccgtcattgtataattttatgtagtaatcaaattggtatctgttcaatattcccgggaataccggacagcaactgacttttctccattatatcacactttacattttattgtgtatttttatacaatatacagattaaaaaacactctctttttctatgaccccaagtaaaatctgcaaagatttctttcgacaataatattttcttcatacaaactatcgagtgaaacatcacttttcaggatatatatcaggtacaataccgaaaagtcctgtccgtaaatatccttgcaaaaataagtcccagaggcagcgccactacaatcaatattgccgcagccagccaggagaccgcttcatttagggacatgactccaaggttataaaatcctcgataaaaatacaatcccggcaccataataacaattgaaggaactgtaagtgaaattcttggatatccgttgttttttttgatcagcgacgccagcagtccagctgccagtgccccggtaaatgcagctacagccgccggcatcccggtaaaatcgatcagggacaaccgcagagtattggctactgctccgatcatcgctgccgtggaggccatgggaatagaactgttaaacataatagaaaatccaagaacaccgcaaaagctggcacatagacgaaaaatcagcctggatgccgttcccaggtgtactgctataaaatcctccggctgtaatttcaggatcattgccgtgatccaggctcccatggttgccaccagtatgatgatcaacgcataggtcagtctttccagaccggaacgcaaatccagtttcgccatgtcgattccgctggtgataaaaggaaatcccggaatgataaataacatggagcagatataccctgcctcatgagccgccgatatatggagcaggctttccgccagattaagacagattgcatagatcagacatgccgctgatacggaaactgcaatatttaagaataaggtataatgatgctttatcatcctggtacggatgaaattaccgatacctgcggcaataaaggccaacagcatctccaccggtcctccaccgagaagaaacgtaaaagcgccacacgccagcgccgcagccactcccagcttccagggcgaatagagcgcatgaatctgttctatttcatccagacgtttgtggatctcctctcccgtcagctgtttctcgatcttcggaaagttttctacaaactgctccatccgataaagtttggatgtattgactcctgtattggctatacttaaggactgggaaacacaatctgtcccgtcgaagcagttaaacccgatggacatcagtccaacatctacggtacaggtcactcccagctctttggacaatcgattcatagaggtgcgtacacgccaggcaccggttccacaggaaagcatcataagtcctaccctgccgatcacagatgctttttcgatcagatccgcctctgcgatcagcacattgctgtctgccttggcataatcatgccatggaatttccatatgatttttttccataatatccgtatattccgatgtctgtcttaccacactttctttatcagccataaagaatcgcctccgccttcgccacatgacgttccagattttttaaaaagtgagagtttggcagaaaaataccgatctcgtcatatgttttattattttccatcaatgtgtcctggccgtaaaaaacaaaagccataggcagattcttttccagttttgccatcagatcccaaacagctgcatatgcctgagcttctgtttctttcttttttacagtatccggcagttcatgaatcaataacacacctgtatttttttcaagaatctgctgttccacttccatatggctgtcataacaatgactgtatcgataagcctttgcaaaatacatttttcttccggctcccagacgttgatagacctcttcgaaatgtctgtactctttttcatgagctacactactgtattcaagaagaagtctcccctgcccgtcggtcatgatcacgggatttttgattccgtctgcatcgaaacgatagggaatcagacatgcatttcgcagaagatcaaacatggtattccggcagatttccatcaggaatgccgagagatcacgatttcgataagccgtaaataaagcttttgaaaattgatccggcgaaaatacctcatctgtttcttcgccacataaacacgaattgcagaaggtttcctgaagtttttcgcaggcccatggatcttccagaatcttttggaacaatatttccgttttttcttctcttggaaaaatcatactttctttcatattcgctgcctcacttttcttgctctttttattccgaacaattatactatggacacaataataagtaaaagctataatagatatgttatatattattttttgatatatcagaggtacgcccatgaacgttaattttgaatactataaaattttttattatgttgccaaatatggcagtttcacgaaggctgcccgggcacttggaagcacgcagccaaatgtaacccgggctatgaactgtctggaacagcagctgcacaacactttatttatccgcaccaatcgagggatacagctcactccggaaggcgagcagctctacacccacgtttctgttgccatggctcaattatttatcgctgaggaggagttatctgacagtgcttctctgacccacgggagcgttactatcggagccacagagacggcgctgaatatttttctgctttgtaagctgaaggctttccgtaccgcctatccgggaattcgactgaaaatctataactactcttcaccccaggctatcgcagctgtaaaaagcggaaaaatcgattttgctgttttatcaacccctgttcctgcggaaccgccactgcaccttactccgctgcagtccttccgggagatccttatcggtggaccttctttttccgctctttccgaaaaggaactttgtttttcagatttgaagaaatatcctttcatctgcctggggagagaaactgccacttttcagttctataatcagctttttctttcccaggagctggaactcatacctgatactgaggctgctactacagaccagatccttcctctggtaaaaaacaatctgggactggcatttcttccggaacctatggctttggaatctctggcaaaacaggaggttcttcagattgcaatatccgaaaagctgcctcttcgccacatatgcctggttcatgatcatcagcaccctctgaattccggagcaagagagctgaaaaaaataatcctgggtgaaaggatggattaatatataccttctcccagaattatctttcaacctgtaactgttcagtatcttcgcagtagcttctgaacagttaccccagattcttacttgccacccagcagttccagaatctcttctctggaaaaactgccgcttcccatatctgctccattcaggatctggtcagcaagggcatgcttcttttcctgtaattttacaatattttcttcaatcgtatccttagcaatcagtttgtatacattgactacatttttctgaccgattctgtgagcccggtcagtagcctggttctggactgccagattccaccagggatcatagtggatcacaatatccgctgccgtcagattcagaccggttcctccggctttcagggagatcagaaaaacagctgttgggttatcttctttattaaactcctccaccagctttgcccgcttttcctttccggtcgaaccggtcagcatatagtacgccgtttcttcgttctccagccggtctgccagccgactcaacatcgtggtaaactgggaaaatacaagaatcttatgtccgttttccaccgcgtttcgaatcagatccacacacatctcaagttttgccgactctcctttatattcttcaaaaagcaatgccgggtcacagcagatctgacgcagtttggtcagttcggataagataacgattttggaagtattgaattcttcctcgctctgtttatctaacagaagtttcatccgttttacatgtgcatcatataacttctgctgttctccttccagacgggtgtacatattttcttccagcttgtccggaagatcacgcagtacatctttcttcagtctccgcagcacgaacgggcggatcatctttcgcagtctctcactggcttcctcgctctcatgctggacaatctgtacttccagttcctcacggaagcgggaatagctgtataaaaattcgggcatcagataatcaaagatgctccacagttcactcagccggttctctaccggtgttccggtgagtgcaaaacgggtgtctgcctggatctttttcacagcttttgcagcctgggtgctgtggtttttgatatactgtgcttcatcgatgatctgacagcggaaacggtactttttatagaaatcaatgtctctgcggagcagatcataggaagttatcagaatctctccctcatctgctgcttccagaagtgtgcggcgctgcgcagccgttcctacgatcattcttactgcaagccggggagcaaaacgttccagttcactgttccagttatagaccagggaagccggggcaacgatcagcgcattccgccgcagccggtcatctgaactctcctttttccgctgccgtccctcattctcgatatcctgctctttttccaccggctctttcttacttttttcctgtatttcacgttcctgatactcggaaagcagatagcagatcacctgcaacgtttttccaagtcccatatcatcggcgaggattccgccaaatccattcgcactgagcgtttttaaccacagaaaacctgtcttctgatatccgcgcaggatcggttcaagttccaccggaatctcaaaatcattgtcttctacagttttcatgttacggatcagagaacgaaaattcttatccctcaccgaagaaatcaccggattgtctcgtaattgctgatctatatacaacgcccggtaggtatccaccggaacgctctcctgcatcagctgctgatctgtcagctgcagcgtttccttcagatctgccagtatatccagaccactgtcttctttctgaacgaagcttccatccttcagacgataatattttttccttttattataacgtgacagaatatcgatcagttcctcttttgacatttctcccgctgtcattttcagctgcatcagaccactttcaatcgatactcctaccgcaactttcggtgacggatgcacctgcattcctttcagcgtatctgatatatatacctcacccagctgctgaaataccggaattccttctgtcaggagatcatatattttatcctcatccgtgatcaccatagctttctgtcgttcgtcatatgcttccccgtaccgttgaatcaccccccgtacggccgcctcttttccaagatcccgcagtgcaaggtcggttgtatcgtacagactgtatgtcttttttccgtaggtcactttgggattgcaggtgatcatatccgtttgtggggcatccagatacacggcaaattccggcggcgcaacgccgtagtcctgttcatcgaaattctctttttcgcagataaaacactgttccaggcgcgggagcaattccgcacaaaacagtggaacatctttttttgccacgaaaatcgtccgttccggaatctcttccacacattccagaaaatcctgcaccggtttcaattttccccggtcttccagaagaatccgtctattcagaaagcagatatttttccgccttccttccacactgttcagacgattgatggaaacctcgatgccgtccggatttccaaaaattttcagatggcgctccggttcctgatcggagatctgccagtttgactcggaagtatagaaaatatccgccggaagttctttgcccacaaaaagttccagaaattcttccagtccttcccaggtcagatccagcagcttatttctggcactggtaaagccatgatgatacggtgaatacccgctgtagccatagcgatattgattcttctgcgcccagcgaagaataaaagataccagcggtctgctctccggcgcaaagctttccattgcatgggtgaaagaaagatttttcccgtatgcatactcttcctgccgttccacagcccgtgcaaatgcaaatacatctttcatcacatacatcctgtccacaccgatcttaaagtgcaacgcagcacttgggttttccacaatcaagtgcggttccagccgtacttttccacagatgtctccctggatcagtggaagacttttgacaacggcactttttttcagaagctgacggatgccttccgtggtttttcgctccgctccctttttcacacccggaatctgcaaaagcttttcccgtttttcctgctccagcttttcccggtaagctttcacgcgcgaatcgctgtaatactgtaacagaaccgccacacaatgcttgcagatcccttcatactcccgaaatgccggacattcacagtctgcttccaccatttcatcccgtacagtatcccagatcagataaacactataacgattctgtccgctcccttttaccagagcctccagaaccatttcttcccggttattttcttccgcctgaaagcgcaggatcttccctttattataaatttccagccctctgctgtaagctttactgtttgccagctttttgatctgctctttaaatgtcacgttttttgttccttccgtcttttccttctatttttgcaagttttcgttcttgttttgattgatttcctgcattttttttgtttttgatattctatgattgattgtaatacggggagggggattgcacaatggataatataaaaaaggaacagtaatagttggcacttcatagcgcatatgctattctaaatacagacatatctgggaaacaattctaaaaccattcggttatctgattccccatatggaaaagcaaaaaaatagacgaaaggatgaaaagtgatagtatggcaaaaaacgataccaaagaaatcgattttgtccggaagcatgaagaagatttgcagcgcctcaggggactgagattgctggatgatgattgcatgcaaaaggtattcgaagacaaggcatgtacagaacttttgcttcagattattttgaagcgagcagacctgaaagtgctgcatgtaaaaggacagcaggatatcaagaatctgcaggggcgttcggtaactctggatatactggctgttgatacggataacaaagtatacaatatcgaaatccagagaagcgataagggtgctgcggtaaaacgggcaagatataacagcaaccttattgattccaatgtaacggaacctggtgaaaaatatgaaaaaatcgataattggaccaatggatcaattattgatatataattcaagagaaaggaacttgtatgactgtttcaattcagacattgcaagttcctttttattcatgaatatcacatcttaatctttaattaggactttccatctcgtatttttatttttctaccacaacctcaccattcggccgtacgatccgaaccgtaacatcccctttttccagaatcgttgtccaactcatgcccgggagtagctttggtatccggatctccttcttgttttctttgtcaagaaccagaagactgtatccctgaactgtatatctcggtaaattgtttctgcaggttatttttatctgagagccttctttttcaaggattaccggttttgctgtaattgtcagttcctttatatattgctttccggttacccaaagttctaccggacgaattattcctctatcattcgcccagtcaaagcttcgatttaccggaagcatatccggcgaaaaacgattatttgcttctaccgtaattatattttttccctcttttatgtattcggaaatatttactgtaaaaggtgtatatccggaattcttatgttctcctgccagttcgccatttacatatatttttgcatcatgatatacactgtgaaagtataatcttacacatccggaaagccattcttccggaacttcaagttccgactgataccagccgattccccagtattcctctgttcctccttcgaagtttcttcgacttcgatggttccgctgccttccatgcaatatatatagatatactcttcaattccgtcttttcgttctctgaaatgatattccgcgcggggaaatattcccacatccgtcagatacagcctccttaccagtggatgttctacataatcctgaaaagactccgtcggcagcacgatcattttctcgccccggaatccatctcttttccagtcctgtaattcactcataccgtcagccctctgtctgttcctgctctgtataatcctccacctgtcctaccacatccagaatcgggtgggacatcaaaaaccggtaaaattccagtgcttcgtccgcgctcatatctacttcccggctggtcagccagtattttaagccattgactaccgtaagtgtatgaaattccagaaagatattgatatctctcagaccttccaatttctgaagtgtgatcttatgatttttcatcatctgtctgatcagcttgcgaagcttacctgccagaatctcttcaaacccgttctgtccggtgacctcaaacgctttctgataatactgctgatctttctccatcttccgaaacagcagatagattgcttcccgttccatcccgtcttccaccatctcaaaaaccggtcggaagacttcttcttccagaagccactccatcacttcgtatttgtcctgaaaatagttataaaaagtaggccggatcactcccgcctgctctgttatcatccgaatggtaattttatcaaatgagcctttcaacatcagttctttaaagctttccgccagctgatgtttcgttgcttctccttttcgttccatagacgtctctccccgtgttatcctttcggcttattttaacacaaaaagattgtctatggaaatttttacttattttttcttgtaattactgtagcctttgtgaacatacgggtgctcttcccacagtttgtctgcggtttctttccactgacaggcgtagtccgcacactttccgcagagatgttccacagtctccggggactgcagatcggtggattttgctccggtctgttctaccatctcctgcaggatctccggattctccagcatcggacatgggcgtaggtgattgttattaaatggctgatgatcccggtacgccataaataacggctgtttcagtgcctctaacagagatacttctttaatgttggcagaagaatagtggataaatacacacggttccacatcaccattcgcattgatatggcagtagtttcttcctccggcgatgcagccgccaacgaattctccatcgttctggaaatccatcgcatagatcggttttccgccggtcgcaccacggatctcacggactctgtgatacatatattctctctgttctttggtcggaagcagatccacagcggcttcatttccaaccggcatataatggaaataccaggtgaaacgacatcctttgtcgatgatcatatccaggaattcatcagaagttactgtctcaatatttttgcttgtatagcagatcgatgttccgaagatcagtccatggctctttaacttgtccatggctgccatgactttatcgtaaacacccactcctcttctgaggtcgttgactttctcaaaaccttccaggctgatcgacagagacaggtttcctacccgctgcatctcctcacagaaggcatcatctaccagggtaccgttggtaaatgcatggaattcacagtcgtaatgtttttcacacaatttaatgatatccgctttccgcaccagaggctcgccgcctgtatacatatagaaataaatacccagttcttttccctgtgtgatgatccggtccagattttcgtaggataggttcagtttgtgaccgtactctgctgcccaacagccggtacagtgcaggttacaggcgctggtcggatccatcaggatcagccacggaatattgcactgatgtgtctctcgcatcgcacggatcgtttttgttccgtgaaatgccgcttcaaaaccaagattcaacgctgtctgtttgatcacattcggatcgatctcatccagtgcacggttcacatactgcatccacttggactccggatcccgaatcaggtttcttgctccttcatatgattctgatgggaaattatctcccatgaatttttctgtcagatctaccagctgtaaaagccctttttctctgtctttttccacatgtttcagtgtcagatcaatcgcttttccaaatgccgctctcgccgctttatgtgttaattctcccatacttttctcctcctctgcgtttctggacgcttccggttttctattattttatctttctgcggtacaaataaaaatcttcattttctcaaaattgttttatttttaacgacattttccgacttttgttgcatttattctatgcaagaaaaaaactgctgtcggaacacctttttcgtgttccgacagcagtccctatgttttatgcctgttttgcgtctcgttctttatctaattttacatttctaaagtaaagaagtatgtcgatcgtaatttcagctatatttagaaaatagaagaaccatgcaagataaaacagccaactggtctctacgcccatgccgagttgcatgaatttgcgagcgataccgaatacataaccgatccagataaagcactcaaagaaaaggctctttcctttcgcagttctggaaacccatgatttccggatggaaatcggccaggacagtccaaagcaaagaatcatcacggcttccatcaggtcagtaatcatttccatatccatcgtagtatttctccatttcttttcagttatttatttttttccttttaaataatccgctcttccctcttcgtacaggttgtttccttcactgtcgatgataacaaccagcggcatatcttccacatacagtttacgcagtgcttctgctcccagatcttcgtaagcgatcagttctgcttttttgatacattttgccagaagagctcctgctcctccgatggcaccaaagtatacaccgctgtattttttcattgcttctacaacttccggaagacgggcacccttaccaatcattccacgggcacctacggacatcatcgtcggtgcatatgcatccatacgaccgctggtagtcggtcctgcagatccgatgacctgacctggttttgcaggggtcggtcctacatagtaaatggtagcatcggttggatcaaacgggattttttctcctcttgccagtgcttcgcacattcttttatgtcctgcatcacgggaggtatagatcgtaccggtcagcagtacctgatctcctgcgtgaagtgtttttgccagttcctctgtaagaggcagtgttatcttcttagccatattagatcacctccgttttgtgacgggttacatgacagttaatattgatggcacatggcatacctgcgatatgggtaggcatggtctcgatattcagtccgattgctgttgtctttccgccaaatccctgtggtccgatacccagttcattgattttctccagcatttctttttccagatctgcatagaacggatccggattggaggaatccagtggtctcatcagagctttcttggccagaagggctgctttatcgaaagttccgccgataccaacaccgactaccatcggcgggcatgggttaggacctgctgtttcaactgtctcaatgataaaatccttgattccctgcagaccgtgagaaggtttgaacatacggatcgcactcatgttttcgcttccgaatcctttcggtcctacggtaatcttgatattttctcccggaacgatctctgtatagatcatagccggtgtattgtcaccggtgtttccacggcgaacaggatcttttactacggattttctcagatatcctttgtcatatccgcggcgaactccttcattgatagcatctgccagatctccgcctaccatatgtacgtcctgaccgatttccaggaaaacacaggccataccggtatcctgacagatcggtacacattcattgtctgcgatctcaaagttctcgatgatattgtccagaactccttttgcaatctcaccgtcttcacaggcacggcagtttttgatcgcgcattttacatcttccggaagatgctcatttgcttcgatacaaagcttttccactacatctgtgatctgctttacgtctatctctcgcattccactctactccttttttcgtaaattttggattatctgtaaccagacgaggagtccgcctatgttccccctcgtctgatgtacgttcacttacttatttacagattatctttcgtgtcttgcataatgtggaagcagtaacggggaaacatgatctgtttcaacgcctgctgctttcagctcgtcatcgtatgcttttacgtgatccaggttcatggtgcccagttctacgtctttgcattttgcagctgctttcttacctgcgtttctaccgaatacgataacatccagaagggagttacccatcagtctgtttcttccgtggattccgcctgcagcttctccggcaaccagaaggttcgggatttcttttgtgaatccgtctcctgtgatttccagaccaccgttctgataatgcagtgtcgggtagatcaggatcggaacttttctcatatcgataccgtagttcatgtacatacggaacatagccgggattctcttctcaatggtgccttcaccaccaaggatctcgatcataggagtatccagccatacaccttttgctcctcccggaacatctacgccacggccttcttcacactcacggataacaccggatgcattgacatcacgcgtctccagcggatggatataagcttcaccgtttgcattaaccagctgtgcaccaacggaacgaactttttcagttaccagtgcaccaaggatctgtgacgggtagattgctcctgtcggatgatactggatagaatcctgatataacagggcagcacctgctctgtatcccagaaccagaccatcggcagttgcaccgtaatggttggatgtcgggaatccctgataatgcattcttcctgcaccaccggttgcgataacaacggtttttgctcttgcaacagagtagtcacctgtttccatgttcagaagaacagctcctgcaacctgacctttttcatctttgatcagttctactgctgatgtaaattcaacaaccgggattgcacggttgatcacttcatcacgcagagtacgcatgatctctgctccggagtaatcctttgcagcatgcattctctttctggaagttccgccaccatgggtagttaccatagttccgtctgcctgtttgtcaaattcaacacccagctcgttcaaccatttgatagcatccggagcttccataaccagtctttttaccagttctggttttgcagcaaaatgtccgccaccgaaacagtccagataatgctgtaccggtgagtcattttctttgtctgctgcctggattccgccttcagccatcatggtgttggcatcaccgatacgcagttttgtaacgatcattacgtttgcacctgctttgtgtgcttcgatagcacaggaagaacctgctccaccaccaccgataacaagtacatctacatcgtagtctacttttgtaagatctacattgtcagtcatcaggcggcttgtggaatgaagcatatcagccagctccagaggagctttctgacctttgttcggtccaactttgatctcagcaaatgcgtctgggttataatctggatggaattttttcaaaagagcgtctttttcgtctgctgtcagacgtcttggctctgttgccatacgctgtgctcttgtagcctctacctttttgatagattccatcatattttccggatatggtgcatacatattttacgccctcctatttctcaatatctctgttgttgtaaagttcttccatttctgtgatcggtttctgcatgatctgctcgatcaggtcatcgtaagcaccttcgtggatctcttccactctctttgtcagatgttttgcttccggtgcaatatattttcctgtgagacgtcttgccagaagacctaccatcggatgagaaataccagccgggcatcttacagaacagcagccgcagcttacacagtcaaaggattcttctgcacatttctccagttcacctctctgtgcgtatgcgatatactgcataacattcagatcctgtgtacatgcttttgtacatgcgttacatccgatacagctgtagatttccggatacagttccatcatgatctgagcattcggtttgatttcttcgatatcgtatgttctcttatccgtcgggaagaatgggatacttgccacatacatgccttcctgaacctgtgtctgacaggccagacaggttttcagctcattgtcacccttgattctgtagattgttgcgcaggctccgcagaaaccatgacggcatccacatcctcttttcagagtgtaaccggcatactccatagctgtcataattgtcagttctgcaggcacactatattttttaccgaaaaaatatacatttaccattttttccatttgtcggtaccagtcctttcttaatactcgttaggtaattcgtcgatttcatcaaagcggaataccgggccgtctttacatacgtacttggatccgatattgcaacgtccgcatttaccaaccccacatttcatacgaagctccagtgtggtgtacacctgttctttggtgaatcccatctcctgaagaccagccagtacgaatttgatcatgatcggcggtccacagactaaagctactttgtcggtgtcaaatccgatctcttttaagtaggtcggaacaaatcctacatgaccgtcccagccttcctgctcgcggtcgatggtcaggtatacgttgacaccttctgccttcatccacacttcctggatctcttttaactgaaccagatcgtctgcggaacgggatccgtaaagaatatctacggttccgtagttctcgcggttgtccagtacatagttaataacggaacgaagcggagccagaccgataccacctgcgataaacagcaggttttttccttttaattcggtctctactgggaaatgattaccgtacggtccacgtactgtgatctcatctcctacctgcaggctgtgcaggtaatcggtaaggataccacattttttgatactgaattcctgatactctttatttgtcggtgaagaagtaatggaaaacataccttcacttacacccggtgcacataccatggcacactgtcccggcatatgttcaaataattttcctccgtccggtgcattgacacggaatgtctttacatccggtgtctcctgacggatatctgtgatgataccaactttagggatcagggtatccagcgtgtaatttttatgacaggtacattcgctcattatttgtcacctccctgtttctcaaatgctttgataacttttacaatatttaaggatgccggacatttttccacgcagcggccacatcccacacaggagtacatgccgttgttgtttgccgggtaatataccagtttgtgcatgaatctctgacggaatctctgcagctggctggtacggttatttccatgcgccatcatggtgaaatcggagtacatacaggaatcccagcagcggtatctctttacaccatgtccggtgtcataatctttgatatcgtaacactggcaggtcgggcatacgaaagtacaggtaccacatgccagacacggtttgtacaattcttcccataccggagaattgaacttttctgtcagtgcatctccgttccatccttccagggacagattggagtatggaagtttttctacgatggtatggattgcatttttttctgcttccagtttttctgcatctgcgccatccgcttccacaagcaggctttctactgctttggtcagtgcctcacctttctcggtcagtgctttccagtacagttcgccttctaccatccaggtagccacgtctgctgccggttctgcacagtcgataccgaaggctttacagaagcaggattcttccggctcatgacatgccatggcaacgatggttccgtgctctcttcttgcagcgtagaagctgtcgatcggatcacttaaaaatacgttatccagaactttcacaccctgaatatcacaggctttcataccgaatactacaaagttctgttctttgagtgcctgcggttcgatgctcagtttctttccctctctctgtacggtgtacaggttctcgctctgagggaagaaggcatctttcggagattttacggttttcagtgtttccagagatacgtttgcatcctgggtccacgctttgaagtttacctgaccgcttacttcaacaggcagatataattcctgattctcggcaatactctggaataatgccgacagattttcttttgctatcttatacatacattatcccctttctgctacgatgctcggttctgcatcgtcaaatgtgaagtttgtcagcggtcctttggaatcggtatcttctcctgcctgatactctccgtacagttcatcgatatctttgataaatttgcggttgaacagatgaagcgggattccctgcggacatactctgctgcactcgccacagtccgtacatcttcctgccacatggaatgcacggataatgtggaacatcttctcttcgaaagaatctacatttgctttctgggaactgtcgaacttgttactgtcaaatacacattttctgcagctgcatgcagggcatacgtttctgcaggcgttgcaacggatacatttgctcagttcgctctggaagaatgcaaatctctcttccggtttcatagcttcgattttctttacctgttcaaaacgatctgcatctttggtgtctttggactccccgatgatctcgtcataaatctgatgttctttgcctttacatacatgacatctctccagcataccgtctttgtaagcacatgttttctcgccgtagatggtctggatggtcagtgtctcggcatcatctgtgatctctgctccctggatggactcgatacctttgattccctgtttccggatcttttcgatatccagttttcctttacatcccacaccgacgatgtaggctttttctctgttgactctgtgttctttgatcagctggttgaagctgtatgtatcacacggtttcagacagaccatggtttttccttccagtttggaagcttcgatcatatatttgcttaagtttgctccgcagaatccgttgtatacgaaatctttcagagattcttctgtctcaaagtacgcaggttccggattgtaaggcaggtctccggctttccagccaagaacccgggctactgttccgtctgccagcagttctttcgcacggttgattaattcctgcatcttatatcctccaatctaacgttcttaccaagggaatggatcttttccacaaactcgttcatggttgtggagaattttacaccctctgctgctgatacccattctacacgggtacgtccgttttccacaccgatatagtcgagcatggagaacagcagtgtcatacgtcttcttgcgtaatagttaccggtgctgtaatggcagtctcctggatgacatccacacatgatcacgccgtccgcacctttttcgaaggcacgaaggatgaacatcgggttgacacggcaggaacatggaacacggatgatctttacatctgccgggtaaccaagacggctgcttccagccaggtcggctcctgcataactgcaccagttacagcagaacgctacaattttcggtctgaattcttcttttgcttctatcgacatattgcatctacctccgctataatctgtctgttagagaatccctgcagatccatcgctccggatgggcaggctacggtacatgcaccacaaccctggcacagtgcgctgttgacctgagccacacggcgggtttcacggataccgtggtcattaatttctttctcttcgtatgtgattgctccgtaagggcacacatttgcacaggtggaacatccgttacacagaagttcatccggttttgcggtacatgggttggtcatcagtttgtcttttgccagcagtccgatggctttgacagctgctgcacctgcctgtgctacagtttccgggatatctttcggtccctggcatacaccggacaggaagatacctgcggtcggggactctaccggacggagttttgcatgtgcttctgtcaggaagttgttggtatcgatacttgctgtcagcatggttgcgatcttacgaacacccgggttcggctcgatggcagctgccagaacaaccatatctgcttctttcaggatctgtttgttatctaacagatcggatccctgtaccagcagttttccgtttggctgcggaatcacttttcctacctgacctttgatataatttactccatactgttctacggctctgcggtagaactcatcgaagttcttaccaggagtacgcacatcaatatagaagacagttacattgacatccggatatttatcacggatcagcatcgcatgttttgcggtgtacatacaacagatcttggagcagtagctctttcctctgtcatcggaacaacggcttcccacacactggataaataccatttccttcggaggttttccgtcggagagacgttccagatggccgcttgtcggacctgctgcgttcatgatacgttccagttccagagaggtgatgacatctttgctctggctgtatgcatactcatcatagttgtccagtttgatgatatcaaatcctgttgcaacgacgattgcgccgtatttttctgttacgatctcgtctttctgatcgtagtcgatcgcacctgcctgacatactttggaacatacaccacattttccggttttgaacttgatacagtgttcacggtcgatcaccggtacgttcgggattgcctgagcaaatggtgtgtagatcgcgcttctgttgttcagaccgcggttaaattcgctcggtgctttcttggatggacatttttcctgacatacaccacatccggtacatttgtccatgttgacgcttcttgcttttttccggatatctacggtaaagtcaccaacgaaaccggatactttttctacttcactgtatgtatagatattgatcttttcgtgagctgcggcttccaccatcttcggtgtcaggatacatgcagaacagtccagagtcgggaaggttttgtccagctgggacattcttccaccgatactcggctctttctcaacgatatctacttcataacctgcatctgcgatgtccagggctgtctggatacctgcaataccaccaccgatgaccagggcacgttttgttacacggctctcgcccggctgtaaaggtgcgttcaggtttacctttgcaactgccgctctcatcaggataacggctttctttgttgcctcttccatatctttatggatccaggaacaatgttcacggatgttggcgatttctaccatgtatgggttcagtccggctctttccgctgcttttcggaaggtagcctcatgcatacgtggggaacaggaacagattaccattcctgtcagctgtttttctttgattgcttttgcgatcagtgcctgtcctgcttcggaacacatatactgataatcttctgcatgaacaacacccggctccataagagccatctctgctacttttttcacatctaccgttgctgcgatattacttccgcaatgacagacaaatactcctattctctgcaccagggttacctcctatatcttctgaatgcactgactaacaactgctgcggcagttccggatccagcagttccggaatctcatccggtgtcagatagttctgacctttctggcggactaccagctgtcttgctgcgtcgatcagtttacccggttttacatctctcggacaacgctctacacaggcaaagcaggagaggcatttccacagagatttggaatttaccagttcttcgatgttctcgtttgccacataggatacaaactgatgtggtttgatgtccatctcgttgaaagacgggcaggaagcggaacatttaccacatttcatacatttgaggggattgacaccgctgatctctttgatcagttctgcctgttttttctcggtactcattattcagccacctccttgtcggatgtcagtgtctgcagagcttcctcttttactccgagagcttctgccagaagttctgtgaagtagtgaaccggcagtttgccgtttccgctcttgttcaggttgtacagacacagtggacaggcggtgatcagcatctctgcaccaaatcctgctgcgctgtccatgatattgttgcacatgtttttggacatgtctttttctttcagagaaatgtatcctccgcagcattcgttccggtatggatacacaaccggttcagcaccgatggcacggatgaaatcttcgataatggttggattctccggattatcaaatgccatgatcttgcccggacgaagaagcaagcagccatagtaagcgccgattttctttccggttaacggattcactacttttttctttaattcatcaaacccgatacggtcacggagcacttccagaaaatggagcacttcagtctcgccttcatatggctctgccagtttcatgtagttgtttgctctggtacggatatcttctacattcttcatatcatcattgacacgtttgatcacatgatgacaggcagaacaaagagttaccagatcctgacctttttctttggcctcattcagagcacggacggaagaaagttttgtggcaatctcatcagaaccaagtggatatacaccaccgcagcactgccagttgtcgatttcttccagttcaaatcccagtgcccttgcagatactctggcatatgcatccagatctcttgcttttgttctcagggtacaacccggaaaataactgtacttcatagttcctgtatcctttctttatgtaagtttcctgcctgtcggtcaccggttgcagccaacagacattcgttactgtctgcttaatccagatcgatctgtgcgatgactgctttcagcgcatcggcactcttatgtaactgttcgatctcttttttgttcatacgcatcggcactttaccctgaataccgtttggtccaaccagtgtcagtgtgcttaagcatacatcgtcaattccgtattctccatgcatcatggaagatactgttgtgatggaatcagaagaagctgacaggatagagcagagtttgcatacggaagcagatactgcgtagaaagtagctccttttcttttgataatctgtccgccggatttctgtacgtattcgagcatcgcatctttgtccacttcttttacttcttttcccatgctctttgcaatatcgtaatattcatccaggcttacaccggatacatatgcgccggtccacggaataaaggatgtgtctccatgctcaccaaatacataggcatgaatgttgttctgtgctacattgagatgttcggaaagtccgcaacgaagacgagcagaatccagaatggttccggatccgatgatctgattttccggaagtccggaaatcttggtaaatacataggtcatgatatctacaggattacttacaatgatatataaagcatgcggagccacttttacaatctccggtgtgatagatttcaggatatttacattggtctgtgtcagttcgattcttgtctgaccaggtttacgtgcgataccggaggtgataattacgatgtcagagtctttcgcatcttcgtattcaccggcaatgatggagatcgggtctctgaagcaggttccctgtgcgatatccatgacttcgccttctactttttctttgttaatgtcgatcaggacgatctctgatgcaacattctgattagataaggtatacgcaattgtggaaccaacacttccggctcctataactgtaattttgctgctcatagtgtctccttcttcctttctatttgtctattttttaacaattgtggcaaaaaaatatgaaatcttcgctttctatcgattagcttttttggattttctcataaaaatataagagttcacacttctccctccgctaagataagtatcagctcgattccatttggatatattataacgtattgataagattttaacaagtgtttttgcaaaattttatcaatttctttgtggggattgattggaagtgtctatggatggggtgggtggctgtggctgtcggctggtatggggacgcagggggaaggcacaggtcagggagcttggacgtgggcagggcaactttaagctagccgctaactccggctataattcacgagggtcagctgaccctcgcgaaagcctgcgtaagcgtcggatcttaaagcttgccctaaccgcccacaaagtgtccaagccccctgacctgtgccttccccctgctgagcatccagatgggcaaacgtcgcgttcgctcgtttttagtttgaccaacaactgatatatatatatattggtttagcaacagtattctctattatatttcaaaaaggtgacacgttcggttcatctccagctatcgagagtatagcgcttacataatatattatctttcacctataacaccgtttccactcaaaatacagcgttattccttgcgaaaaccagcaccagcctcccggttcggggggtggggcaacactttgtgggcggttagaggcgattttgagatccgacacctacgtagactttcgcgagtgccagctggcactcgtgaatgatagtcggagttggtggctagctcaaaacgcctctgcccacgttgccccacccccgaaccgggaggctggtgcgtccgtcttacgacaaatcctctcttctaagtcataaccaccacttcaagtggtggtttgtttttgaccctataagggtcctatgcctgcacgcctaaaaggcggatgcctcaagcaatcataccggcttgcctctgaaagaggcttaccgtcgtgtatcttctcttttagattcttctttttgctgctgtatatattcttttacagcttcttctgtaatattgcctactgtcgctacataatatcctctagcccagaatgattttgaccatccgttcaccatttcgggatacttatcgtgtatcattagcgcgcttttcccttttatgtatgctattacatcactaactttttcgctcggtggtatactcaggcataaatgtacatgatctgcgcagactgctccttctataatttctatgtttcgataatcgcacagtctttttatgatctctcttacatctgccttcaattttccatacataattctttttctgtactttggtataaacacaacatggtactggcatttgtaccttgaatgtgataagctgtaactgtccactttggaccgcctcctattctctttagtattggcttgagacacctttactatcgtatcataggaggctttacttttcaccatacaacgtcactactacacgattcgccccagcatagctgggggattagcattttcatttaaccttacatgaacgttctccaatatccaaccttacgctcattaatctcctgaataatctccggttcaaccttgaagtttctttccatatccatcaatccattgatctcctgctgtacatcgctgacctgggtgtaacagaagccgcagcaatatgggattttcttgacggctgtagtaatatcatcaaaacgtttgataaaatcctcttttgtattgactttattaccatatccccatccggaatcatcgttgttgaaagcgattccaccatactcgctgatgatgatcggctgacctttgtactcgtagccgtttgccagagcagattttccgctgtggtatacttctgtggtcagaatctggtctttgtattcggtgtagcgtttgtacagagtatcgcccacttcttcataatcatgaagggtgataatatcggaaacggtgtgttcccatccgtcatttacaataaccggacgcatagtgtccagactcttggtcagatagtataccgcttctgtaaagtgctgttctacttttcttgtttcaatctggctgacaccccaggattcgttcatcggagtccaggtgatgatgcatgggtggttgtagttctgtcggacaatttccatccattcttttgtaaattcttctaccgcataatcggtatagcgataggcggctgccatctcgctccataccagcatacctttcacatcacaccaatataagaatctctcatcttctgttttctggtgtttgcgcagtccgttgtatcccagggcatggatcttgtcgatatcctcgatcagtgcttcttcacttggtggtgtcagatgagaatccttccagtacccctgatccagaatcagtctctgatacagtggatgaccgttcaataaaatgtttggtccatcgatacggatctcacgcattgcgaaataagaaccaaccgtatccacgatctcccctttgtgagtgaccgcaaaatcaatatcatacagatccggttctgccggagtccaaacacggacaccccattccagtcccactgttccttcataggctacattaatggttgtctctacatgtttctgatttgccagcacacactgctttgcaaccgttattcctcgaaaactaacggtagctgtgatcatcagatcgtcatccagatctttttccgctgttgccacttcatattccagtttcaatgcagcattttgcagatccggtgtcatttttacggatgccaggctgatcttcggtacgtattcactccataccgttttccagataccggtggtctgtacataccagcatccaaagttttcgttgatccatcgctgttttcctcttggctgctgggtatcaaaagagtcttctacttttaccgtcagttcattttctccgtcatgcaccagattggtaacgtcaaaagagcatcttgcatagccgcctctgtggcttcctgcataggcaccgtttacccatacttttgtaataaaatcactgccctcaaagtgcaggatataacgattgttctctagcttcacaccatctacgttaattgtacgatgataccagataaaatcatggcgggtttcatcctgaatgccgcttaactttgtctcataggtgaacggaacattgatctttttatcacctttgaattcctgataccatttctctttttccccggcattttcatcatcaaaaccgaaatcccaggttccgttcagattttcccagtcagttcgcacaaactgtggtcttggatagtccttgatgtaacatttcatttttgctttcctccataaatgcttgtaaaatccctttccgtccttttgacgattttcccatacgagtttattttctcagaaaatacatttttttcatattacaatactgtacaatttttttctttttctttgtgtagttttccctttgttcagacaacaactgtataaaaaacgtctcgtttctatttttcaaaaaaagatggtacggagttctccataccatcttttctatatttctgaaattttttatcttcccagcgccttcgccagtttccggatgtattccggggtggttccgcaacagccgcctacgattccggcaccgacttctaccaggtgtttggtgtgtcttgcaaaatcatctgcattcatatcgtaatgagcttcgcctttgtcatcgataaacggcatgcctgcgtttggtttcgcgatgatcggaacagttgccacttctttcatgctggcaactactgcttccagctgatccggacctacggaacagttcagtcctacggcagccgctcccatctcctgtaaagtcagaactgcttccacggcattacctccgtacattgcgctcccgtctgcttccagagaaagcgtacagatcatcggaagatcgcagactgcctgtgctgcatccagtgcaaccaccgtctcatccacgctcaacatggtctctgcaacaaacagatccactcctgcatccaccagggctttcatctgttcctgatatgcctcatacagttcattataagtcagggttcctctcggctccatcagctgtccggtggtggtgatatctcccgctaccagagcccggttgccgattccgtctttacagatctttaccagctttgtgttcagttcggctacccgatcctggagattaaagtttctcaggctgataggattggctgcgaatgtaggagcatatacgatctggcttccggcatccacataggcacgctgcagttcctgtaaaactgaaggattttcaagtacccactgctcagaagatatgcctaccggcatacctgcttttctcaggttggaaccggtggctccgtccagaattactaccccttttgctgtcagttcatcaaattgctgtcttgtcattgttttctccttcctctgtatatccaaaacactatttcagtattatcggcttttttatcttcccacggacttacagagggagtgtcccattactgtttccgttcacagaactcaatccgttctttattcggtccttcgataataaagaaagccacacccttttcccagaatggaagttcttcaattccattcgacaacactttatatccctgctcacagatccatgcataagcagcctgaatatctgtacagtttaaagcgaagtgattgatggcgccgtcaatgccgttaccaccttcggcgtaggtctcgatcatcaggtttcccagctgcaaaaatgcaacttttgcctggtttgcaggtacctgattcgtgtgcatggtctgaaatcccagaccttcgtaaaaccggatcgttgtttctatgtctgatgtaggaattccgatatgctggattcctgtcgtccactgtactacactcatcctctgtatcctccgcttttttctctataaatcttatttactcagcgctgtcctctgctgctgtgtcttctgttgtagtgtcttcactgttatcctgtgaagaggtatcttctgtactgtcctgtgcgtcactggattttgtatcatcgctgctgtcggcactcttgtatacaaaagatacactgtcggtgactgtgatctgatcccatactttatctttgactttaatcttttcttcttttacccagtcttccagtgtgctgtcaaacagatcagattttctttctgaaataaccgtcttctctttgttttctgtcgcatcttcgtccagcatcttatccagacgtactacataataaccgtcgtcgccttcgatcacactgtcagcaacttctccgtctttcagttccagagctgcatcctgtaccgcctcatccagtgtatcatcggtacttcccgctgtggtaaatgccggtgctgtcgcacttaaactgtcatctacctcttttgccagtgcatccatatctgcgtttgccacgtcatcggatgcttttactttatcaagtacctgctgtgccaggtcttttttctgtgctttttcttcatcggtcagatcaatggtattaccatcatcatccttttctgttccttctgtagaaacttttacgatagtgactcttgtctgatctttttcattggcgctgacctcggtatctacatccgcagtcatcggatcatgcatcttgctgcggatcgttaccaattccagatacgtaacgatgtcgtcttcagatactgccagttttttcaggatcttttcatcgttatctttgataaattccgctgctgcttctttgatcgctttttcttcatcatccgtaatcgtaacgtcataatctgccgcatgtgctttcagtacatacaactgattaattgtcttcatgacgccatctttggagctttccccgacagttttcccgtcgtctcctttctgatcccacacattagatgcagagccgctgacaccatactgtgacatcagcatattataataactcatggtctgcgcctgctggtctcttgtcatatagcttgccagacccaatgttactttttcatctcctacagttgctacggtttttgttccatcaattgcttttgagcatccggacagtgtacctgctgcaagagcagctgccagaatcccacatgctgcggttttatttaactttctcatgttttcctccgttacccttttatgtactccgggagtacatttattcactaatagcatttattatagactatttccgcctatggggcaacttttttccttttatttcaatcttttttcacaacagtaaccaagcgcttatctcttgttttcctgttctcaggaatttgcccgcacttataccagacactgcatgaccgtcagtaattcagtcgccttctcctgcatcggcactgcttcctttgcctttcggtttctcggacgatacagaaaatacggatttgtttcgactttaaactgcagttcttccggatactgattcagtatctccggtatcttcgttgtatcaatcttcgcccgctcatacatggtaagtttcaggctgtcatcaagctgcttgacttcggtcagatagatccggtgagccatggctttcaggcttgccactgcaaggaggttttgtaccatcttgggcggttctccgaagcgatccagcagttcttccatcatatcctcatattcttcccggttctcgatcgccgcgatccgtttgtaaatatccagcttctggtattcattcggaatatatttttccggaatgtacgcattgatctgcaggtcgatcgtcgtctcgaagtcttcctgtacttcgattccttttgcttcctgtacggcttcattcagcatcttacagtagagatcgtatcctaccgcttccatgtgaccgtgctgttccgctcccagaagattgcccgcaccacgcagttccagatcacgcatggcaatcttgatcccgcttcccagttcagtgaattcgcggatcgcatggaggcgtttttctgcgatttcttttaacatcttatttctccgatacatcagaaaagcgtatgcggtccggttggatcgtcctacccttcctctcagctgatacaactgagaaagtcccatttgatccgcatcatggatgatcatggtattggcattcgagatatccagccccgtctcaatgattgttgtggagaccagaacatcgatctctccgttaataaatccatacatgatcttttccagttcacgctcgctcatctgtccgtgggcaaatgccacgctcgcctccggaaccagttttcggatctgattggtgatctcttcaatgttgttgacacgattgtatacataatacacctgaccaccgcgtaccagttcccggctgatcgcctcccgtaccatctcatcgttatattccatcacataggtctggatcggtgtacggtcctgtggagcttcttccagaacactcatatcccggattccgatcagactcatgtgaagagttcgcggaatcggcgtcgctgtcagggtcaggacatcgatattctgtttcatctgcttaatcttttctttgtgggtaacaccaaagcgctgttcctcatcgatgatcagcagtcccagatctttaaactgcacatctttggacaacacccgatgggtgccgatcagaatatccaccagaccttttttcagatccccgatcgtctttttctgctggctggcagtacggaaccggcacagaaggtccacgcgcaccggaaaatccttcatccgctgtacaaatgtattgtaatgctgctgtgcaaggatcgtggtcggaaccagataaaccacctgttttccctcctggatcgccttaaatgccacacggatcgcaatctccgtcttcccatagcccacatctccgcagatcagccgatccatgatcttcgggctctccatatcctgctttgccgcctcgatcgcctgcagctgatcctccgtctcttcaaatggaaacatctcttcaaattcccgctgccataccgtatccggtccatagcggaatccggcttcctgctgtctggctgcatacagtgccaccagatcttttgcgatattctttacagctccgcggaccttcgtcttggtcttcttccattcctgtccgccgagtttgtttaacttcggtgtctttgccgcatcagagccggcatatttttgcaggacatccagctgggtagcgagaatatacaggttactttttcctgcatactcgatcttgatatagtctttcaccacaccatccacttccatcttctcgatgccgcggtacacgccaagcccgtggttttcatgaaccacaaagtctcctacggaaagctccgaaaagctctggatctgctttccgctgtactgggattttttccgttttttcttcttttctttgccgaaaatatctgtctccgagatcaccacgtatttgaccatcggatactcgaagccacggcttacccgtccccaggtgaccttgatctgtcccggctggatcagttcttccggatcctcactgtaaaaagctgacagttcctgatcctgcagatcttttgccagtctggccgcccttgttcgcgaaggggataacaacagcatccggtaaccggattttttccagcgcaacagatcttttaccagcatctcaaaactgttgttgtacgggttgaccgattttacagtcagctgcatctccatagcgaagttccacccggttccccgtggctccatcgtggacaatgacagtgtatgcatctgatgaaaccgatgcactacttcctgatggtttcggatcacttccatctgtccgggcagaagataccccttttccagacggtgaatcatactctcccggaattcttcttctgttgtctttgcatgttctgtcaaccggttcggctcgtcgatcacaaccagcgtgttctccggcagatattccaataacgattctgttttcttataaaaataccggacaaaactttctgctccggcaatatgctccatctcttctaactggtcttttaattcagcggcgatctgtcgtactctcgccccttcctctgtcttcatctcgtcccggaacttcttctgactcttttgcgcctctttttcaatggctttgatgccctgtcggattgtctccttatccagcaccacttccgtcgccggatagatcgtaatctcctccagattctcgatcgagcgctggctttccgcatcaaaactgcggatggaatccacctcatctccccacagttcgatacgccacggattatcctcggtcagagaaaatacatccatgattccaccacggatagaaaactgtcccggaacctctacctgcgccgcccattcatacccgagttccaacagatgtcttttcatccgatccaggtcaatctcgctgtcattgcgaatctttattactttttccttccacacggcaagcggcaccagacagtccaggcagctgtcgattgaagtaacgatcgtcacttcttcccgctccagcagtgcgcgaagcacctggatccgttgtctggtaagaagattaccatggatatctgcctgataaaagatcagatccctcgccggataatacagtacttccggatcatacagccgaaaatcctcataaaatgccttggctttcagatcattttccgcaacgatcagtcgaaaaggaaactcccggagaagcccattggtaaaatgagctttctgggagtccaggcatccggaaacctgtacgattcccggtttcttcagttgtcttatgatcgcatcaaaatcggccagttcatataatggttgtacgaatgcatccatcgttttccctttctagttaaactgattcatcgcctgatccacttctccctgtaccatcagttccacggcccctgccgcgcgtttcagcgcgtcatccaccagtccccggtcttctttggaaaagtgtcccagcacataatctgccagatcccagcccttcggcttttctccgactccaactttgattctctggaagttctgagtgcccagctgtgcgataatatttttgatcccgttatgaccacccgcacttccttttttccgtatccggatctttcccggttccagactgatatcgtcatagatcacgatcagttcttcttccggatcgatcttataatagtctaccaaggctctcactgattccccgctcaggttcatgtaggtcagcggtttcgccaggatcactttctgacccgcgatcacgccctttccgtacattgccttatgttgttttcccgaagagggtacgcgatactcatccaccagaagatcaaccgcgtcaaatcccacgttatggcgggtattttcatactgttttcccggattgcccaggcctacgatcagatacataatgataactccttcatcagccgaagtataccagctcctgctccggtttttctgccgcttcaatctctgttgcgtacaataccggacctctgccgttgtatacttccataaattcgtctttaacttttgcagttaccgttacccagctgccgatccgcagtctcttggctgccggattcttacagatatagccgataaactgggtatcgtccgcacagcaggtcatcgccatacgtccgggcacgaaaaatcctgcgttcagctcacgacttttcaacacctgtcctttgaaacggacggtcttatccacatatttgtccaggttatccatcatatccacataccagataccataatcgatatcttcgatatcaatgatatccgcgttcatatcatacggcatctcatcctggaaaatatcgtcgatctcgccctcttcattttcaaataccacttccgctctggaattgacaactttgacactgcgacggaagtttgccagcggatgttcatcctgacagcggttgaaaattaccaggtccgcgtttcggatcatctccatgaataaagatttcatattgttcatatagatctggaaggtgctggcatccacggttacgatatgctgtgccagatcccagtaacgtggcatatcggtctgatagaacttatctacagaccacagcggattgtactctaccaggactctgccaggctgatgttttttattcaacatctgcagggtatccgcgttaaagtcttccgggtcttcgatgatctcaatcaccgtattcattttcttcaggctttcctcatcgtactcctcttctccctcttcacagagaatcagaagcgttttgtccggaatctgaaaataactctgatgaatggtaaaatccagaaactgggttttaccactctctaaaaatcctgtaattaaatatacgggaacatctctcttcatcattactcattcactccaaaaatttcagcaattttgtcttctgccatcttggaaccgatcacacagatcttacctgtgatctgtggagtaccggtgcgtacctcatactcttccggaaccatatcaaagtagatccactgtccgtcttttccgtccaccatacctttggcacgaaggatcacaccaagatcttctgcttctgacagtttcttcagtgcagcttcgatctcttcttttgtatatttcttagcagtctcacggccccagcttgtaaatacttcatccgcatggtgatggtggtggtcatgtccacatccacactcgccgtcatgatgatgttcatgatcgtgatcatgtccgcatccgcactcgccgtcatgatgatgatgttcatggtcatgatcatgtccgcatccgcactcgccgtcatggtgatgctcatgatcgtggtcatgtccgcatccgcactcgtcatcatgatgatgctcatgatcgtggtcatgtccgcatccgcactcatcatcgtggtcgtgatgatgatgctcatggtcgtggtcatgtccgcactcgtcgtcatggtgatgctcatgatcgtggtgtccaccgcataccgggcagaaatcttcgtcttcttctctgccctgctccatcgcttccagaatctgtgcaccgtccagtttttcgattggagtggtgatgatcactgcatccttgttcacttcgcggatcagagcgactgctttggctactttctcttcggtagccttcggtgtatcggtacggctcagaataatcgttcttgcgtactgtaactggttctcgaagaactcaccgaagtttctcatatacattttgcatttgtttacatctgctaccgttgtatagctgttcaggctgatctcacagtccacatccacaccttttaccgctttgatgacatcagagagtttgcccacacctgacggctcgatgatgatacgatccggatgatacgttgtgatcacttctttcaaagaagttccgaaatcacctaccagagaacagcagatacatccggagttcatctcacggatctcgataccggagtcttttaagaatcctccgtcaataccgatctctccaaattcattttcaatcagcactacctgctcaccttttaaagcttcagagagcagttttttaatcagtgttgtttttccggctcctaaaaatcctgaaataatgtcaatctttgtcatgttttttacctcctgaaaaacgcccaaaaagggctgttttctctaaaacagccctgaatttttgtctgcatatcctgtgagttctttcaacagttcctgtcaaaagaactcacaggatattcttaccgaatagttactcctctatacttttatcacgttttgtccaaaaagtaaagccccctttgcgttttagtttcatgtaactaaccgttcttttcatgcaaaaggagcttatttttctgtatgtattatccgtggatcatcagatgcacgatctcccgatctgtctcaagcataccttcagatgccagtttaccaacacagcggatcgtattttccactcctttttttacgataccgtcaccgccgataaactgctgtccgttcttatacataaagtaaccaaggattcccgcatctacggaggatgcgatctttgctgcgcaggatgctttcgctccgtcgcagatcatacctgatacaatggcaagaccgttaacaatggcatgctcgccctccttcttgccgtctccgtacaggtaggcgatccctgcgccacagccacatccggctcctactgcaccgcagtatgcggaaagtctgccgattccttctttgatatggatcgttgccagatttgagatcaccagagcccggtacatcgtctcttccgatacctgcagttcttttgcaaaaaccacgatcgggacagaagctgtgattccctggttgccgcttccggaattgatcactaccggaagttcacagccattcattcttgcatcggacccggcagccgccatggctttggcgcgcaccttgacatcctgatcgccgtaagtggccaacagaacctttccgatattggctccataattaccacagagcccttcctcggcgatcgccatgttataacgaacctgacgttccagtacttcgcggacatctgcaaggtccacttcctttgcaaatgcaaagattttttctatggtaagcgtcgatttgtctgccagtgcggattcttcttttccggtaatctcttttgccagaagagtctccccgtttctggacacatgcaccagattcgtgtgaaaatcggtgatccgtacactcgctctatcttctccgtgatataaagtaatctgaatatcaaagatcagatcagaggatgcctcacagacactgcacggaacctccttcaggaaggttcccattgcttcgatgtcttcctgttccacatgggagatgacctccagttccttcgcagcatctcctgccacgattccggcagctgcggcggcttcgattccacgcagtccaccggtatgtggaacaaccacgctttttacattttttataatatttcggctgaccgcaacctccacccgctccggcagagctcccagtgtctttctggcaacagctcccgcataagcgatggcgataggctcggtacatcccatcgccggcaccagttcatctttcaggatctggacataagttcggtaatattcttttgaaagcatatttctatctgttcctcactctttttattttttccagcatgccaccatatggcccggtgttctctcttccagttccggttcctgctgtctacactgatcggtcgcataaggacagcgtgtatggaaacgacagccggacggaacatgcaacggactcggaagatctccctcgatgccgcagtgttccagactgagtgcccgcttgggatctgcgatcggaatggaggccagcaatgcccgggtgtatgggtggcatggattgtcatacacttcatcgctttctccgctctccacgatcttaccaaggtacatcacaccgatcctgtcggaaatatggcgcaccatggacagatcatgtgccacaaacaggtaagtcagtcccagttcctgctgcagatcttccagcacgttgacaacctgtgcctggatcgatacgtccagtgcggagatcggctcatcgcagagcaggaattccggattgacggataaggctcttgcgataccgatacgctgacgctgtccgccggaaaactcataggcatatttttccatatcgtctgccttcatacctactttttcaagaaggcttacgatccgctcatccatctctttttccggaagattttcaaagacagcaatcggttcagccatgatttctcttacattctgatggggatccagcgcagaataaggatcctgaaaaataatctgcattcttttatgatatgcaaggagttctttaccttttgtctttgtgatgtcgtgaccgtcgtaggttaagattccatcggtcggctcatacatacggatcaaagtacgtcccagtgtggactttccacagccggactctccgaccagaccgaaggtttctccttttttgatagaaaggttcacacgatccaccgcccgtacttcctgtaccagttttccgaagaaatttttgaccgggaaatacttggacagattcttcgcttccagaagatattgttcttttgtttccatattatttctcctcttctttcttctctttctcgtccagttcttcttttgtgaagatacatctggaggactgggtatcggaatatgcccgcatggacgggatccttttcttacattcctcgcatgcaaaccgacagcgggtcacaaatggacatcccgccggcggattcgccagagacggtgccatacccgggatcggttcgagacgttcccgacatccgctctcacattttggaatcgcatgaagcagtgctctcgtgtacggatgggttggatgttcgaagatctcttctgtggttccctcttccatgatcagacccccgtacatcacttcgatccgtttcgccagagaagctaccaccccgagatcgtgggtgatcagaataatattcatctgctcattttcatttaactgtttgagaagctgcagaatctgtgcctggatggttacatccagtgcggttgtcggttcatcggcgatcagcagccgcggctggcagcacagtgccattgcgatcatgacacgctgtctcataccaccggaaaattcatggggatactgatccatccggctttctgccgacgggattcctacctttcccagcatatcgatggctacttttcttgcttctgccttgctcaggttctgatgacgtcggagtacctcgatcatatgatacccgatctttttcagcggattcagggcagtcatcggatcctggaagatcattgccatatcttttccacgcattttccgtttttctttttcggacatggacagcagatccttctgcaacagttccagatgatctgcctgcacatctgcattttctccgagaagtcccatgactgacttcatggttacacttttcccacttccggactctcctacaatagccagaatatctccttcatccacatggagggagacaccgcgcaccgcctgaatcttctgtttgtgactctcaaacgtagtggtcagattgtctatggttaatactctgttttctttcatctccactcctcctatttgcttgcgtccatgacacggggatctacatagattcgaagcagattgcccagtttgttgaacgcaaagatggtcagcatgatcaaaagaccggggatgatcgccatgtaaacggcattctgcaggttactctgcgcactctgcagtaattttccccaagaagacagcggttcctgaatacctatccctaagaaactcagggatgactctgtcatgatcgcattggagatactggtggtcgctgcaataatgatcgtcggcagtaccgaaggaatcagatgacggagtaccattttaaataacggcacgccggcaaaatccgcatagaggacgtactccctctctttgacggacataacctccgcacgcaccaggcgggcaatttccatccaggagaagaatccgatcacgataataatggacaccagtccctgtttgaagaaaatactgataaccgtaaccagaatcagccacggaatggactgcagaatgtcaacgattcgcatcaggataccatctatgataccaccgagataaccggcaaggatcccaacagtgacaccgatggtcacactcatcatcatggcaagcacgccgaccagcagggacacacggcctccgtagataacacgtgccagataatcacgacccacttcatcggttccgaaaatatgggcactgcttggtgcctctaacatatgagcgacatcggttttattcggttccatcgggagtaccggagccagtaaggataatatcaggatcagtgcaaggaagataatagaaaatattgcgattttgtcgtgttttaatgcctcccagacattttccagacgttttttttgagaatgattcattgccatacgattaccccatctttctgatacgcggatctgtcacgcagtataaaatatcggacagcaggtttcccaggactaccagggtggaagacaatatcaaaacgatcataacaatcggatagtccataccctgtaccgccttgataaaatacggtccgatacccggccagctgaatacggtttccgtgataaccgcacctgttaccagcgttggcaatgccatacccagttttgtgataaccggaagcagtacgttcttacagacatgtttgaacatgatctctgctttggaagcaccaaatgccttctgtaccataacataatcctcggagtactgtgtgatcgtggaagaacgcacataacgcacattgtccgggataaatgccagtgtcagcaccagatacggtgtaataaaatgcaacaggaaatcagacaaggtattcacgcctaccgtatgcatgccaaggatcggaaggatccgcagtttatagccgaacagatagataaagagcatcgctacccagaaagtcggcatcgcgatccacagggaacagatcccgtcgatcagtttgtccagccatttgtttttgtgagaaccggccaccaggcccagcacgattgagatcacataggcagtcagataagacggcagcaccagcttgatcgtgttcgggattcttgtcgccagctcatcgaaaatattcgtttttgtcacgatagaatagccgaagtttccattcaggattccttccagccagcggatatactgcacatagaccggctgatcatagccgtatttttcacggatcatctgtaccatctccggagacatctttggagttgtcatggcatcaattgcatcatacggtgccagatgaatcagagaaaaacacaggatcgtgatcacgatgatcagtgggatcgcagtaagaatacgtttgaaaatatactttgccatacctttttctccttttgtttttcattcttaagcccaaaaagcggaactcttcgcctgtttcagaagaattccgccctcattataaatagtgtctaatctttgatgattacttattcagcaattttcagactggaagtatcctcgaaggtatataccggaacaagtcctgtatcttccacaccctggattctgttgtttacaaccaggatcttgttgttggaaatgatcggatagaaagcacctgtatcctggacagctgcctgcagttttgcataggtttcctttcttgcagactcatccaattcagaacgaccttcctcaaacagctgatcgatggtatcgtatccactgtagtgcatgtagttgtaagcaccatcattttcaaacaggctggagaaggtatccgggtcaatacccatgatataaccgcccagatacatatcgtactcgttatccggatccttcattgcgtttgcaatggctgttccgtctccgccggcaagttctacggttactccaacttccttcagctgttcctgaatcagcagagcctgtgcggactgtaccgcatcactggacatataaccaagtttcagcttcagaccacttacgcctgcatcttccagcatgctttttgctttgtcaacatcctgctcgtatttttccacaccatcttctgtatagaactggctgtttgttggcaggaaagtatacggaatactataatattcagaagattcaaacgctgcatcatccatggcttttctgtccatagcatacagcagtgctttacggactttttcatctgttacacgattgcagttgatctccagatagccaacacgtccttcactgtaggagtaagtagacaggttgcttgcatccagatccagctttttcacctgctgcggtgtcatctggtaagcatctacttcaccattctgcagggcaaggattgctgtgtctgcgttctcgataatctggaatacaacatttttgattgatggttcgcccttataataattctcgtttgcttcgaatttcagatatgagcctgactgatagtctaccagtttgtaaggaccggttcctacggagttcatgttgtaatcgttatgctcaaaatctgtgacatctttgtagatgtgctccggcataatgaaaatctgacttaacatctcgatagccgtaggtgttacgaacgggaatgtgaaagatacggtgtagtcatccactttttccacttttaccgttccctgatcgtaaaccagctgagaataagcccagccaaggttatcctcctgttccatggcttcgtatgtgaataccacgtcatctgcggtaaatggttcaccgtcagaccatttcacatcatctctcagtttaaatgtataggtcagattgtcatcggatacgctataatctgtagccaggaaccagttaattccatcggcattattcatatacagtggggagtagatcatctttacagtagataatccccaacggtcagatgttgtaataacattgacagtctctgtagggtccccggagatggcataggtaaatgtgctgtcaccagaagtctctgtggtagctgtactgctgtcggcagtggttgtgcctgctgtactgtcatcttctgcaaccggatcttttccgccacaggctgtcagacttgctgcaagcatcgctgtcagagtaagtacagatacaagttttttgaatcttttcattttactctttctcctccttatttggcctgattttttaacaatcatactttatcatgttagcaaaggaaggtacatttgtcaattcattttcgccataaacatagttttttggtatgtttctgattcgttcactgataatatcccgcgaggtgtttttggtattgttctcacaaatcgaaaaaagcccggaaataaccggtgatttttccggtttccggacttttctcaggtcatcagctgcttttttcacagcttctgacttcacatgccatcttcacatttcttgttgttatattttttacgccctgtcccagaagctcccggaaccgttcctcatcattgacggtccagacggacagatcaatatcattttcaccggtcacacggataaattcttctgtggcaatcttttcatttacattcacggtatgtattccgtattttctgcaggctctgctgattttgtatgccgcctgttcaaaaagaagatcctctttttgttccttataaatatccggaagatattcctcgatgttccagaacacttccacatctctccagatacaggattctgtcaccggaaccggacggacacttccggaataaaggatctgctctgtcttcagtccggatatcagggccagctgacgaaccgccacttccagcccacactctttcagatcgcagttgatccgcatccccggatattttcccatcatacggaatacatcggcaagacgtaccgcatcttcatctgtcttatcgtgggacagaatcagaattccgttttctcccatccgcacatctacttccagtgcatcggctcctgtctgcatcgcatacgctacgaattccagactgttttctttcgttccgtccgctccggaatgggcggttatcatagtctctcccattatttttcccagtccttttctttcagatttgtatagatataaactgctgcagacactgaacagatcaggaacatgatcacagacagtgctgcggaacgattgtaggacagatatttgttaaactgatcgtacagagcgataccgagcatcttcggtgagttgccgcccatcaggtacggagtggtaaaggaacccacattggacataaatacaaacgtggatgccaccaccacatctttcatggacagtggcaggatcatgctggtgaaggttttccatcttcccgcaccgctgtctctcgatgcctcaatgatcgaatccgggatcgctcccagtcctgcggcgatcatcatggttgcaaacgggatgttaaaccacatattcatcacgatgataccacttgcatgatacatcagccccagcttgatgtccagtccgaacagcagaccgatccggttgatcagtccagaatcacggatgatcgtgatcatcgcatacacggcacacatggtcggtacaaatcgcggaagcagatacagcatgccgatggctctcgagatccgggatttgacaaaccgcagatacagtgccagaagatacgccagcacaatggcgatcacaaccgtcacgatgacgacaaacagggtgtacagcaggttgtttctctgtgcggtttcggtaaaaaagtaggtatagtttgctgtggtaaatgcgccggtatcctcatcctgaaaactctggatcactgcggatacgatcggataagcgaccgtcagcattaccaccaggaatgccggcagcaccattccgtacgctgccagcagtccttttgtcttattcttcatatttgctcctttggatctgactctagttcagagttccgatctcgttatcccatttttcgttgaagtctgtagacagatctccgatagacatgatacggaagttgctgacatccaggctttccacatcttcataaccggtcatatccagctgtgcggtatcgatcagcggaattgctgccatctgttttaccagaatctcctgtgcatctgtggtaaggatgtagttcatgaatgcgtaagcgccttcttcgttggaaccgaaggtcgggattgccagagactggagagaaccggtcagagacggatcgatctgtgtgatcttaatggtgtcttttaaggttccttccgctctctgggacagtaccatatctgcccagttcggacacatatcgatctcaccctggttcagcaggtccagagcaccctggtttttgctcgggtaaaccacagaaccgccggactgatacatatacgggtgaatggatttcaggaagtcaaatccttcggtccactggtcttcccaggaaggatcgtcagaggtaatcgcctcttccggcatgtagttgtatacggaagtacgcacgaaagaatctccggctccaccggttcccggtgcattgtaggcgaatcttcccgggttatccttcatccactgtaccagctcatccatagtcttcggcggtgtcggtactttttcggaatcgtaagccagaataacggtagttccacgataagcctgtacataatccgttgccagagcgctttttgcttctacattttcagaattcgggattttgttcttatccagttttacaaaagcttcctctccgatctgggaaatcactttggacagatcatcaccacccagatctaccagatcataatctgtatccgtctgttttgctttgtaagcggctgccagcatatctgtcatggactgtgttccggtaccactcagcataaactgcagttctgcctgatatttgtctgcatattcggaattattattaaaatcatcgatcagtgtctcaaaaacctgacgtacattatcagaaccactggcccagatcgtcagtgttgattttccatctgtactttcctgtgtctgtgcactgtctgtacctgcaccgtcagaacctccctgtgcacctgttccacatcctgccatagataccagcatcattccggcaagcatcgctgccattacttttttcattttcattttttcatttctcctcatttgcttttgttatggattcttctatatgatgatgtcagaagcagacattagctgcccccggcttattgtctcactgtcttacgcagcctgggaaaataccgtgtgttttccgatcgtgagatttaccagatctccctcgcgaagctgatcactcagttcccggtcgacataacatttgatgatctcatttccacgctgtactgtcagaaccacataatggccgagcatcatgatcgtgcggacaactgcttccatcggaccgtgtcccttgttgactacgatatcctccggacggactgcaatcgtgctgccgccattccggataaagttcatctccccgatgaaggatgccacatgaagggttgccgggctgtcgtagatttctcccggtgttcctacctgatcaaattttcctttgttcataaccacgatccggtgggacagtgccatcgcctcctcctggtcatgggttacgaaaataaccgtgataccgaggtcgctctggatctttttcagctcctcacgcatctgctggcggatcttcgcatccagtgcggaaaatggctcgtccaacagtaacagagatggttttaacaacagggagcgggcaatcgcgattcgttgctgctgaccaccggagagctgtcccggatattttttctcaaaaccgctcatggaaaccagttccagcatctttttaatctctgcatctatctcctttttcggaatcttccgcagttttaagccgaatgccagattttcatagatggtcatatgcggccagagattataactctgaaacaccatagcggtcggtcttttttccggtggcagattcacaatggactgtccgtccaccagaatatccccgtcagtcacatccatgaacccaccgatggttcttaagatcgtggattttccacatccggaaggtccgaggaaggttacgatttctccttcgtacactttcagattaatgtgttccacaccgtctccgttatcgtatttttttgccatatcttttaattccagttttacttttcgttcttccatactaacttctttctatcctcctggatattctttcactttttatttcatcttgaaaccaccggcaattgcttccggtccgatatattttctcatcacaaagatcagcagtgccgacggaatgatcagcagaatggcaaataccgcaccgatctggatcgcggagctgtcaagcacgattccgtacatggctaccggcatggtctggattctcgcaagacctaccagcatcgttccctgtgcctcttccatggaaccaaggaaggtgtacagggtagcaactgcgattcccggcatcgccatcggcagtgtcaccttgaagaaggtacggaccggacttgcaccagcatccctcgcagcttcctcctgctgccggtgtacgttgcggaacgcactcgagggcagccataccataaacatcatggagttgatcatgtgaatgataattactccggcatatgttcccatcagtccgtatttgtaaaataaaacggcgatggaagtgtagatgcccagctttgggaatgcattggtcagcaggaaggacagcataaatacttttcttcccggatactgaaatctcgccaatgagtacgccgccggaatacagaagatcatcgagatcacagtcgtcgcaatcgcgatgataaaggactggatcatcgaagacaccagactcttctgtccgaacacatacccccaccacttaaagccccactcctttggaagtactgacggcacattatattcatttgcaaacgctaacatcagcatattcaacagcggtccgtaaaagaataagataaatacggccagcaggataaattccagaaacttcttctttccaacggcatgataaaaccgtctcggatttaacatcttaaacatctttttcgttctcctttccgaaagacagagtatcatgcccgggcggggtgcttctatcgtagttttgtaaagttgtgttaatttttcgtaattcacatacaatttacagaacttttatttgggcattgcggacgaaccaaatacgctccgcacgctttgctcattatcacagcattcgctcgccatggaacttgcaggcaattattgatatgcaatgccaaaaaagaacctgccagcagttcataattctctgctgacaggttctgtcattcttttttatctttattctttttccttaattaaatgcaaacactgcaacttcatatggagccagcggatatgccacatggtatggctgtccgtcacattctcccttgaccggtttgaataccggattgtccacatgatgctgtccgccgtaagccgggtctgcactgctcaggattaatttacactgtttcttctgcggtacacctacccagtagtctttccgttctaccggagtaaagttgcagacaaacagcaggttgtttcttttcgtcggtgaccagcggatgaaactgtagatgcttctgtctgcatcattggcattgatccactgaaaaccatcatagccattggcatccgcatacagtgccggatattttttatacatcatctgcaaatctcttacataatcctgtaactgctgatgtcttgcctcacggagcagataccagtcaagctctctcgcctcactccactcctgaaactgtccgaactcctgtcccataaaaagcagtttcttacccgggtgacccatcatgaaggaatatccggctttcagattctcaaatttgtcatcgtactctccgggcatcttgttgatcatggagcatttcagatggacaacttcatcatgagacagtaccagaatatactcctcgctgaaggcatacgtcatggagaaggtcatcttattatggttgaattttctgaaatacggatccaatttcatatactccaggaaatcgtgcatccatcccatgttccacttaaacgtgaatccgagaccgttctctttttccacatctccggttactttcggccatgcagtagactcttcagcgatcatcatggttcctttgtttcttccaagaatcagagtattcagatgcttgaaaaattcaatagcctccaggttctcgttaccgccatatttgttcgcgatccactgtccgtctttctttccataatccagatacagcatggacgccactgcatccacacgcagaccgtctacatggaactcttcgatccagtacagtgcgttcgcgatcaggaaattcttgacttcgttttttccataattaaagatcttggtaccccagtccggatgctctccctgacgtgggtcagaatgctcgtagatacaggttccgtcaaactctgccagtccgtgagcatctttcggaaaatgcgccggtacccagtcgaggatgacaccgatcttatttttatgtaaataattgaccagatatttgaattctttcggagatccgaaacgggcggtcggtgcatagtaaccggtaacctgataaccccaggagccgtcaaacggatgctccgcgatgcccatcagttccacatgagtataacccatacgttttacataatctgccagctcatgtgccagttcccgatagctgtagaagccgtccggatctccatcggaagccggatgctttttccaggaacccggatgtacttcatagatggaaagagcagctcttctcggatccgtctcttttctctttttcaaccatgcggcatcgccccatttgaaacctgtgatatccgcgatacgtgatgcattgcccgggcgcatctcagaccagcttgcataaggatctgctttgtacagcagtcttccatccatggcacggatacagaatttatacagatctcccactttggctcccgcaacaaaagtctcccagacaccgatcggtcctgtctttttcatcggatggcgctccggatcccagtcattaaactcaccgacaacagaaacatcctctgcgttcggtgcccatactgcaaaatacgtgccgctttttccattctgtgttaccggatgcgctcccagtttcttataaatatcataatgcgttgcctgaccaaacaaatattgatccagttccccaaactccatctttgccatatccccgtctcctttttcttttatcttaactgtctttccagttatttttcacactcatacatgcaactgttccatactttcgcagttatgaataaataccgtacaggaactgccggacgatctcatacgttctctgatccgtcatcaccagtccgtgttcttcatcctgctctcttcccagcatcatcatatgggaatccaaaatccccatgaagctcacggcaaactgctcctgacggccgcccatatttcccagacggtctgcagaatcctcgaagatccgcaccacaagctggtaatacttctggatcagcggatacaccgtacggaatccttccgatttttttccggaataaaactgactcagcataaacagataaaactgccaatggcttcccgcaaaatcaaaatatgctctcgccacacgatataacacctgcgggacatcccccggttcttccactgctttttccagcatctcttccagaatacgactgttctcctcaaggatcgtttccatcagtccctgcttgcttccaaaataataatacaacgtcggttttgtaattccggactgttctgcaatctcctgcaccccaaccgcatcatatccacgggcacaaaacagttccagcgctttttccatgatcagctgccgattatccatctgtctcagcccctttccttatatttatcagctgttgatccgtaattttgcaaggtaatcccctgtctttttatattataccaatcggtatataaggtgtcaacgcaatcttctctttctgattcttgcttttttaccaaaaaaagtaattatttttcattaattttcacaaaatcttcagatatgttttcctgtatttgtggtacaataaaatctgaaattctaacaagggggagtaaactatgaaatgtccatcgtgtggtgctgaagtcaccggtcgtttttgcagctactgcggtgcaccgcttccggctgtttccaatgacaatatttcagtcacaaaaaatacagataccgatcatctggtggatgactggcagtccttcgatgattatgtaaaccgcaactcatcaaaaccagtcgctgataacggcaacagtaccggtagtcctgcttccggtaaaaatgagactcccgctgccagacgtcgggaagagaacaaaaaaaatccaaactccggttccggcagatctagaaatactgccacaaaccagcatacgattcataaaactaccacgcagaaaaccaaaaccaagcgaaaaaagaagaaaaaagggggcggactcctatctgcagccacttctttaaccaccggaagcgtaaaactgggaggaaccctgttttatcttgtgatccagtggatctgcgtagccctgatggctttgtccacccttcgtatggcacagaacttctgggccaaccgggtgaccctgggttccatcgccggcgtagtccaggaaaagaattatgcccagggaatctatctgattggggcactgatctgtgtgggctttggttgtatccaggcactgtggatcgccagcagaaaacgaatgccggatcacggcaagatccgccaggtagatatgggacggggactgttcggtttcgttgttctggttcttctggcatttgtatccacttatgcctatcccatccttcccgctagcccggctccgctggaaggagccaaattgttcttccatatcgtggatgatctgggcaaatcctttttgttcatgaatgtaatcggagcagttttgtgtgtggtgcgtaagatggggacacggtagtcgccagggtaccatgcagacacagactttggctcgttgctcgcgtaacttaaaaagcagaggaaatcgttcttcatgaacagatttcctctgcttttttttcacatattcaggcaaaacaattcgtttttatctcggccagcgatcttctttaccaggaagttccgggaagctgttatgtggttctgcctgataccagtatgccacacttgccacatcatcctgtctctcgaataatcctctgtatcccacaccgatctgctggatcgtcactttcagatcctcatcgaaacagatcggatcctggatatgccagcggtaaaaacctctcatcggcataacatcgtcattgtgatagaaattgtgaatcaactcatcgtgagaagaataatatggatatcccagataaggtgtgcaataattctgttccaccgtcttaccgtctacctgcttagcaaagctccaggaaccaccgaaataatcttctgttcctgttccgcagatggtaggatattcttcatctccgtcgatatagaacttaacctcaccttcaccccaccagtaacgctccagtgttgtcagtgccatataagtacctacatagtgaccttttcctttgacattatcaaggattacataatctttctgcaactgagtgatcttttctcttctccactgtgcatggaagtaagcgatatcctccggcagtccctcatcatacaggcaataatccacctggtagaagaatgctggaattgaattgacatgctggttttccagagtgattcttgctttttttctgaaaggcatctggaaataacagttcaatcctctgcttggcactactgcgatcggcatagaatttacattgcattctctaccaaaaccacagcagaaaaagtctcccagcgggctttctacagacggttcctcttcatcatcccagtacatacgaagaaccagatctctcagtacaaagcaatctgcgtctgtggttttcgcatccacggtaatccagatatggttgatcgcaccaggtccttcaatctctgccagtgtcactgtctgaccacttgcgatatcgttaagacacgggcttccttttctggaaggtccgagatcactggctgccataccgccttttcctttttctcctcttggattttccgcattgatcgcgcggctttttctgtgtttcgccaatgcaagattgcttaaagttccaccaaattcgttatacattctcatgtcctccttctagtctccgaatagcatcaggcttttattccttttgccattatatcatccataacctctttttaaaagaccctaaaaaacatatttctttctgattcctctatccacgggagatatttgaccggataataacctgtgatctatgtatatagcaatcgccaaggtctcatgcaggcatggactttggctcgttgtttgcgtaaatacaatagccgggcaaaactcacccggccatgttatttttattctactgctttatacagttttaccggaaaatcatctgcgcaaagtccgtaaagcacggtctccacacattccagtcatgtccgcccggatagattttcctgatttcatggacacctttctcctggatgattgcatcctcttccagaaatctggaaaggaaacagtcattatctccgatacaccggaaaaaggtatgaaaatagttattaaagtccggatcgtccatcgccttcagatgaatctgctcataaggttttcttccgaccgcatcccggtccggattgccttcgatgttttctcttataaaacctgagaagatgccgacttcgctgaacaggtcaggatggtcgcatatcgtccgggttgtctgtacagaacccatggacaagcctgccatacctctcttttccttacaaccgccaaactgatattttttctctgccatcggaataatttcctctaccagcatccgttccagcaaaacatggtttaatcgttcttctgagccgaccttttcctgtaccatgccgtcactcatcacaagtgcaaaaggttttatttttcccatttcgatcaggttatccagtatgatattggcttttccggttgttgtccaggaaatctcactctcaccgaatccatgctgcagatacagaaccggaaggcctgcggatggtacgcatggtgggaggtaaacgatgaatcgttcccagctattggaaatctcagacttatagaattcatgggtcagcgttccatgcgggatgtcacgaatctcagccagcttcttttcatccggcagttcaatataattgtataaacggccatatccatgtccgatcggcagatccggatgcagaacctcctgtccgtccacacagatctgcacataattcacagctgtggaaaacggaagttccagaatccacttttctccgtcttttacaaatgaataggtcttatcatcccactttaaagaaagctcttttgcattttcacagtccagctgcaaaaaatactttccgtctttttgaaaaagtgtactattttgttccatatttcacctctagaatttcatctgtttgcatgttctgacgccattgacgtagatatcgtttgccagttctgtgacaagccgcatatcctgccaagtttcacacctttctcccataaaagtaatgttatcaaagtgaatatcatggacacgcacttcttctgtcggtgtctggaatccacggatcgtagaaacggggatatctccgtttaatacctgaatgttgtcaaaatagatatcatggatctctccttttgccatctgctctgtatatctgcaaagcagaaccttgatatcaaacagtttctgttccgcctgttctactctgatatttttataatggatatcatgaacgtgtcctccatctgcctggtggatagaaagtgcggcaccgcccatatttccttcgtactggcagtggatgatatcacagtcttcgaataccagatcatgaatctcactctggagagcataaccaagctctatggcattaccaggttctgcattccagattacgttattgtgaacgcgcacttttgtcacatcccttactgttgaaggatccttaaacagcccctgggatttgatgcagatactgtcatctgtggaacggacaaagcagtttttcacctccacatcctggctgctggtgatatcaattccgtctcctgttacgattcttgacataatattcatatcatcaatgacaacatgatcacaggctgccggaaccacatgccaggatggtccgtctactgcagtaaatccttttaagagaacattcttacaccatttgatataaataaagaaacgatgtgcattgctatccggcagatgccaacaggctccgttgacaattccgtttcccacgatggaaatattttcactatgttctgcatagatacatccggaaacaacagcaccttcctcgatatagaccgtatcatttgatttcagggtaagaactcctacattgtatgccttacctttttcaaaacaaatagtggtattttccggtttttcgattctgcgagaacagaatacaaacagggcgtcatggagaccaccgtctgtctctactgtgaattttctcggttcatcgagatgaatatgaacggtctctccttttacagaaggttctattccgaaactggtgggccggatggccagttctttaaacggtgtatggatggaaatttccagatcatatgcctcattgtctactactaccacataatcgaatgaatctgtatggtataccacacgttctgttccgttgcagattacactgtatttttctgatttctccagttcatctacagaatttaagacaaatctcggttcctcaatgggatccggattgggataataaatcaaatccttttcaaagtctttcatcggtctcttccttctccttatacttaaatatctatctcactgcttccccattcatggtcgctgctgtttcccacactgatccgaagtttcattccgctgctgacaatttccatatttttatcataataagaaaattctttcgggtcaatatagaaatccacattcttcttttctcccggatccagaaagactttctgaaagcggacaagttctttctgcggacgcaccacagatgcatgcaatgtttcgtagtagcactgaacgacctctgcccccgcaacattacctgtgttacttaccttgcaatgcacatgaactcttttgtcctgtcccatccgaacttcaacatccgaaatatcaaactctgtataggataatccaaaaccaaatggatataatggtgtgttgggaatatccatatatctgctggtgaaacggttctccaggttatccgcagtaagtacatgtccggtttttatatcccagtaacttatcggcacctgtcccacacaccatggaatacttacagccagttttcccgaaggattggttatgccatacacaagatctgtgatcgctcccgctcccatggttcccggtctccatgccatgatgacggctttggatttttctgtgattctccgcagatccaacggtcttcctgagatgaccactgtcacgatattatccgtgcgttttgctattttttcaaaaagcatctgctgctcttccggcaaagtcagaaacgctctgctggcagcctctccggactgagattcatgttccccaagtacacatacaactgtatcttcccgggttatcgtttccagccactgctcatctatttcttcatccgaatcatcctgttccacctgccagatcttgcattcttcctcagtaagcatcctgcagcccgcaatacattccgcattcattttcttctcctgaagaatagcttcgattgtttccacaggctcatgctcaccaaagattgcccagcggctcaggaattccttggatgtcacataaggtcctgcccagatgactttctgtttctgacacaagggcagtatttcttcatttttcaaaaggacgcagctttcgctggccatctgatatgcttttgtccggttatgcagggtcagttttccactctttccaagacctgcaaaggggttttcaaaaagtcccagctgattcttcatcatcagaacccggaatgcgctttcgtcgataaaggattccggaatctgtccgttcttcaccagttcttccagtcggaacatataagcagggctcatcatatctatatccactccggcttctatagcctgaaccgccgcttcatccatatcggctgccacaccctgttcttccagctgtccgatggaaccccagtctgagatcactgtaccatcaaattcttctttatcccgcagaaggtctctgagaagttccttattcccactgatcggttttcggtctatggcattaaaagcggtcataaccatagctggtttcgccttcagggccatgcggaaaggttttacatactgttccaagaatgtccgttgggatatttcaacatcgttatattcccggcctgcattcactgctccgtaacctgcaaaatgtttcagacatgctgcgattccttcatcgcttttctgctgatagccatctaccatggcttctcccatgactccgttcacatatgggtcttcaccaaaagattccagcatcctgccccaccggggatcccttgaaacatcgatcatcggagaaaaggttgccttaagtccttcagaagatgcctcagaggcagctattgatgctgcctctgacgccagttccggatgaaaggaacatgcctgccccagtggaatcgggaaaatcgtccggcatccatggatcacatctgccataaagagtagcgggatatgatggggatgctgttccatatatttgctctgaatatcacatattttttctttaccgatcactcccagtacggagcctgcatactgaatgacccattccggcggtaattgttcgccgacaactccggtaagcactgcctctttgtcaaaatatacaccggtaagctgtaccatctgtcctattttttcctgcaaagacatttctgacagcaattgctgcaatttatgtatttccatgattactccttatgtttaatctgttgtacctgtaaaggtactgaacagttaccatctttttttatttctttccactacagtgtttcgtaaataactgtattattcacgcaggatacggattcgagtgcgcaggtccaaaacgtagacgtagcagtctacgttttggacctgcacggtcagattactttttaatcaaaataaattgtcttaccgctctttgctgactcatagattgcttccagtacacgggtgacaactgcagcctgtgcaggttttac

SEQ ID NO: 2454 - DNA, 8945 bp, Unknown
  gut microbiota DNA sequence
aaataaccggatacccggctgatgataaagaacaggcacgcacccagaataataacagccaccagataaatacttgccagttttgcattgatataaaaagacatgaacatcgcacagaccatactgatcggtgcccgcacgaacatgcgaagcagcatctggtatgcattctgaacattggttacatccgtggtcagtcgtgtgatcagtccggcggtactgaaccggtcgatattggaaaatgaaaactgctgaatgttttcatacatggcttttcgcaggtttcttgcaaatcctgcggaagcattggctccacagacaccacccatgatacctgcatacagaccgatcagtgctgccacgatcatccatccgcctatgatacagatatggcggatatctcctttctccacaccatcatcgatgatagatgccatgagaaaaggaatcagcatctccatcagaacttccagaatcataaataacggagtcttgatggaatctttcttgaactctttgatctgagctcccagcgttttaagcattactctctcctcctgtttgtttctccctgttgaatctcgatattagaacgcatcttacggattacccggaaaaacacttccagatcttcgtccgagattccctgacgaagtgtgctttccagccggttgatgttgcggatcgttccttcctgcatcttgataccaacttccgtcagctccagtttctttaaccgggcatctcgttccacactgactctgcggatatatcctcttttttccatcaacttcaggatccctgtcgctgtggacctggctatggaaaattccgcctcaatatcccgctgataaatatcttcttcggaatgctcatatagaaaccggataatccagctttgcatcatcgtcaattcctcgcctcccatcgctgcacgataggcggtcatccgactgtgaatctcattttccagccgtttattttcaaatccgatgtgatccctgtattctactttcagcatcctgtgacctcctttctgtttgttcggatgcgaacagttcggtagcgttcgttcgttcacgaactattttatgacacatttcctcgtttgtcaataccagctcccggcaaaatattgtaaatcaaacttggtctaccggaccaattattgatatacaatgcaaaaaagatgcaggttgtatttctacaacctgcatccatcttatctttctgcatcttccggttcacaccatctgaatacattttcttttatataattttagatctcagccagtttcagcagatccgggatcttggattcccatccgagagccatgatatgaacaccctggcagtatggcttacactctttgatgatacgtgcagcgatctctacgccggtgatacctgcttttgttctttctttgtctgctttcagttcttcgatcatctcatccggaacatggataccggcaacgttattgttcatgaattttaccataccggctgatttcgggatgatgataccaacctgtaccggttttccgaactgttttgctttttccatgaatttgatgaatttttccggctcaaaaacagcctgtgtctggaaatattctgcaccggcagctacttttctttccatcttagccagctgtgcgtcaacggaatcgctgcatggagatacaacagcacctttggagaacttcggcggttcgccaaccagctgattgccacccagatctacgccttcttccagcagttttacggtatgtaacagagatacggaatccaggtcaaataccggttttgcctgtggatggtcacccatcttggtatggtcaccggtcagacacaggatgttgtcgataccgaacattgctgcgctcagaagatcagattccagagcgatacggtttctgtcacgacaggcaagctggaaaatcgggttcattcctgcatctttcaggactttacacatagccagagagccaagacgcataacagaagactgattatcggttacattgactgcatgaacatctttcagataagtttttgcttcttctaccagttcgtccacgtggatcccttttggcggtcctacttctgcagaaactacaaattcaccacggtcgaataattctttcattttcattatacattgctccaatcatattaaaatttgtatagatgcatcgtattatgtatcttaattatgttattttgccacttcgtcgtcagtagcaaaattatgaatctgtgtcgggcatttcagtacatccagacgtccaatggcttcgagtcgtctgtagatacgttcccatccacattccatcgtattgtcaacttcacacatgccgttcttggaaccgccgcactgtccgttgacaaggctcttggaacatgctgtgatcgggcagattccaccggtcaggttcagataacattcaccgcactggtcacatttgtactctaacggtgtcacaccctggaaaccaggaagcggataggtatcgcaggctgcgcataccttcttgtcgtccagatattctgcgattgtctgtacgccaacaccacaggagaatactaaaaccagatcagaggcctggatcttctccatatgttttttcaggcgtaattccatattttccggattacagatataatcggtagtcatgattcctgttacattgccttcagcggagagttccttctgaagttctacagcttctttttccggaaaatgcacttctttacatccatggcagttgatgatgaaaacttttttccctgccaccagagagttgatcatctctttgtcttttaactgggtaattaacatattatttcatcccccttactgcattttttccggctttgattctgtcaataatcgagatcttggaagaacagatatactggcagcagcgacattccacgcaatccatgacgtgcatgtctctcattccttcccagttctcctgatctgcatattttacaaaatacagcggtgaaagttccatcggacaaacatctacgcagcggccgcacttgatgcaggcctgctcttttgtctcatcggtatcgatcgcgatgataccgttggagcccttcatcatcggtacttccaggtcttttaacgggaatcccatcatcggtccgcccatcttaaccagaacatcatcatcggtgaatccgccacagtaatcgatcagttcttttacgctggtaccgatcttgatgacaaagttgcccggatgtttgattttctcgccggttacggttgcaacacgctcgatcagcggcatacctttctggatcgcatcggaaatcgctttcacagtactgatattatctaccacaacgccaacatctgccgggagaccgccgcttggaacctgtctgcccatgacacgtttgatcagagttttctcagcaccctgcgggtatttggttcttgctacaaatacttccatattaccgatattggcaactttttcctgcatcagttcaatggcatccggtttgttatcttcaatgacgataatacctttttcagcacctgttgtcttcaggattgcttttaaaccatagatgatatcgtctgcatattccagaagtactctgtggtctgcggtcagcagaggctcacattcacatccgttcagaagaatggtgtctaccggtttcgccggtttcagtttcacacaggtcgggaaacctgctccacccataccaacgatacctgcttcgcggatgatatcaatgatctcgtccggagtcaggttgtccagatctttatgcggctgtacggattcgtgcagagtatttttaccatccgattcaataacaacagccatcacttcactgcctctggttccatgcatacgaggctctacagcaactacggttccgcttacgctggaatgtaccggagcactgataaatcctgctgcttcgccgatcttctgaccaacctttacggtatccccaactgcaacgatcgggttcgccggagcgcccagatgctgggacatggagatcacaaccgtcttcggatccgggaacttcttcagagcgatatgctcactgaattccttgcgttctgacggatgtacgccaccgtaatatccgttcagtctgtcttctctggcagctttcacatagtcgttgatgactttgaagtttactttggagaagtcacgtacctgtaccggctggttcaggaattcttccagacgaccctgttttgccagtctctgatagattttttcccatgcacagtctttattcgggtctacttcacactttccgttcttggctcctccacactgtccgttgacaagactcttcgagcagtcaacgatcggacagacaccaccggtaacgttcagatagcactgtgcacatgcgtcacagctctttttggtaagtgccataccgtgatgacctctgtagttgagcgtattacttgccgcaaccaccggttttccagccagatccgcaaccgtctggataccaagaccacaggagatcacaactacgttctctgttccttccggaagcagatcctgtaattttttctctgtgtgcatcttattacataagaaatcaaactttgcactgcctgtgacggtttttccctgctgtgcggcaaatgttaaaaattcgtcacaatccggctcatcaactgtttcaaattctttgaaacacttgttacaggcaatcacgaacagattgtctttgccttccagtactgatgtaagctcatcattgcttttcagcttatacttcgtataattttccaattgctcaccttccttgaaaagatttttatcctcattacctgtctttgcaaatcttgttcacctccgcacactcctgaaaaagaccgcaaaaacccgataaataagttcgtcctattaaatgtaacataatttcacaatattatccagttctattagcgatttctataaaatttttgcatgaaaagcacaaaattttttatttgtatctctaaaatcgttttatcaagccagttagtaatatctaatttcagacaagaactggggatccataaatttccaaaaaaaagcagccgcccggtcatatcatctgccggacggctgtttttgtattttcttgtatttatttttcttttgatatcacatgatacggtactgccacaaacactgctccgccgattatatttccgaccgttgccagcagtacggtatacagatactgaccgacagcgattcctccgtttgccacaccgattccgatgatgctcatatctgcgatgctgtgctcaaatccgcaggtcataaaaatcaaaatacaccagaaaatcatgatcagttttccggattccgttttcatcttggttccgcaccacactgcaagacagaccagaatattacacaggatcgcacgtaccaggatctgtccgacaccaagaccaacttttgccgaagaaattttgataaagtaatctgcgattgctccatctcccgctgtcggaagtccggtcagctggaaagccactacacagagcaaagaggcgatcagattgccgatccagcagacgcaccacagtttcacagtatccgcccaggatactttctttctcagggatgctgcagccatcaccagattgttaccggtgaataattcagcacctgccataactaccagactgagagcagatgcaaaagcaacactctgaatcagttttaccgcagccgctgcaccatttccatccatcgactgtcccagcacaaacgctaccatactgccaaatgaaataaacattcctgctaccatggatgagataaaatatcccagtggatttttcttcaacagattattttttgccacccctgcattacataatgccgtatactcttcatgaaacataactttttcctccttgtcatcacatttcattatctgtaaccgttcagccacaaaccattaccgtcttttcataatctctttggcatttccccataatttcttttttgcagacgcacctcctttttcgatgccctgatctttttcctgaaaggtaaaaaaagggcaacacttgtaactctacaaatgttgcccagacggtcggcatcctgcaaatctgattcccctgtggtaatccacatttctccgtcagtaatcagattttctgcattcattgtataagttttataaaacttatcttctctagctttaatttatcaccatattgacggaatgtcaaccgaatttcataaaattgtcgaaatatttctctttccgcagagaatatcccgcgaggtgttttttgtgagcgaaggtcacagaaaacccaagacatacggcgcgaatttatgcgcatgcataaattctgtgcatcgcgaagcgtttgtcctgagtgcaaagcaatcaggacagtaaacgtgttgcccatacagcatttgcgtaattcacgccatggctgcaaataccggatcttgtgctggctgcctctacggttctgccgttaccgatatagataactacatgataaacctgtccgtttttcgcatagaagatcaggtctccaggtgctgcttcgctgaccgggattttcattccgtactgagactgtgcagcagatgttctcggaagaccgatcccgaactgtgcatatacatgctgtgcaaaaccggaacagtctgctccgtgaaccggatcggttccaccccatacatacgggttaccgataaactgcaatgcataattgatcagcgcctgacgggtcggattctccacagatgcttctttcacagatttgaatgtatagtagcatactttattatcttccggtgcaacttcctgtgtcgcaagtccacatacggtttccggatcctgtcctgcatcggtataggtttttgctttttccgctgcttcgtcacccatcagcagatattcgctctttacaaatccacgaacgtcaccggattccacatatacccattctttgttcttgcttgccagtacatagcaaacctgattctgagataacgtaccgatgactcttgcatctgtatcttttccttcccggatgtttactttgtcggtgttgcagaatgcatattctttttctactactgtttttcctgctgttgtttttgtatacagaagatttttatttttcagcgggttcatcaactttgtcgctttttcaaataccggatgttcttctccggaaagttcctgtgcttcttcgatgatcagatctgccttacttcctgtattcaattcttctttccgaataaatcctctgactcttccggactcaacgaacacccagccgtcatcatcttcctgcaggatatagcagacaccgcctcccggtaaagatccggtagctacagcatcttcctcatcacttttttcttccaggatcagacagtcttttctcgcaaagccatacactttatctactgtagtcagacggaaatcctccttgatctccggtggaatcacgatctgctgacctgcgatcagttcttcgttacttccctgtgcttccggtgtcggtgtggcttccggcgttacctccggagtcgtctgcggcgttgttgtcgctgctgcctcctgtgttggctgcggtgtagccggtgtctccgttggcgttggtgttgtcggctgtgttggagccggtgtaggtgtcggcgtttccgttggtgtaggtgtcggcgtttccgttggtgtctctgtcggttccggcgttggtgtttcggtcggggtttccgtcggtgtctcggttggagtctccgtcggtgtcgtagtcggctccgaagacggaacttccgctgcctctgccgtcggtgttacctctgcctcttgtaccactcccacctgctcactcgctcctacggacaatggtgctaccggcataatcatgctggctgataaaactcctgcaaccagttttttccatttatgcatgtgttgcctccttgctcaatcaatacgtctcgtgtttgcataattcctattgcaactgcgattgtttctattatataactctactactggcttcgcaaggttttattggcaatttttcacatttttttatttccttttttattatattgtgataatttttatcatcaatagccaaacaaccacgatacgcaaaaagagatctgtaagtccgggagggccgggcgtcttacagatctcttcttttggatattctatgactactgcataataggaagaacttttctcaaactctttgtcagtcccagtgctaccgcgatcttgatcagatccgggatgatgaatgggaagacacaccagccaagtacagtcaccagaccaaccgatcctgcactgcgggtgtacatgatcataaaccagacagttccaaatacataacacacaatcagaccaactaccatctggactgccagtgcccatgtctttctgcccatcactttttccatgccccacataaccagagcacctaccaggaaacctattatgtagccaccggcgttgccaaacaagctgccgattccaccactaaatccggcaaataccggaacgccgactgcaccaagaagaatgtacaccagaatggaaagggtacctctcttacctccgagcacacctactgccaggaacacgccgaaggtctgtaatgtaaacggaacggtagccggtatggagatccaggaacaaatcgccattaccacagcaaataccgcaatgtacaccatgtcataagtcttgcctctgctcattgttgtcgttgtcattttttatatcctccattttttgctgcatttgggatgaaaattcttctcatcaccacgctggtattactatagcacctggagttttgattgtcaaccatacttttttatcggtttacattttatttttcacctattaacagctacggacacgga

SEQ ID NO: 2455 - DNA, 1662 bp, Unknown
  gut microbiota DNA sequence
ataatacttttcgtgatgtttcttctgtttctgttgtttggagtgattattcttttgttttattaagaatagaaagaatattcagcataaaaacatcacaaaaaagaaaaaaagattgacattcaagtatacttgaatgttatcataaaagtaaacaaaaaagaaagaagggtttttacaatgagtgttgatgtaacaaaaatgccgaaactcggtttcgggctgatgagactgccggagaaggacggggaactgaatctggagcagctttgtaagatggtggatgcgtatatgacatccggaatgaactattttgataccgcatatatgtactgcggaggaaaatctgagagcattatcaaaaaagcgcttgtagagcgttatccgcgtgacagctttacactgacaacgaaactgccacaatggatgatggatgaaggaatcgatggaagagaccggatctttaatgagcagctggcacgtaccggtgcgggatattttgattattatctgttacatagcgtagaagacggagcaaactatgaaggttacgtcaaatacgactgcttcaactgggcgatgaagaaaaaagaagaaggactgatccgtcatttcggtttctctttccatggaacaccggaactgctggataaaattctctccgagcatccggaagtagagatcgtacagatccagatgaattatgcagactgggagaatccgctggtacagtccggtcgattgtatgaagttcttcgcaaatacaacatgcctttcctggttatggagcctgtcaaaggcggttctcttgccagtgcgtctccggaagtagaggcagagatgaaaaagatcaaaccggacgcttccgtagcatcctgggcactgcgttttgcggcatctcttccgggcgttgccaccgtattgtccggcatgtccaacgaagagcagatgaatgacaacctgaagacatttaccaacttcgaaccactgtcggaaaaagagcggaaagtaatcgaaaaagcacaggaggaactgaagaaaaatccaaccgttccatgtacttcctgccgttactgctgcgatggatgtccacagcagatttccatcccggatgtcttccgtgcgttaaatacgatccgcctgtacggagaaaaagaccgtgcacagtcttattatgaaaaactgacacagacctccggaaaagcaggtgactgtatccagtgcggtcagtgcgagagtgtctgtccgcagcatctgtccattatttctctgctggaggaagcagctgaaaaactggagaaataataaaaaacggctgtgctatgcctgaaaagcataacagatggttcaaatatgtttcctgtattgctttttgtggggaaaaatgttaagatattagcaaatgaacacgagacaaagaatacctgcagagacgggagcgtacgctgcaggtattcttctgcaacagaaaggaacaacatatgaaaacaacactgattatcatggcagcgggtattggttccaggttcggaacagggatcaaacagctggcaaagatgtcggacaacggagagatcatcatggattactcgatctatgatgcaaaagaagcaggatttgacaaagtggtatttgtgatccgcaaagatatcgaggaagagt

SEQ ID NO: 2456 - DNA, 2251 bp, Unknown
  gut microbiota DNA sequence
gattttcctgtacttttttcttattaaaattgatactgttttccggtacgatactttcatcaatagtatccacatcgaacaaatgcaggcggttacatccggaatcatatcccggcacatcgatatcgtacagaacaccgtccattgtgaaatctttaaatggtactttacaggtaaaagactgtctgtttaaccagctttcttttgtgatccacggatttttcaattcctgctgtttgtgattggtgaatttctgctgaaacagaccaaaatgataattcagtccgataccgtctcccggaagaccaagcgtagcaatagaatccaagaagcaggcagccagacgtcccagtccgccatttccaagagaaggctccatttccagttcctcaatctcacacagttcatgtccatgagatttcaggactttttctgtctcctcatacagacccaggttgatcagattgttagataacaatttaccgatcaggaattctgcagagatataatacagtttcttcgatccctcgtttttcttcaggttaccggtcgcttcttttgtgatctccatcagtgcatgaaacagttcttcttttgtacatgtatccagtgtcttatgaaatcttttttccagtacttcctgtaatcttttttccataataattttctcctctaaataatctcctcaatttactgtttacatcgggcagttgactccctttgtattaactccccttcatagatcagctgccgtggcttttcttttcctttgatcagatcaaataaaagtcctgccgttgccttcccgatctcttccaccggctgacggatcgttgttagactcggaatataaaatcttccggcatccataccgtcaaatcccgccacagaacactcctcgggaacagatattcccgcctccttcaatgccctgcaggctccgatcgccagtgtatctgccgtcgcatagacggcggtaaatgtttctcttttcaaaagttcctgcatcagccggtaaccggactgataagagtatgtgtcccttttttcatccatgtaacacaccagttcttcccggtaagggatctgatactgctccagtgctgtccggtatcccatcagacgcagctttccgatactggcatcatttttcggggctgtaataaaagcaatttttttgtgccccagcccgatcagatactccgtcatcttatagctttccttaaaatcatccaccgatacggaagccagggatgcacccggcatccccaccgtacagatggtactgagtacgcagggaatctccatctgactgatcttttcctgactctgagaaaaacttcctcccagaaacaccagcccacgcagtcttttttcttttcccacacgaatcgccacgtcccactcatcttcctgttcgtccacatattgcaggatacagctgtaacccttcttttcgcactcccgttccagaattcctaccagttcactgaaaaaggtattgccgatacctttgacaagcaccgcgatagcctttgcatcatttcgtttcagatttctggcactgttattcggcacatagttggcttcctcaatggcttttaatattttttccttggtttccggatttatatccggatgattattcatagccctggacacggtactgacgccaacatggcatttttttgcgatatctttgattgtcatgcctgccacaagaccacttcctctctcttttacaatcttccaaacagcttgttcagatgacacatcttttcaagcatctcgtccgttacctgccccggcaccagacgccacttccagttgttgccaagagtggacggaagattgattcttgcctctgttcccagacacagataatcctgcagcggaattaccgcaaggtcagccacggaaccgagtgccagacggatgaactcccacggacgttcatctttcggtgtatccgcattgttcatgtaatcttctgccagtgcgttgtcttcctcacacatatcgtccagccatccacgaaccgtattattatcgtgagttccggtgtaaaccacacagttatgcggataattatgtggcagatagttactttcctctcttgaatcaaatgcaaactgtaatactttcattcccggatatccggtatcttccaccagcttgatcacgctctcggtcagatatcccagatcttctgcgatgatatccacatctccgagttcttttttcacggtgt

SEQ ID NO: 2457 - DNA, 8592 bp, Unknown
  gut microbiota DNA sequence
tcactggtaatatcccgcgaggtgttttttgtgagcgaaggtcacagaaaacccgagacatatcgcgcgaatttatgcgattagcataaattctgtgcatcgcgcagcgtgttgctgggcacggagtgaacagtaacaaataatataaaatatctataaaatcaagggcatcggcttttacgccggtgtcctttttgctataatgaattataaaacaacatttccgtgcagataggcatatagtaaaaagaagaaaagaaatacaggcggaaaagtatggcatataagattgtagtggacagcggacacggaggggaggatccgggtgcggtctatcagggcagacaagaaaaggatgacaatctgagactggcgttggaagtgggaaggcttctggaagcaggcagacaggacgtggtgtatacgagaaccacagatgtctatcagacaccgtttgaaaaagcacagattgccaaccgggaagaagccgattattttatctcgatccacagaaattccagtccgagatcgaatcagtaccagggcgtggagacgctgatctacgataaatcagggatcaaactggagatggcggaggccattgacggggcgctggaagatgtgggatttcggaatcttggtgtgaaagagcggccggggcttgtggtactgcgaagaacaaatatgccggcgcttctgattgaagtgggctttatcaacagcgaagcggataaccagttgttcgatgaaaaattttcagaaatcgcagaagccattgcggaagcgattcttggcacgctggatcaggagacggtggaagatccgttgttgtaccgggtacaggtggggatatttaagaacaaagaaaatgcagaccggatgaattatgaactgctggataagggatatccgtcttatatcttacagcaggacggatattataaagtgcaggtcggggctttcgaacagctcggcaatgccgttttgatggaacagaggctccggcgggacggatatcagacgttgatcacgacccagtaggagccaggacgaagaagggagcagatccatgggaatacaaaagaaagacagagaatacgagcgttttttagatcagatcagtgattttatttttgtggaagatgaaccggagaaggcagatatcctctttgtgccgggaaacggatttccgcagatgtccatagaggcggcgcggctgtggaaagaagggatggcaccctggattctgccttccgggaaatacagtatcggaaaaggagcatttgcaggggtacaggcgatgcaggaaaactatccgggaccgtatcagaccgagtgggaatttatgagagatgtgctgagaaaagaaggcgtaccggaagaagtgatcctgcgggaagatgcggctacatttacctatcagaatgcgatcaactccagaaaagtgaccgatgcggctggtatccgggtgaaaaaggcaatcatctgctgcaaagcccagcatgccagaaggtgtaaactgtattatcaatacttatatccgcagactacatttttgatttgtccttccgatgtgggaatcaaccgggaaaattggttcgatacgcagaaaggacgaaaagaagtgctcggagaagtggaaaaatgcggagaacagctgcagcggatcttttgcagggaagcggattcctggagtatctgaacagacggagaaagacagaagataagaagaaaggagggtgttatggcagcatatgtggaactggatcaggtgacaaaaacctatcagatgggagaagtgacgattaaggccgcagacggcatctcttttcaggtggaaaagggagaatttgtggttgtggtcggaccgagtggagcaggaaagacaacggtgttaaatattctcggcggcatggacagcgcgacgacaggaaaagtatccgtggatggaacccgggtggatcagctaaagggaaaaaagataatccagtaccggagagaggacattggttttgtgttccagttttataacctgatgcaaaacctgaccgcactggaaaatgtggagctggcgcttcagatctgtaaagatccgctggatgcaaagacggttctcgaggaagtgggactgggggagcgcatgtacaatttcccggcacagctttccggcggggagcagcagagggtggcaattgccagagcactggcaaaaaatcccaagttgctgctctgtgatgagccgaccggtgcactggactatgtgaccggaaaagcgatattgaagctgctgcaggatacctgtcggaaaaagggaatgacggtgattgtcatcacgcacaactctgcattgacgccgatggcagaccggatcgtgcggatccggaacggaaaggtggcagagatggtgcaaaacgagaatcccacaccggtggaagagatagaatggtaggtggaaagggatgaaagcatttcggaaggattttttcagagagattttaaagaacaaaggacggtttttatccgtatttttcatctccctgctgggtgcggcgttcttttccggtatccgctcagcggaaggagatatgaagacttcggcggatgcctattacgatcagacaaattacatggatctgcgggtactgggaacgctggggcttacggacgcggatgtggaagacatcgaaaaggtgaaaggcgtggcacaggtaaccggtgggcatacgttagaagtattacataaagagggagaaaaagaacaggcagtgaagctgattacgctgaaggacggcgtgaatgaaccgcagattctcgagggacggctgccacagaaaatggacgagattctggtagatcagaagtttctggatggaaccggaaaaaagatcggtgatcaggtgacatttgagagcggtacggacacggcactttccgatgagcttagtcaggaaacatttacgatcgtaggatcggcaacgctgccctattatatggatctgccccgtggaacgggaagtatcggaaacggcagcatcgacagttttgggctgttgcttccggagacatttaccagtgagatttatacagaaatctatgtgcaggtggatggagcaaaagaactggaaagttacagtacctcttatgaaaagaccgtaaaacaggtacaaaaccgggtagaagaactgaaagaggaagcttgccagcgaagatatgatacggtttaccaggagggagaagagaaactttccgatgccagaaaacaggtagcggacggtgaaaaggaactggcggacggaaaaaagacgctggaagacggcacttctcagatcaaagaggcgaaagataccatcactgagaaggaaaaagaactgaaggaaaaagaagccattttggtccagaaagagacggaactgcaaaatggtgagagccagcttgccgcaaaagagaaagaactgactgccggtgaacaacagttacagcagaaaacgcaggaacttacagccggaaaacaggaacttaccgcaaaacagaaagaactgacggatggaaagacacagttacagacgcaggaagcagagttaaatgcagcaaaaagccagctcgaagagcaggcggcgaaactggaagaacagaaaacgcagctggaagaaaaggaaaaagaactggatgcaaatgaggcagcagtgaccgcgggcatcgcacaggtacaggaaggacaggcacagcttgccgccggtatgcaaagcgtgcaggaagaaatcacccggctggaggcgcaaaaagaacagctctcgcagatggaagaaccagatgcggaacagctggcgcagatcgaggctgccttgcaggagttgaggacacagcttgccggactggaagcacaaaaggaagcgcttgcccagaaagaggcggaactcaacggaaatctgacgcagatccggcagggaaaaggagaactcgagcaggcaagggcgcagctttcagccggggaaacggaaatcagtacgcatcgtcaggaacttgcggcgggcgaggagaaaatcgcacaggcgaaggaacagcttgccgcaggggaaagtcagatccgtcaggcacaaaaacagctggcggatggcgaggcgcagatcgggcaggcgaaaacacagattgcggatggaaaacagcagatcgccggggcaaaagcgacgcttgcagatggaaaggcacagctttctgacggaaaacagcagattgcggatggaaaaagtgcactccaggaggcaaaagatgagattgccacaaaagaaatggaactggaggatggctggaaggaatacaaaaaagaaagccggaaggcagagaagaaactggcagacgcaaaagaaaaaattgcagacggggaaaaagaactggcggatctgagcgttccggactggtatgtatggggacgcgatcaggtgacttccacagaaaattacggacaagatgcggcgcggatcacaaatatcggaaaattctttccggtgattttctttctggtagcagcgctggtcagcctcacgacgatgacccgaatgatcgaggagcagaggcagcagatcggtacgttgaaggcactgggttatggagacggtgtgatcgccgcaaaatatcttgcctacggactgatgtttacaatctccggtgggtttgtcggagtgctgatcggagaaaagatcctgccgtgggtgatcatgaatgcatacggtatgctgtatacaggaatgaaagaatatctgaccccgttaaactgggagcagggaggacttgcgatccttgcgagtgcactgtgtaccggtgtggcaaccgtagcggcatgttataaggaactggcagctcgcccggcacagctgatgcgcccggaggctccgaaaaacggaaaacggatccttctggaacgaatcccgtttttatggaaacatctgaactttacgacaaaatcaacaatccggaatctgatccgttataaaaagcggttctttatgacggtgatcggcatcggcggctgtatgggactgatcgtagtaggattcggcttgcaggattcgatcacagcgatcgcgaagaatcagtttgtcaatctgtttacctatcaggcaagcgccgtttttaacggggatgccacggaagagaaaaaggcacaggtacaaagcgagatggaagagtatccgggaatacagcagattctggagatgtactgccagagtgtggaactgcagtcaccgaagcgcagtgtggatgcggtgatggaagtaccgaaggatctgacgcatttcggagatttctttgatctgcgtgaccgggtcagtggaaaacattatgatttcccgacacagggagctgccatcagtgagaagacggcggatcttctgggacttaaggttggcgatacggtgcagatgaaaaaaggtgatcagatcgtggaagtggagatcacggagattgtcgaaaattatgtgcggcattttatttatataacgacagacacatatcagaccttgttcggagaaccggcagaatataaccagctgctgcttcgctacgaggatacctcagacagttacgaggacggactgggtcagacgatcatggaacatccggagatcgcagccatctcctttacgtcggatctgatcagtgagatcgacaacatgctgcgctctctgaatatcgttatcgtggttctgatcgtatcggcaggtctgctggcatttgtggtactgtataatctgaacaatatcaatataacagaacgccaaagagagctggcaacgctgaaagtgcttggattctacgacggggaagtggcttcgtatgtgtatcgtgagaatatggtacttaccgtattcggtatcctcgcaggtgtgggaatcggtgctttcctacatagaaatgtgatccagaccgtggaagtggatatgatgatgttcggaagaaatatcttttttagaagtttcctgtacagcggactgatcacactggcatttgcactgtttgtcaacggaatgatgtattaccgactgaaaaagattgatatgatcgaatcgttaaagagtgtggaataaagatataacaaaaaagaagaaggggttaatcctcttcttcttttttatcgtaaaaatcttccggtatatagatgtgtacaagttcgatccggtttttgtctacctgatcaacaaccagtttcaggtggttatctgtgatacaggattctccgggaaccggcaggtgatcgagctgttcgatcacaaaccctccgatggaatcgtaatcctctgtttccagatgcaaatccagagcttcattcagatcatccagtttggcggaaccttttgcaagatattcccgtttcggaacgatttctttaaaatcttcctcttcgtcggcatcgtattcatcacgaatctctccgacgatttcttcgagtagatcttccagtgtgatcataccggcggtggcaccgtattcgtcgaggacgatcgcaaggtttaccgcgtattctttcatttccattaaaagatctgcggttcccttatattcataggtgaaataaggtttcctgaggaaatcccgtacagaaaaagctttgttcggatcccgcaggatcaggtctttcatgttcagagtaccgatgatggtgtctgtagaattttcatagaccggataacgggtgtaaccgtcctcccggaatgcctgaatcacttcttcataggtggcatcgacattgatcagagacatatcgatacgcggaaccatcacatctttggcctgagaatcaccaaaatcgaaaacgttgtagatcatctgccgttcttcactctcaatgacaccgtcttcatgactgacatccacgatggtacgaagttcctgctcggtcatggtattcggtttggcatccggatctacgtgaagcagaaacaggacacctcttgaaagcagatttaccagaaaaatcacaggagtcagcagcctggtcagtggatagatcacgggggcataggtaagcgaaatcttttctgactgcaacgttgccatggtcttcggtgtgatctcaccgaacagcaggatcagaagcgtcaggacaccggtagcaacaccgatgaacgcattgccgagaacccgtgtggtccaggtggttgccagggaagaagccgacagattgacgatgttgttgccgatcaggatcgtactcagaagttttcccggattttcaatgatttttaataaggtttttgcttttttatttccctcgtcagcaagagacatgatacggatcttattgaccgtagtcatcgctgtctccgcggaagaaaaaaatgcggaaagcaaaactaacagcagtaacacaattaattgtatggcgtcgccagaatccaaaaatattcactcctttaaaaatatgtagtagttgtacttgaatatacaggaattcgtttcaaaaatcaagacaaattcttgtaaaactatattttgggggtgttgaaaaaagaaaggatatgttataatataaaactgaataactgtgaaagtagtaaaaagagctgcaaaatggcagttgagaatacatagcaggagagatgtacataatgaagaaaaataacaaaccggcagcgaagcggtacatgaagactgtgggtatggtgatggcgtctgtgatggtgctgtcttccacgacaggtcagatggtatatgcggagactgcaaaagaccagaaagatacgcaggacggggaaaagaaagaagaaaaaattactgtatatctgaacggacagacgggaaatgataagaaatccggcgaaagcccggaagaggcagtaaaaagtttcaaaaaagcagcggaacttgcaggagagtccggcgtgatccgaatctgcggaaccgttaccgtagaggatgaggagacatgggaactgccatccggcgtttctatccgccgtgcgaaagattttgaagaggcactggttcaggtagacggaagcctgaaactggacaatgtccgtatgtacaccgaagacattaccggagacggcaaggtggaaggtgcagtggaaaaagaaaatgtctatgttcccaaagtgatcactgtaaaagatccgaaagcattatcggaaatttcgctggaaggatgcgacggcgacggtgtattttcctggaaagacgaggatacagttccgtccgaatacgagacggactatcaggtggttttccatccgtatgacacgaaaaagattgattacagcaaggaaaagggctgggatgcggaaagtgagaccgttaccagacagatcacggttcgtgtaaaatctctgaaaccggaagtaacgccgacgccggaagtgaccgatacaccggaagccactccgaccccggaggcagcaccggaagtgactgtaacaccggagccgaccacagcaccggaagctcctgaacagacggagaccactccggagccaacacctgaggtgacagaaccggcggattccgatacaggagtgaccgctccgactgcaacaccggaaccgactgcagagccgtcgacagaaccggaagtaccggcagaagatcatacggcag

SEQ ID NO: 2458 - DNA, 11291 bp, Unknown
  gut microbiota DNA sequence
atatgggattcattttatcgtggacttctttgccgtggcaggcccggcgcttcttcccatctatgtgattgaaattggtgtctttgtgatggcagccggaactcttgttatggcgctgaagatgggaaggatggaagaactgtgaattccagttttctgctatcataaaacagaatatatctgacagaacgcaccgtagaaatacggtgttttttgttaccccaaacccataattcaatacataaccacaggttagtacaaataccttatgtgcttttttgaaaggcttagaaagggatatttaccccgattttcgccctacacggtgatccgggaacttccgacaggaaaaggatttgcagatatttgttttataccaagaaaaatgtatgcagataagcctgcggttgtagttgaactgaaatgggacaaaagtgcccggggagcactggagcagataaaagaccgggagtatgtggagacgttgaaggaatataagggaaatttgctgttggcaggaattaattatgataggaaaacgaaaacgcatacatgtgtgattgaaaaattccagaaagtgtgagttatcagtattggtttgagaaaaaagcgaagagggtctggcgtgatgccggaccctctttagtaatactatctttgtctgacagaaactctttctgtaacattcatatgaattttatcccagagtctgttgcaaagaaccgtataagcagcaccgaagatgttggttccgatacggagaacaagggcgtaaggaagaccgaaaagtgtggtggcgatggagagggcaccaaaggtgttgaaaacggtctgccatggatagcttgcagagtatccaactccgattccgccgatcattccgatatatgggtacatactctcgggaagcagaaaatagagcaccagaaaaacagcgcatccgatgatattgtataatcctctcggaacagcacgttgttcacagtcttttgtaaaaggaagacatacggacatacaggcgattcctgcccacatggcacggggaagacctgccaaatttataaaaagcatggcactcgaaacgataaaagtcagtttcagataccagcggcttcttgcagagtgcagatcgaattcgcggaaaagatctgaaaaagttctgcggtagggacgatttttctgattcttatagaaaatccccatacacaggagcattcccacgaaaagaccgatgacgcgaagcagataggcatgtccctgcacatcatatccggtcagaagaagataaccaagaacaaaagtggaatgattatacataataacattgtggcatccaaaaatcattagtaacaggatgcagacaagatgcacaagaaatcctgctagtggcggaagcatatttgcgagacgcggtccggtcatgagaatagcaaagaggaggacgataacaccaagtccatgtgtggttcgaatcccgaaatcggcctgccggagtaccagaatagccagaagtaccgtaacacctacgacgctgttctcgggttcaagaaatttgctgaaaagagaaacaaccgctacacaaaaagccatgaccaaatatactttaaaattgtaaatcagaatatggcgccttttttcttttggggtggtagttttgtgaatcagttgcttggatccggcagaacttaactgcagttcctgataaaaagtcataaattttcatcctttctatttacaaagtaaaatgtagaggaaactataacgcaaaacaggagaaaggtcaagagaaaagagcttcgttataaaaatttgatagtgccggataccaggcgggcataaaacagaacctgtggttctttttgtatagcgctttcgcaatcgccacaccgccagtcacagaaacggtttgtgtgcatatattaaccaaaacggtcatcattgagaggaactctcaaaatgtcatctcctgttataaaatccatgcagaccgcatccgaccgtggtcagcttcagatccagattgtgtctcggattcagaaccgacccatccgggaagcaaaaatcagtatcagttataccggagcgccggggcagccgttagaacaggtacagacgaacagcagcgggcagacggaaatgctggaacttgcagcaccgccggtggagtacagcctgcagccttcggtggaacagccgtattcgaaatacaatctgaatgtggaggcagaaggatacgaaccggtggaagtatccggaagtgagatcctgtccggtgagatcagcagacagaaaatagaacttcgaccgctcagcgacggtgcctatgaagatgtggtgatcccggatcatacgttgtttggtgattatccggaaaaaatcccggaggaagaggtgaaaccggtgaatgagtccggggaaatcgtactgagccgcgtggtaatcccggaatatgtagtggttcatgatggctctccgtcagattcaaccgccaacaattattatgtgagataccgggattatatcaaaaatgtggcgtgcagcgaaatctatgcaacctggccggcagagacgatcaaggcaaatgtcctggcgatcatgtcgtttacactgaaccgcgtgtataccgaatggtatagaaacaaaggatacgattttacgatcacttcgtccaccgccttcgatcacaaatggatctacggccgcaacattttcgacagtatctccaacattgtggatgaactttttgaaaattacctgtcccgtccgaatgtccggcagccgatcctgacgcagtactgcgatggacagagagtgacctgtccgcagtggatgagtcagtggggaagtaagtatctgggagatcagaactatactgcgatcgagattctcagaaactattacggggacagcatgtatatcaattccgcggaggaaatctccgggattccggcatcctggccgggatatgatctggatatcggggcgagcggtgtgaaagtgagacagatccaggaacagctaaatacgatcggagaagtttacacggaagttccgcagggaccggtggacggaatttacggagagcggacaaaagaggcagtccggcagtttcagtccgtgtttggactggggcagacgggaattgtcgattatccgacctggtataagattcaggaaatctatgtgggcattacgcggattgcagaactgtattgaagaaagttcggtgattagcataaattttatggataaaatttgtcaataatgccagcattacaattttgacaggaaaattataaaggattataataaataatcaggggaatatacgtgacgaggagcaacaggaggaaataccagaaagtgataagaaaagaatggaaacgcatgctggcactgtccatggcatgtacgatgacagtatctatggcagtgccggctgtggctgcacaggagggagaaaccagtttacagacggcagaggcagcagaattacaggagaccccggaacagtttgaggcaagaacgggatatcatttaccggatggatatacatatgtattgaataacggttttgtgatcatacagacagatggttcgccacagattacaccggttgcaacgccggaaccgacaccggaggaaacaccgacgccaacagtgacgccaacgccatcggcaacaccggatgtgacaacaccaactccggcaccgacagagacaaccacacagccatctgcgacaccggaagcaaccacaacaccggaagcggcagatccggcgcaggaggcagaaacggaaaatataccggttattaccgcatttccacagtcggtagaagtgccggtgaccgtagaagattaccgtttctggacggtatcagccagcaaaaaagcagcacaggcgaaggcaaatctggagatcaaagaagagatgtctgaggattcccggagcgtgggaagtctggaagagggcggtatctgctatatcttaaagaaagaagaaggctggtactatgtggagtccggaaatgtccgtggctttgtagagaaaaaagcggtgaaaaaaatcggagataagaatgaagcactgctgactccggtttatgcggtggagatgatcgcaccggtggaaaatcaggcgtacacctattatcgtgcgacgattcagcagaccgaagtaaaaaaaagctatgcactgtgcaaaggtgatgagctgaatatccgggcggataagaacacagacagtgagatcgtcggaacgatgaaaaaaggaaatctgtgctatattctggcagatgagacggaagaatgggtgtatgtggaatccggagaggtccgtggatttgtaaagaaagaatacctgcaaaccggtaagaaagtaaataaaaaagtgaaaaagaccggggaggatcagtttacactggcagttgctcaggtagatccgaaggagaatccggcactttattatacaattacttccatgaaagcaggaattccggacggagcaatccgtgattcgatcgtggattacgctaatgagttcctcggaacagtctgggagaaagaaggaaccagtctttgtgagggaatcgacacgaaggaatttgccgagcagatttatgaggcgtacggatatgatgttacggataaagatggaaatgtgcaggaacagggaaaggtttctgtggatcaggcaaaaccgggcgatgtgatctgttacggatccggggaggaagcaagtgcagccggtatctatgtaggtgacggcaagatagtacaggcttctgagacgagaggaaaagtagcgacggtaaaggtagataccacgcaggagagttttgcattggaactttttgaagatacgaaagtgatcgcaggaagtaagaatatcagcgaggtcaatgcaacagaagcgatgtacggacaggatctggggctttttaagctgacatattactgtgcctgtgcaaagtgctgcggaaaggcaaccggaattacggcttcgggagcgagagttgcggaaggagaaacgattgcggtggatccttcggtgattccttatggaacgaaggttattatcaacggacatatttttacggcgcaggattgcggcagcggagtgaaggagaatcatattgatatctatgtggatgatcatgagagagcactggcgctgggatgcaattatgcggaggtgcatttgatgaaataaagagaaggaactgtcacactcgggtgagtgtggcagtttttgtctctatataaaaaataaattccgacaaatgtatacacaattaagtgaatacagcgaagaaatgggaaaataaaaaggattttgcgggagaggggtggaatatatttaacagaataggtgaaaaagaaatgtttttttggcgttttttgtaatggaaggggtggtgtgtttgaatatcagggaacgggcagaagaacgggagtatcagtatctgagtccatatgcttcgcacagcagggagtcgaagggacgggcgcgtgtggaggaggagtgtgatatccggacggtttatcagagagaccgggatcggattattcattcgaaggcgtttcggaggctcaaggataagacgcaggtgtttctggcggcgcagggggatcattatcggacccggctgacgcatacgctggaggtgtcgcagacggcgcggacgatcgcgaaggcactggaactgaatgaggatctggtggaggcgattgcgctgggacatgatctcggacatacgccgttcgggcatgcgggtgagtcggcgctgaatgagatctgcccggaaggatttgctcattttaagcagagtgtccgggtggtggatcggctggagaagaatggggaagggctgaacctgacctgggaggtacgggatggaatgttgaatcaccggacatccggcacaccgcatacgctggaaggacaggtggtgcggctgtgtgataagatttcctatatccatcatgatatggacgacgcacagagagccgggatttttcaggaagatgatatcccgattacaatccgggtgatattgggagattcctgtaaggaacggttaaatacattgattcatgataccattcgaaacagttacggcaaagataaggtggaaatgacgcaggagatcggagaggcaatgcgggaactgcgggcactgatgtttcgaagtgtttataataatccggtagcgaaaaaggaagaggaaaaagcaaagaccatgctgcaggagatgtacctgtactacagcaaacaccccaagcagatgtccggagaatatcagaagctgatcgcagaaggtgagagtaaggaacgtgtggtatgcgattatatttccggtatgacggatcagtatgcgatggcaaaattcaaagaactctttattccagcagcctgggcggtatattgatcagaccagatatctgccaaagaaaagaaattatataaaaagacaaaacagtagcgaaaaacgcgaattttgtcgaagaaaaagagaagccggacaaataaaaaaggatattgtcgccgcacggggaatatatatatacgtgggtaaatgacaacagtggataaaggagagagaaaacatgcgttattcggatgatctgatcgaagaaattcgaatgaaaaacgatattgtagatgtgatttccggctatgtgaaattgcagcgaaaaggaagttcttatttcggactttgtccctttcataatgaaaaatcaccgtcattttccgtaagtcccggaaaacagatgtattactgctttggatgcggagcaggtggtaatgtatttacctttctgatggaatatgagaattttacattcccggaagcactggagatgctggcggaccgcgcaggagtggaacttccgaagctggaatattccaaagaagcaaaagaacaggcggatctgaaatcagcacttcttcagattaataaagaagcggcgaagttttattactatcagctgcgtcagaaagtcggggaacaggggatggcgtacctgaaaggcagagaactcagcgatgagacaatcaataagttcggtctcgggtattctgataagttcagcaacaacctgtaccgctatctgaagggaaaaggatattccgatgatctgctgagacagtcaggactgtttaatgtggatgaaaaacgtggcatgtacgataagttctggaaccgtgtgatctatccgatcatggatgtaaacaaccgcgtgatcggatttggcggcagggttatgggggatgcgaagcccaaatacctgaactccccggagacgaagatctttgacaagagccggaacctgtacggactgaatatggcgcgttcatcgagaaagaaaaacctgatcatctgcgagggttacatggatgtgatctccatgcaccaggcaggatttaacaatgcagtggcgtctctgggaacggcgctgacctcccagcaggcgagtcttctgaaacggtatactgatgaagtcctgatcatctatgacagtgacgaggcgggtgtgaaagcggcacttcgggcgattccgatgttaaagaccgccggactttccacaaaggtgatcaatctgagaccttacaaggatccggatgaatttatcaaaaacatgggaaaagaagcgtttcaggagcggctggatcatggaatgaacagctttatgtatgaactgaaagcactggagggtcagtacgatatggaagacccgcagggcagaacggattttttcaaagagacggcaaaacggctgctgcgttttgaggatgagctggaacggagcagttatatcaaaaccattgcccgaacctatcaggtggagccggaggaactcagaaaaatggtcaaccggctggcgatgaaaggtgcgggaatgacagaaaacgtcaaacccaaatcgggtcagaaccgtaacaaagaaaagcagaacggatacgaggtatcccagaaactgatgcttacctggctgacatcttatccggagattttcggggaggtgagccggtatatcggaccggatgattttaccagacccctctatcatcaggttgccgaactgttgtatgaacagtacttgcagggggaaccgaacccggcaagacttctgaaccagtttacggacagcgaagaacagaccgaggtggcagctgtatttaacgccacgataccgctggattcggaacaggagagggagcaggcattactggatgtgatatgcagaatgaaggaagacagtatcgcgcaccgcacggagcatctgctacctacggacatgcaggggctgatgcagctgatgcaggcaaaaaaagagctggaagaactgaaagccggaaagctgcatttgcatatttcttttcgttaaggataaaatataaacaatatatggaaggatggaaaaacagatggaaatggataaagcccaatttgcagaacagttgaaaaaccttgtggaattaggcaagaagaagaaaaatgtgctggagtatcaggaaatcaatgatttcttcaaaggaatcaccctgaacaacgagcagatggatctgatctttgaatatctggaatccaacggtgtggatgtactccgggtaaccgaagatgacgcactgctggataacgaagacatgcatatggaagaagaggaagtggatctggaaaatattgacctttccgtgccggaaggtgttagcatcgaagatccggtccgtatgtatctgaaagaaatcggtaaagtaccgcttctgagtgcagaagaagagatcgagctggcaaaacgaatggaaaacggagatcaggcagcgaaaaaacgtctggcagaagcaaaccttcgtctggtagtcagcatcgcaaaacgttatgtgggacgtggcatgctgttcctggatctgattcaggaaggtaacttggggttgatcaaagcagtagaaaaattcgattacaccaaaggatacaagttcagtacctatgcaacctggtggatccgtcaggcaatcacccgtgcgatcgccgatcaggcgagaacgatccgtattccggtgcatatggtagaaaccatcaacaaactgatccgtgtgtccagacagttactgcaggagttaggccgtgaacctacgccggaagagatcgcagaagagatgaacatgccggtagagagagtccgtgagatcttgaagatctctcaggaaccggtatctctggaaactccgatcggtgaagaggaagacagccacctgggagattttatccaggatgataatgttccggtaccggcagatgcggcagcatttaccctgttaaaagaacagctggtagaggtgctgagcacgctgaccgagagagaacagaaagtacttcgcctgcgttttggtctggatgatggaagagccagaacgctggaagaagtaggaaaagaattcaatgtcacaagagaacgtatccgtcagatcgaagcgaaagcgttaagaaaactgcgtcaccccagtcgcagcagaaagctgaaggattacctggattaatggaattatccagaagacttcggatgaatgcttcttttgtgacaccgggggaccggctggcagatgtgggaacggatcacggatatattccgatcgctctgcgtctcgaaggcgtgatcccgtcggcgctggcgatggatatcaatccgggaccgctcgagcgtgcaaaagagcatatacgacaatttgatctggaaacagatatacatacccgcctctccgatggtgtacaggctctgtgccccggggaggcggattctgtcctgatcgccggtatgggcggggcgctgacgataaagatcctggaagcggggaaagatgtactttcttccgtacaggaactgatcttacagccccagtcggagatcgacaaagtgcggttgtaccttctgacccacggctatgcgatcaccggagaaaagatggtgtttgaggacggaaaatattatcccgccatgcgggcagtacatggggaaatgccgctgtggcaggatgtggagttacagtatggaaagtatctgctggaagagaaacatccggtattacaggaatatctgaaagaaaaagagaaaacctgtaaaaaaatacaggaaaaacttgcagcagacgggaaaaaagcagaaaagatcaccgcacggcaaaaagagctggaagatgaactccggctgatcgggcaggcactggaggtgtatgaacgatgacatgtaaagaaatcatggaaaaactggaagaacggtggaatccttcctatgcactggaatgggataacgtaggacttctggtgggaagagaagacaaggagatcaaaaaggttttcacggcgctggatgccacggaagagacgattgcacaggcactggaattcggtgcggatcttctgatcacgcatcatccgatgttgttttctccggtaaagaaggtgacaagtgcagattttatcggtcgcagactgatcacgatgatccaggcggatctgtgttattatgcgatgcatacaaactttgatgtgaagggtatggcacagctgaaccaggaatgtctggggcttgcggaatgtgaagtactcgaagagaccgctcccggggaagggatcggaagagtgggtgtgctggatgcaccgatggatctgaaaacatttgccgaaaaagtaagaaatgactttgagattcccgatgtacggatgtacggggatccggcaaaaagcgtctgtcgtgtggcagtcagcagcggatccggaaaaagtatgatccgtggcgcgatcgccaagggcgcggatgtgatcgtcaccggagatgtggactatcattccgcaatcgatgcggcagcacagggaatcgctgtgatcgatgccggtcattatggaacagaatatggatttatcgcatatatgaaacaggaattggaagcaatgtttccggaacttgaagttggctccgccagagtacatcatccgtacgaggtggtgtagcggcagatgaaaggagtggtgaagatgggacttaagatgtgtaaagtaacagtcggtaccagacagaaggaatatccggatggaacgccttatggagaaattgtcaaggattttgaccaggactgtaggtatccggttgtactggtgacggtggatggaaagcttcgcgaacttcacaaaaagatacaccgggactgtcagatctcactagtgacggtggcagacagtatcgggcataaaacctacaaaagaagtatgaatttgctgctgttaaagg

SEQ ID NO: 2459 - DNA, 23256 bp, Unknown
  gut microbiota DNA sequence
attatttttatattatttttatattatttttctaatatcctgccagccaggtgtacatctcttcgtactgctttgcagaattcttccaggaataatcctgtgccatgccgcggtcgacgatcttgttccactcacgtttgcggtcataatatacacgctctgcgtagcggatcgtatttaacatctcatgggcattgtagtttgtgaagctgaagccggttccgtttccttcgaactcgttgtacggctgtacggtatctttcaggccaccggtctctctgacgatcggcacggtaccgtaacgaaggctcatcagctggctcagtccgcacggctcaaacagagacggcatcaggaatgcgtctgccgctgcatagatcttatgagacattgcttctgaataatagatattggcagaaacttttttatcgtatttccatgcaaagtgacggaacatattttcatatttttcctcaccggttccaagcactactaactggatcgcatcctggcacagttcatccatcatgtaagcgatcaggtcaaatcctttctgatccgtcagacgggatacaacaccgagcatcatggctttcggattgacttccagtcccagttcttcctgcagcgctgtcttatttttcactttttctttccggaatgtctttgcattgtagttctttacgatcatggagtcggtctccggattgtactcgtcataatcgataccgtttacgataccgcgcaggctgttgcttcttgcctgcatcagtccatccagaccttcgccgtagaacggcgtcttgatctcctctgcataggtattacttacggttgtgatcgcatctgcgtataccagaccgcctttcagatagttggcatctttgtttgcctccagtttgtccggtgtgaagaagtaatcggacagaccggtgatgctctttacagtcttgatgtcccatacgccctggaatttcaggttgtggatcgtcataaccgatttgattccacggtagaaatcacttccctggaaacgttctttcaaatataccgggatcagtccggtctgccagtcgtggcagtgaataatgtccggtcggaaatcgatcaccggaagaatcgacagtgccgctttggagaagaatgcaaatttttccagatctcccggcatgccgtagtatggtttgtccccactgaaatgttcttcgttatcgataaaatagaacttgattccttcatattccagctcgaagattcctacgtattgctgtctccagttcagatccatgtagaaattggttatgtagtgtaactgatctttaaattcctgtttcatacaggcgtattttggaatgataactctcacatcaaaatattcttttggaaagcatttcggtaaagaaccgactacatccgcaagccctccggtcttaataaacggtacggcttccgatgcaacatatagtacctttttcatgcgaataacctcctgtttttcttataacaacatctgtcttatattataccgcatttttaccaaacaggaaaggggttatgcctgtctttttatgcatttttcatccgtatttatcgatgaagcgtcccgtgttcatattccagtcggatcttgtccgcaatcagagcgataaactcagaattggtcggttttccttttccgttgctcaccgtatagccgaaaagtgcgtcgatcgtatccatcttgccacggctccatgcaacttcgatggcatgacggatcgcacgttccacacggctcggtgtggtctggtgtttcttggcaatggtcggatacaggatcttggtgatggaattgagcatctccatatcctccaccgacatcatgatcgcatcccgcaggtactggtatcctttgatgtgtgccggcacaccgatctcatgaatgatatccgtcacatcaatctgcagatttttttccgatatttcgcctgctcttcccagaccgcctgtgccccggttgtctctgcggattccttttccaaatttgcggaactgtttgatccggtttaataccatgtcgttatcaaatggcttcataatataatagcaggcccccagccgaaacgcatcttcaatgatccgttcctgaccaactgccgatataataataaaagccggacgctttctgacagaaggatcttcattcaccttttccatgactgtaattccatccatcttaggcataataatatccagcagcacaacatccggctctttttcttttatgatcttgtatatttcctgtccgtcggccgcctgtccgacgagttccagctctttatctcccttcaccagtgtactgagaagatctaccattcgttcattatcatctgctatggctacgtttaatttttccattctaaactgactcctccatctacttagtattttggaaagtatgggccccgccacagattactgtgttccaaatgctgattctattataaaaaaaatctttttttggttcaagatatgacaacacatttttcccattttcgttcgacaaagtgacacataaaatgacgattttctgtattctcagtgcatatttatacaagaagcttttcccgcaacaatttcccggccgctttgttcagacggttctgcataaaaatacataaaaacaaagaaagcgggctgtcactttcgcaacagtccgcccgtattttctgattcttgtttttattctgtgaacagtggtgtggagtaatatctgtctcctgtatccggaagcagtgcaacaattgttttgcctttgttttccggacgttttgccagttcaatcgctgcctgaagagctgcaccggaagaaatacctaccagaataccctctttcttagccagcagttttgctcctgcaaatgcatcgtcgttttctacggtaaccacttcatcgtatactttggtgttcagtacatccggtacgaatcctgcaccaattccctggatcttatgagcaccgctcttgccctgggaaagtaccggagaagttgcaggctccatagcgatgactttcacatccgggttctgggatttcagatattcaccggttcctgtcagagttccgccggttcccacaccagctacgaagatatctacttttccgtcagtatctttccagatttccggaccggtggtctcacgatgtactttcgggtttgccgggtttacaaactgtcccgggataaagctgttcggaatctcttttgccagttcgtctgcttttgcgatggctcctttcattccttttgctccttccgtcagcaccagttctgcaccgtaagctttcaggatgtttcttctctcaacactcatggtttccggcatggtcaggatgatacgatatcctttggatgctgcgatggatgccagaccgattccggtgttaccggaggtaggctcgatgattacggaaccttcttttaagagtcctttttcttctgcatcttcgatcattgcttttgcgatacgatcttttacgcttccggccgggttaaaatattccagttttaccagaagagtagcttccagacccagttctttttctatgtttaccacttctaccagtggggtgtttccgatcagtcctaaggttcccttataaatatttcccataatacatttcctctcttttcctttttttatttcgcaaccgttcgttcccctcgcagctacataatttttttgtaactattccgtaggtaatattccgcgaggtgttttggcatgtatatgccaaaatctcgagacctacaagtcaaaatgtcatcaccaaaggtgatttttcatgcattttggctcgtaactgtgaagatactgaacagttacgttgtttttgttttgttgagtgtattataatccccttatacctacttgtcaactatgtttttatgctttttacaaaaaattttattttggtaaagagtgaaagaatcaacattgctttctctgaaccgctgtttgatatgaactgcaacataaaaggcttccgcagctcggattcattcatctccggctgcgaaagccttttatgtatttttattttattcagataactccctgtccgattaagcagctttctcctgcggtttttcgaacagtttcttgataccctgtactgctacgatcacaccaaggatcagaagcagtactgcgaagatcagctgcagggtatttccaagatccagacctgtagtcatcagagcaccggtcagtttgtagatggtcagacccagagcactgaatgttacagccatcatgaatactgcaggagcccacagcataacaccctgacgttttgtctttttcaggaatacggcacatgcaaccagagcaagtacagacagcagctggttggcagaaccgaacagcggccagatctcagcgtatccgacttttgccagcaggtaagccagtaccagagtcaggatggttgcaaaatatttgtttaccatcagtttacggaatggtgtgtaatctttttcatccacatcgttatcctggaagaattcctggaaggacagacgtccgacacgggctacagagtccagagaggtcagtgcgaatgcagatactgccaggttgatcagggtaaataccagagtatgcggcagaccgatcacttccaggaagtttgcgattgctcctgcgaagatctgcggctgtgtggtcagtccctgtgctgctgcttctccttttgcgaaagatgcaacggcgatcagagcgatgatagccagcatactttccatcagcatggcaccgaaggataccggcagcatgttcttttcatttttaatctgtttggatgcggttccggaagataccagtgaatggaaaccggatacggcaccacatgcgatggttacgaacaggattgggaataaagtctgtccgtctacgttaaaggaagtaaatgcttccagatggcactgtgggtttgcaacaaacacacctacgatagctgcgatgatcataaaaatcagcaggtaactgttcaggtagtcacgaggctgcagcagactccatacaggagctacggatgcgatcaggatgtagatgaagatgatcacatgccaggtggttctcggcagatacatcgggaaattcatacccagtgctactgctccaaccagcatcacgatagcgattgctgtgttgacccatttatgcagttttccgtaacgaagaatcatgcccaggcatacagcttcgatgatgaataacatggaagttgttgctactgcaccatttgcagtgatcttggatacggttccgtcatctgctgtcaggaatccgttgaaagttcctgctacaacatcagcgaaagcagctacaaccaggatacagaacagccagcagaacagcaggaacagtttctttcctgtttttccgatataagtttcaatgatggatccgatggaacgtcctttgttctttacagaggcatacattgcagagaaatcctgcactgctccgaagaacacaccaccgatcaggatccataacagtaccggcagccatccgaagattgcagcctggatcggtccgttgatcggacccgcacctgcgatggatgcgaactgatgaccaaatacgatattagtatcagccggcacatagtctacgccatcttccatttcataagccggagttttggcgttgggatcaatgccccattttttctcgaggtaacgaccatagaagatataggctccgcccaataccacaatggcaattaccatcatcataataccactcatgtttttttcctcctttttctgactcattcagaaaacatgaacgacttccccggcgcataagggataccctgagtttttcactctttcaaaataaaaagccctgcagctttatttgctgcagggacgaatcttttccgcggtaccactctgctttattgtcataatgacaatctcttttgtactgtcagccggtttcccggtgataacagatctctgataacggtgagcgccgtctgctcttacttatgtttcagagcggatactccgaagggatattgtatcaggtcttctattgtctcacaccgaccggcaactctctgaaagaaattatcctgtacaacctgtcttcatcaatgtttttctatgtttgagcttatattagttttaccacttttgtttttcttccacaactgtcgatttatacaaaatttatttttcactcagaaagattttatacattttttatttttctgtcgtttttccgtcagattctgcaacgcattccgcatccggtcggtgttccggcacatccgccgatagctgtctcgcgcagttcaaacgggatactctttcctactttgtacatcgcatccaccatctcatcaaacggaatcgggtataccacgccgctcagtgtgatctccgcgcaggtcacggcattgaccgcaccaaccgcattccgactctggcagggaacttccaccaaacctgctaccggatcacagaccagaccaagcagattcgagatcgccatggctgccgcctgcagacacatctgcggggttccgcccatcagttccgtcacagctgcagccgccatcgccgatgcagcgccaacctctgcctgacagcctgcctccgcacctgccaccgaggcattccgcatcatcagataaccgatcgctgccgtgtgaaacagcgcgtctaccatctgttcatccgtaaaacctttttcctcctgcaatgccaggagcacgcccggaaccacaccggaagaacctgccgtcggcgctgcaacaatgacacccatcgaggcattgacttccagaaccgccatgctgtaggcgatcagtttgttcataaaggttccgcagacattttttccgttctctcggtatccggtaatctgctttgcctctccgccgatcagaccgctcatggacggcttcgggtcctccaacggctttcttactgcttccttcataatcgcgagggcttttcgcatcttatcttccacttctttctgtgtggaggatgtgccttcgatctcccgctgtttcatcacctcggagatcgaacactgcgttttcttacatacttccaataattcctgtccgtttttaaaatctgtcatctgtccgtctctcctatatctgaatcagcaatatttcctgcacatacggattctgccggatttcttcgagaatctcatccgggatccgctcatccgattccacaacggaaaatgcggtttttccttttccttcacgaaacagccgcataaacgcgatatttacattctgattgctcaggcactgggtgatatgcgtcactacgccaggtttgtcgatctgtttgaccaccagcgtactgtattctccggtaaattccacattgatgccgttgatctgcgtgatcttgatcttgccgccgccgatagactgtccctgcacctgcatctttgtgccgttttcccctgtcatctggatatccacggtattcggatgatccggaacaaattccttatcggcgatatactgatatttcacacccattttttccgcccaggcaaatgcatcccggattcgcagatcatccgtcgcaaatccgagcacaccgccaagcagcgcccggtctgtaccatgtcctttatacgttcttgcaaaagaaccatacagagtgaatgtcacctctgtcactttttctttgaaaagctttcttgccatctttccgatagatactgctcccgctgtatgggagctggacggtcccaccatattggggccgatcacctcaaacgcactgataaaattcatcgtttcctcctagttgtcttttcgcgatacaaaaatgcacacgattgccgtgccgatcatggacagtcccagaccggttgcaagcattgcctttattccggcaaaatccacaagcacaccaccggacagactgccaaatacccctcccatggtacttgacgcaatcagcagcgactgccccttcactctgtcctccacagccatcgtttcatttacatagtataccgcagaaggcagacataatgcaaacgataacatctgcagcatctgcactacatacaggaacgatatactgccacacaccagataccccagtgctttcacagaaaacattaccgccgcaaaccgaatcagttttctgctgtcccatttgccaaccagcctggaaaacaacaacatcgtaggaagttcgctcattgcagatactgtcagcagtgttcccatccgttttatatctcccccgaggcttaccacaatattgatcagataattgttcacatatgtactttctacatagattaatatcattcccagcaataccagcatataattccgatagcgacatgcaaattccagaatcccgccacctctctgtctgtttgcagtatttttctgttcttcttttttactttcattcagatcctttacaaccggcatggaaatcaaagtaacgaacatcaccgcaaaagacagacatccaacagccataattgccagaccgtaatacctgccgatcagaattcccaaaaacgaagctgccaccgcataggatgcagagcccactcctcttccaattccaaaattcacatagataccatgattcacataatacaaactgatagaattgatcagtggctgtaccacctgtaataacatattaacaatcaaaaatgacagcacgattcccggtaccattttggacatacactgcatcagaatcagcagcaggattatggcaattgccatccctgcagtcatctgttgtaaagttacccgttttgcgcggtccgccgccgctgcaacaaacggctgtaatataactcctagaatatttccaagagccagcacgactcctatctgagaacttttcagtcccatatgtaataaaaataccgttgcaaacccattgatcgcacagaccgccacccaataactcccctgtaatacagcacactgcgccgttaatttttttgcattcattttcatcccaataccctctcccatacatagttccccacgtttgaaacaatctcagtatactattttcgcgcaaaaacaatagtgtcaattccgaccttttttcatgtcaatatcgacctaaaacacaataaaagccattccaacagctgtctgctgtcagaatggcttttattgtgttaatatactacaaccgggaatttgtaagagacaatattgtacaactctttcactttatccaacggtgtgttgacacatccatgtgatccattgttgatatatgccgtgctactccagtcgcttctggtgaccagatcgtgaaatccgatcgtattttccgctgcaaacggaatccagtaattgcagtgcacttcataggaccagttgccgctggcattcttcgtgccgcgcatcgtatagtccgttgtttttccttttactttatagacaccttttggcgtttgtgttcccttgttcaggcatccggttaccaccgcagagtccagcacctgctttccatccacataaacccagaaatgctgatccgacagactcagttctacataggaactgccgatatcatttgcctctctgctcatcgcggtagctaaataaacaatttcaaacgctccctgtgttccgttattgatcgcatccagcagattcgctgtcgtactgttctgatcgatcttccatccgtaatctcccggtgtcagcgtcaccgtacttccggaagttgtggtaaacgaccgttcgctgtcgacggtatcgtatttctgtgccagtccggctacgtattccgttacctttgcttcgtcgatcgcgtaacttccgtcttctgcctgtaccacccagtctttcagtgtggttttatcaagcacctcctgccggtctgttccaaaatccatcgtcagactcgccgaaagtttctggttgatcgcatctgcctgcgcctgaagatctgcattgtcctgtaagatctgcggttttgcatagcagtctgcggcatccagatcacagaccgtctctccgtttacaagcgcctgacgaataccgtcaatcactttttcttcttccagcgtcgttccctgttcttccgggatcaccgcatatccgtcatcggtcgcactcacacaggcatcctgcggagcctgcatgttctccggctgcatacaggacagactttccactgcctgttttaatgcatcctcatccactgccaccatgtttttcagttccgcatggaccccggtaaatgcatgcaacacccagccccatgacttctggtttttcatcaggtcgtcgatctctccgttatcctgataggtcagctgtaactgctgtccggtcagtgtctcttcctgatcgtttcgttcttttattgtaatctgataagacggtaactgctccgtaatcttatcttttacttcctgtacggtcatctccccgtagtccgtaccgttgatctctgtgtgagaataaaaatgattgctataataatacgctgctgcaccgtatccggctgctacgactgcaaaaagcgcacctgcaatccctgtcagaatctttttctttgttgtcatcgttttcgtcacatctctccccgtaacgttccgccccttttcgttatcctcccgaccggatcgttatctcttttattttgtcattctttatcataccattttccggaagatttgcaatcatgaccttgtatgaaaacaacaaatttttcctgttttttttgtctattatttcagtttttcctgcaatcgtttcagatatgtttccgtgtagctcctgagctggcagtcctgtcggtgcagataaccgaagcagactttcgcatgacttttccggatcggaatggtccggatccggctgtccctctctttctccttttgcagatcacagctgagattggcaagatctgtctctctcaaaagttcctgcatcagtgaactgctgtttaccgtgacgatctgctgaaagtctctgccgtcgatcagatcttcctgcagatgtcctgaggtatgaagcagagaaatctgatcttcctcatgctgtacatagcgaagatttcgcagttcttcttttgtcacatactccttttcataatacgggtgattcggtcccacatacaatgccatatctttttcttttaacggtgtgaacgtcatctttctcttctgtatcatccgctcaaacgcctgccgctgcatcttggagataaacacaaagccgacctccacctgccggtggcagatatgatgaatgatcttttcaagtgcttcctcataatagacggctcgcagttccggatgttcggcaagaaacgtggcaaattcttcgctcagaagactgcttggcatggatgcgatacggatcgtgctctcctgtgtctccgtatggatcctctggatctcttccatagagcttaacatttttctcgcctgatcgtatactttttctccctctttcgtaagctccacaccttttttacttcgctcgagaagctgatacccaagtgtcctctccagctttttgattgttttacttacatgcggctgcgtcgtatacaaaatctgcgcagcccgactcaaacttcctgcatccacactcacaacgaagaactgtaattctcttaattccatacgatactcccatcttttccgacaggtatgtccggaatcttacattttctgtttcagctgttttccggatgcattacctgtcttcctgtaattttcttctgctcttataccagaataatccgataaaagacagacctgccacgatccaggaagcaatgtagatccagatgatacattccatcgtctcaaacttcggaaggatcacccagatactgcatacccggaacagacagatactgagaagcgtcgtaatcatcggtgcaacggtctcccctaaaccgcagcttgcaccggataatgcttccgcaatcgcataaaatagataaaacggcgccatcatctgcatatattttaccacaagtggaatcaaaagttgagcatcttttttatcaataaaccacggaccgacccatccagaggcaaaaaacagaaacaggctgacggctcccaccgcaagtacggagattccggttccgatcaccgctccctttttgactctttctttctgtccggcaccaaggttctgtgcaacataagtcgtcatcgccggtcccatggaatcggcgagcagccagatcagcatgttcagcttgtcacagatactccaggctgcgatgctgtcggttcccatcgtattaacactcgcctgtacgatggaattggcgattggaaacagcatggactgcagggcaagcggaaatccggtacggatcatcatcgccatatgctctctgccaaaatgcagatgccagacatgcacttttccgcgaagatgttcttctctcgcaaggaacagaaaggtcagaaccacgctgacgatctgtgccgcaaccgtggcagcagccgcaccgcctactcccaggtgcagaacacctaccaaaagaagatcacctaaaatattgatgcagctgctcacaagcagtacatacaacggacgtttcgaatccccgaaggcacgcaggatccccgctgccatattataaaggatcagggaccacagaccaccgaaataaatcgtgcagtatgtcagcgtatccctgtagatatccgccggaacacgcatcagtttcagcagttgcggagcaagcagtacgcctccgaaagaactgatgattcccaggacaaatgcgatcgtgaccgccgtacggatcgaacgatgcagatgctctatagctttcgctccgaaatacctggaaataataatcgttgctcctgccgccagaccattcataaagttgatcgggaacttaaacagcgtattgatcgaatcgatcgctgccagtcccacttttcctgcaaaccgtcctacaatgattgcatccaccgtcacatacagctgctggatcaggcttcccgcgatcagaggcagcacaaagaataaaattgctttcccaatgtctccttcaatcagactgttactcttattttctttcaccttacttttctcctgttttatttatttctgcatattttttgtatacagatgacaggcgacctgatgatccggtgtaaggctgaccatttgcggagcttcttttttgcagatcgccatgcatttggtgcatcgtccctggaacgggcagccttccggcagctccagcgggcttggcgcttctccttccaggttctcgatcggtttggaaaaatccatgttaatatcgaagacagaccccatcaatgctctcgtatacggatgcacagcatctttggaaagctgtccgcccggaagtacttccaccacatttcccagatacatgactgcgatctgatgggcacactgctcgatcagcgcaatatcatgacagataaatccgatcgtaatattcttttctctctgtaatttcgtgatcagctcgatgatcgtcttctgcaccgatacatccagtgcggaggttgcttcatccatgatgatcacttccggttccagagccagggcacgggcgatcgccacacgctgtctctgaccgccgctcatattatgtggataacgatccgaaaattctgccggcagttctaccagctccagaagtctgcgacagttttcttctttttcggattttttgattctcccgaagttcagtaacggttcgcatatgatatcacggatcttcattttcggattaaaggatgcggtcggatcctgaaaaaccatctgaatatgctggcggttctgacgcagtttttctccctttaattttgtgatatcttttccacggtacaggatctcaccctcggaagggatatcgagagataccagaaatttcataaacgtactttttccacagccggactctcctaccagtcccagtgtctctcctttataaaacttcagattgacatcgttgttggcaagcagtgtccgtccgtctgtcgtgcgaaaacgccgggtcacatgttttgcttccaggattacttcttttgattcagacatatctctcacctcccacggaaggaacggcacccagaaggcttctggtatatgcatttcgggtctcatgcagaatatattctctcgttccctgatcttccatttttccgtctttcataaccacgatataatcagacatatacgctgcgattccgaggttatgcgtcaccacgatgatactggttccgtaatcatcgcgcagttccatcatctggcgcacgatctgtgcctgtgttgtcacatccagtgcggaggtcggttcgtccgcaagcagcagtttcggctgataggacatgcccatcgcgattcccacacgctggcgcataccgccggaaagctggaacggataggatttcatcacgttatccgggcttggaagattcattttttccagcatcccacagccttttgcccaggcatcttttttcgagattttttcatgggtgcgcagatattccacaaatacatctccaacctttcttgtcgggttcatcatcgcaccgctgtcctgaaagatcatggagatctcactgccgcgcaggtttctccactcttcgcggttataggaaagcagattctttccctcaaacgtaatgcttcccccggaaaccattccgcctcctgccagaagtccaagaacggcacgaatcacggtagtctttccgcttcccgattcacctaccagtgatacgatctgtccctgtttcatatccaggttaaaatcctgcacggtaggtacattcttataggaaacggtcacatttttcaactgtaacatattttccatgttcgccctccttactcgtctttcggatccagaatatcccggagagaatctcccagcatattaaaaactacaactacaataaaaattgccagaccggggaaaatcatcatccatggtgcagactgaatacatgctcttccttcgtttaacatatagccccattccggtgccggaggttttgctccgaatcccaagaaggacatcgctgccagttccagcatcataccaccgatatcggtagctgccgtgatgatcagtgtcggcagtgcgttcggcagcatataacgtaagatcatatacggtgttttcgaaccggttacgatcgctgcttccacatagtcacggtgacggatcttcagaaccaggcttcgtccgagacgggcgtattttgtccagtttactacaactacagctacaattgcatttttcatgcttgctcccatgataccggctacggcaagtgccagaaccagacccgggaaagacagcatcatatcagcgattcgcatgataatgctgtccacgataccgccaaaatatccggcgatcacgccaagtgtggttccgataaagaaaatcagtgcaactacaccgaacgttgctgtcagagacgctctcgctccgtagatcacacgggcaaagatatcacgtcccatcttatcggttccgaaaatatgtgccttactcggagccagcaaggcttcatccagacttcctttcagcggatccacacccccgctcacaaccggggcaaatactgcgaccagaatgatcacaacagccagaatcagaaaaaaggtaaattgtttatattgtgtaaaaaaattcttctttttcatacgcattactcctttaatctcattctcgggtcaatatatacataagaagcatccacgatcaggttgatcaccatatagatcagcgccagccacaggacatacccctgaatcaggttataatcgctggaagtgatcgcggacaccgcaaggtttccaagtcccggataggaaaagataacttctactactgccgtaccaccaagcagagatccgatggacagaccgaacatggtgatcagaggaagcagagagttcgggaatacattgaaccagacgattctggaccattttacgccccttgcctgggcaccaatcacatagtcctggctcagttcatcaagaactgcggtacgcacctgacgggtgtatttggaggtcatcgcgatcgccagtgtcagtgccggaaggaacagactcttaaagtctcccgcagaactgatcaccgggaaaatctggaaatagacacaaaatgccatcattaaaagaagtcctacccagaagttcggcatcgcacagccgataaacgtgattccccgtaccagataatcgatccaggtatcttttttcaaagcagatgccataccgagtggaatagaaagtaccagcatcagcagcatcgccatcagtgtcagttttaaggtcggccacagtctctctgccagaagttctgttaccggtttgttcagggaataggattttccgaaatctccctgcagacagttgccaagccatcttccatactgtacaaaaaacggatcatttaatcccatctcttctcttgtctgctctaccatctcctcggtcggcattacaccgttggcggaatacatgtttcgcaccgggtctcccggtgacatataggtcagaccgaatgtgataaaactgataccgaacagtaccacgatgatctgcagcagacgcatgagtatttgcttcttattcaaatcgttcacacctttcttttttactaaaaatacatgttatcttgtcatgcaacggcataacgcccggttgtaaaaacaaccaggcgtttccagagtttcttattctgccggaacaatctccgtacttaaccagtaataatctgcggtatgaatcttcgcatatcctacatttttggaatagatcatactggagttgtagtatccgtcgatcagaactgccgcatcatcgatcagaatctgctgcatctggaaaatcagatctgcacgtttgtcctcgtccatctcacttttcagttcctgatataacgcatcgtattccggattagaatatgcacagtaagtgctttctgttgtccagtttgccatgtaagcgaacggatctccggttcctacggtaatccagttgttgttgttaaaatcataatccagtgctgccagcttactccactgatcatcagaacttccgtactcggaagtaacaccgattccgatctctgtcagatactgggtatgtgcatcagaaaattcattcagcagccggttttcataagaaatataacgcagattgatattttctccatcaatctcacggataccatctccgtctgtatctacgatccccgcatcatccagcagtttcttcgcaccttccggatcataggtgtatggattgttcagtttctcatatccataggacaggttggatggaagtacagaaaatcccggtgtatacagtcctccgatcgtcttggaattacagatggtatcataatcgatcgccatcagaatcgcctggcgcagtgtcttgttacccagaacgccatcaaagttcatccaggaaaaaccacagcgcacacctgtagcaatatctacagtatagtcagcagaatcctggaatttctggatatctgctacgttggtgatattctctaccaggtcaacctgtccactttccagtgccattgctttcgcagagttgtcacccatatacagcaggtttactttatcataaggtacttcttcacggaagttcgggtttgcgaccagtgtataaccgacacccacaccgttgaaagaatcgatcatgtacggaccggttccgatggtaccgttatcaaagttctccgtatgctctacgtctacgatacccatggtcggatggctgagctgtcccatcaggttggcatacggctgtgaggtcttgattgtcagagtacctgcctcatcatctgcatcgatggttgcatcgaattccagatatttttccggttttgcagaaccggacggtcctacttctttcagatgttcgtatgcttcttttactttgcttgcggtaagatcgcatccgtcagagaacttcagaccttttttcagagtaacgacccattcggtatgttcgtcattcacggtatagctttctgccagccatggttccagttccatgttatcgttgaacttgaacaatgtctctgtgattccgtaacgcatcgcgttccagccaccgttctcatcacctgcagtgttgacgcttccgtcggtgtacattgcacatccgaagttcagaaccttctcttcggatgaagattgggatgaagaagagttctcgcttcctttgcttccgcatcctcccagtaccgttgttgccattacgcctgccagcagcagtgccagtatcttttcttttttcactaattttcctcctgtgttttgtttccagttgtcttccatttcctgttttatagcatagaaaaaacagtctgtatctttatgcagactgtccccttaatttctgacgcagcagttttccggttcctccacagtcataagacaggtttgcacctaaatcatgccgaaaaatcacttaatcatattttaagagttctcatcagccgtgagaaacatctcaaagatataagcagttctcctgacttcagttcatcacctcaaactccttcccggaatttctctcttccagtggcccatgttctcggctccctgtcacagtggcgggaccgcaacggattgacaccgttttctctatcaatgcttattgcaacttatatcctgaatgtaacgcaaatgtcattttaacagaaaaaatccgtcttcacaaggttttcatgtattccatttagttatatatgagcatttgttttgcaccataaattatcttaattgttatatttactgatctcttgcagatattcctttcctatcgaacttaacggaatccccttccttttcagatatccgatcgtcatggtttcttctgtggagagttttaccgcacaatactccgaaccattcagattttcgcagataatgccgctgcaaagtgtatatccgttcagtcctttcatcagattcagcatcgtcgcacggtcattcgccttgatcgactgtttgtattcatacgtactgaacacttcctccgcaaaataaaacgaattgttgctgccctggtcaaacgagagaaatggataatcttccagatcttccagggtaatctctttcttttttgccagcggatgaccgctccacagataaacatattcctgacagtcaaaaagctcatgaaattccagattattttcctcaaagatcttttccagcactttccggttaaaatcattcagatataaaataccaagctcgctccggaagtttttcacattttcgatcacatcatacgtctgtgtctcataaatagaaaattcataccgatccatcccgaagcgtttcaccatctccacaaatgcctgcaccgcaaacgaataatgctgcatggaaacaccgaactttttctttactttttctttatccacataccgtgcctcgatcagggcatactgttccacgacctgtctggcatagccgacaaattcttctccgtccggtgtcacctggatcccgcggttcgttctccggaaaatctcgattcccacttcgtcttcgagttcccggatagctgccgagagactgggctgggagataaataacttctgtgctgcctgattcatcgaacgggaatccgccacggtaattgcatagcgtaactgtaataatgtcatatcctgctgctcctttttctgtcgtgctgtaaaaatatgttttgattataccctaagattttccataaaaaaagaccttacggattctttttacggaatccataaggtcctcgattttatttgtcaaagctttatgccaatgctgcgcccagtgccttgcagttttctacgccgtcatcatccggcatgtcgttgcagattacactctctgttgccagaacagctcctgcttctttacagctttcctcccagtttctcatccattcaccgtcgccccatccataggatccgaacagtgcgatctttttatctttcagtgcatctttgcagccgtcgaacattggttcaaattcatcttcttccagcacttcatctcccatagccgggcatccgaatgcgatggcatcgtaatctgctaccagttccggacggaaatccgcacattcatacagagttacatctgcgcctttttcttttgctccatccactactgcatttgccatagcttctgtatttcctgtactgctccaataaacaactgctactttactcatctttatattcctcctgatatttacgggattccccccgtttttatggttaagcagctacagtcagctgcaaaacgctcctgccattttcccacagacgggaatagatttctctgcattttttgtatttgcagaatgttttttctgcttcttttgcattgccataggctttccagcagccggaacacttacagttttttccggtgttacggataaatcctatcacatcgaccagcggataatcgagaaacagaccgatctcatgtgggaacttctcgcacatatgtaatctttctttcagttctttcagtgcctcttcccagtgttctccctgatatccacacgcccgcaggaacttctgcacccccggtttgtgaagatcgttttccagtctctgtggtctgcacagataaaccagcgcttttttttcgctctttcgaagaatggtaagataaagtcctttgtccttcatctgcaggttccactgccagacatcttccgccaggctctcgcccgactcatacggacagctgaacatattcgctgtctttaaagacgccagtgttggagaacagtgatcgatcagatatttttccagcatgtctctcctccgtcacatcctcttagtttgcaaagcagttttccagaataccggtcagcgcgtttccgctgctggtgtgacagcgaaccacatcggtatgttttccgtcgatctcatccagtgcgcagcgcaccatcttgtgggatacggtattggtaaataataccagcagatccggacatccaatctgtttgttgaaatctgctcccatatgggtaaatacttttaccttgcatttataggatttgcagatctttttatactgcgctaccatgcggtcatgtccgcctacgattacaacgctcatatgattcctcctgttttgtcaaatactttttataaacgttccatccgggatctcaccggtttttgtcttaaaaatgttacctgtttcttctttttgttagttttatctaactgttgaaattagtgtacactaactttcgctagttgtcaactaatttcttagtatttttctaggaattctaaaaaaaccaatggggacggttctcagtggttgttggaaccgtccccattggttattctgcttttatttcgtcggtctcgatgatgaaacggacacttccggtttcaccctcgcggataccgccataattgtcgtattttccgtctgctttctttaaagcgcggatacggtttgccagattcgtgagatcttttcctgtcagatcgctcagttcccggataccgtcctcgtcgaatttgatcagtccctgatgcaggctgtccatgccggagatcatcgtatccagaccactgatcagtacggttcctgcgggggagagctgaccgcttccctgatgcagtgcggtggagccctgatacagctgttggataccttctccaaaagctgccactccggcttctaactgaccgcttccctcctgtaactgtgcggttccggtctgtaatgcggtaagaccggtctgtaattcctgcagggctgctgccgccgtctgagataccgtgccaagagtggtactatagcctgccagaattttcatctgtttttgcatatcgttcaacgtctctgtcagttttccggtatcgagagaaacttccggtatggtgatcgtcggaatggcttccagcgcctcttttgccttcttgatctgcgcctttgcttcatcgcttaccgatatctgatccagtgctccgtttacctctgtttttacttctcctgctgccgtctggatctgttctgcgctcagtccgtagttttcgagtgcttttttcatcgcgctgtcaatcgccgcatctgcctttgtctggctgtccgctctcactgcctgatccagctttgtccagtcaatcgcatcaagtgccgtcttcgcggtttccagctgtgtttccactgttgcttgataaccggcagcttctttcgccagttcctgcatctcggcaagtccggttcccatctccgtcagcacttcattcagcttcgtttcgtctgcctccagctgttttgccgctgtctccataccggacagatccaccgaacttccctgtggaagctggatcgctgccagtgtatcgtgaagcgtggtaaggctttctttcagaagggttgcccctgcctgcagatcaccttttttctcattcatcacctgcagtccgctctccagcgcacccgctccctgatcgagcgctgtcacaccggacaggtactgatccagataggtctgatatgttttcataccgtcttccagtgtaccggcgccgtcagagagtttgtcggttgcttcttccagttttttcatgttgtccgacatctcatccacatcatccagatctttcagatccatatcttccagaagcccggaggaaatgatcgtcgccgtaaaatccagagagaaatccgtgacatccgccatcacttccacatactccggaatatcaatatcttccgttggttcatacgttgtcagtttcaggctcttcgtcagtcccgggcaggcatatcccacgaccagtttctgtccgtcgatatccatgacttttccgttttccgccttaatattagacgcgtgatcctcggataacagcatcgtggagatcaccgcaaacggcacactgacctgctcttcttttccttcgattttgatcgtctgtgtggttttatttttatagtcaaaccggatcttcagcgatccgctctttcccgccagttcttccggctcgatcggctgaccgtccagttcatagctgatattcacatccaccggcagttcttcgcttccggttccctcataggtaatatcctctccgtgattttcccactcgatggtgccgtctgcattctgtgtaaaggcttcgtccccttctttgttct

SEQ ID NO: 2460 - DNA, 6885 bp, Unknown
  gut microbiota DNA sequence
gctttcgctttttctcttgacggtgccagtccacggctgactaccagtacatccaatcgttctttcattcctgtatctcctgtcttatttctgtatctgcagttttgctctgtccgtaactgttcactgctttcacagttacgcatactgaataactacttcgtttttactttcgtctgccactgaagcacccgttctgtcaccgaatcactgtccatctgctgctgacgcaacagatcctccacacttccatgcggcacaaaccggtcttcgatcgcaacgatccgcactgccggaccatgcattctgcttccataatatgtcatcacctgttctccgaaaccgccggattttacattttcttccatggtgacgatcagactgtgatcttcttttataatatccagaagctccgtatccagtggtttcacaaaccgcatatttaccagtgtcggttcatatccctttttacggagattttctgtcacctgtacggccgtccgtaccatatttcccactgccagaatggcaatttcttttcctttttccagaacttccgcttttcccatctcgatcggtgcccggtactcttccaacccggtataggcttcgcctctcggatatcggattgccaccggaccgttctgccggatggcaaatttcatcatatcggaaagttcccatttatttttcggtgccatgacggtcatattcggcatcatggacaggtaacttaagtcaaaacatccatgatgtgtctctccatcacttcccactaaacctgcgcggtccacggcaaatacgaccggaagattctgcatacacacatcgtgcaggatctgatcgatcgcgcgctgcaaaaatgacgaataaatcgcgaccaccgggcgaaggcctccaagtgccagtcccgcagcgaaagtcaccgcatgttcttctgcgattcccacatcaaacaggcgatccgggaacatattgccgaaccgtttcagtccggttcccggtaccattgctgccgataccgccactacatctggttcccggtcaccgaattttctcatgacagttgaaaaaatatctgtataagatggatttcctttcgattttggaagtccggtctctatctcataaggtgctgccccgtgaaatctggccggatggcgcatcgccggttcatatccacggcctttttctgtcagcacatggatcagtaccggaccctgcttccgttttgcttcctgcaacacttttcccagttgccgcatatcgtgtccatccaccggaccaagataggtcagtcccatattttcaaaaagcattccaggaatcaccagctgtttgatgctgctttttgtcttatgaagcgcatccaccatgccatctcccactttgggaatctttttcagagcgttggttacgcccattttcaactcagtataaggtgccgccatccggatatgatccagataggaggacattccacccacattccgggtgatcgacatctcattatcattcagaataataataaaattcttctttaattccgccgcattattcaacgcttcatacgccataccgccggtcagcgctccatcaccgatcacagaaacaacctgatagttctcccctttcaggtctctcgcctgcaccagccccagtcctgcagatatcgaagttgaactgtgcccggtatcaaacgcatcgcagtcactttcttttctcttcggaaatccacttaagccacccgtctttcgaagggtggcaaactgttcttttcttcctgtcagaatcttatgtgtataagcctgatgacctacatcccagaccagcttatcttccggaaaatgtaaaaatcggtgtaaagcaatggtcagctccaccacacccagattcgatgcaaggtgtccgccggtctcactgagcgaccggatcaaaaaatcacggatttcctgtgccagctgctcacattccgaaagagataattgttttacatcattcgcctctttgatcttttccagtatcatacgcattcatcctttttaatttctcctgttcaccagatatcctatcaattcccggagaaattcatttttctgaggaaatgtatccagaagttccagtgcttcctctgaaattctctccacgtcctccgccgcaccctcaagtccgcgaagtgtcacataggtctgtttctgattcttttcatcgctgtgaatcggttttcccagttcttcttccgtgcttgtcacatccaggatatcgtcccggatctggaacgccagccctactttactgccgatctgttccatctgcgcggtctcttcctctgtggctcctgccagaatcgctcccaccatcagggaagcctcgatcagagccgaggttttgttttcatatatataatccagcatctgccgctccatgggttttccttcgttggtcacatccacgctctgtcccccgagcattccgtacacgccagtctttctcgtaagtaatgccatggcttttccaatcgccggattcgccggttccatggaaaatgccgcactggctgtctcatatgcataattcagtaatgcatcgccgcttaaaatccccagtgcctccccgtatactgcatgggtggtcttttttcctctccggtactgatcgttgtcaatggccggaaggtcatcgtgaatcagagaagaggtatggatcatctccatcgctgcctgaaaaggctcaatgacagctgatgtccctccaaacattcgatacgcctcgcccatcagggtcggtcgcagccgttttcctccggcctccatgctgtaattcatcgcttccgccagccgtgcggcaaatccttcttcttttggaagatagtttcggatgatctcttcgcattgctctttcttttcctgcaattctttttcaaaattcactctattcaccaaccttacgggattttctcattattttgtaatcgttatcatcttttcgtaactgttcagttccttcacagttacgagtcaaaatgcatttaaaatcaccttcggtgatggcattttgacttgtatgtctcgggattttggcatattcatgccaaaacacctcgcgggatacttcctactgaatcgttatcatttttttctcaaccgtgtcaatcttactgttacacgttttcaccagttccatacctttctgatataaagcaaaggaatcttccagtgaaatatcttttccttccagctgttccaggatcgcatcgagttcctgaaacgcctcttccatgcttactgtttttcttggcatattttctgtctcttttccatttctaacgcctgtcagcgacaactattcacagttatccgtttctttgcctctgctgacgttccacgcatccgagttctctattttttctacgttcgaccagatcacaccgtctttgacataagtcttcatccgttctccctcccgtacctgtcctacggaagaaatccgggttccgtcctcatgttccatatagccgagtccctgctgcagtttttcgagtggagatacgccgcgcaaccgttccgcatacagatacagtcttgttttctccatctgcagcttcttttccatccgctcggtaagtttctcttccgcccgcagcagatacatccgtttctcccggatctggttttccggactgagatatgccagacgtgctactttctccgtcagtctctgcctggtcatctccagtttgctgtccatggacagttccagtctccgcacataacccgcgagtagctcctgccacccacgataatcaaaaacagcaagttccgctgccgccgacggtgtcggtgcgcgaagatccgccacataatcggcaatcgtcacatccgtctcatgacctaccgcggaaatgatcggggtagaacagtgaaaaatcgctcttgccacaatttcttcgttaaatgcccacagatcctccatggatccgccgccacgcccgacaatgatcacatccacgccaagctgatccagcgcttcgattccttccacgatgctctctgtcgcaccctctccctgcacctgcgccgggtagaggatgatctgcacgtatggatttctccgggctgtcacatttcggatatcctgaatcaccgcaccggtgggcgctgtcaccacacctactgtctgaacgaatgacggaatcggctgtttgtattccggtgcaaacattcccatctcttcaagttcttcttttaacgcaagaaatcgttcatagagaatccctgcaccttccagtgtgatctttctcgcatacatctggtattttccatcgcgttcgtatacgtccacactgcccgtaacaaccacccggtcaccgtttttcatcgcaaacgccagcccttttctctgtcccgcaaacatcacgcacgccagagatccactgccatctttcagtgaaaaataaatatgcccggaactgtggtatttgcagttgctcacctcaccgcctacggagatccggctcagcataaagtcctgggtgaacatatttttaatatatctgttgacctgttctacagaatatacactactcatcggcttctttcgccagttttcccagtacaccgttgataaatgccggtgcttcgtttccgccgaatttctttgccagttctacggcttcgttgatcgctacttttcccggtacatcatcgtcgtaacgcagttcataaactgccagacgcaggatagaaagttctacttttcccatacggctggttttccatcctttgcttgcctcgttcagtgcttcatcgatctccggcagtttttcacggattttttcaaatttgtcctgaatataactctgatctttgtcctggatgtcttcgattccttccagatacagttgcttctgttctgccatctcctgattgtcgttaaattctgtcatgaacagcagctgaaaaatgctttctcttaattctcttcttcccatggttttctcctcgtattcgtcagtagtaaaaaagggagcctcatccagaccccctttccttccgtcctgcgttctattttattttccttcttccagtgctacaccggcaatgctgatgtttacatcggaaacttccagaccagtcatattttcaatggctgtttttactttttcctgtactttcttgcaggtttccggaatactgtatccgtactccagattcaagttcagattcacgcataccacgttctccagaacatctacttttacacctttggacaggtttttcatacccagttttccaaccagttcgttggtgatgtttcctgccatagaagccacgccttctacttcggtcgctgccagacctgcgataattgccacaacttcatctgcaatctgtacttttccaatggtctgatcgtcatatatggtatacgtgtcacgcatatcttttttattttctgtcatctcaaaccctccttataatcaagagttgtcctgattttttctgatttttcagtcaggaaccattatttatatttattatatcaaaaaattgcgtaaattaaaaggggaattgccttagtttttgctgaattcttccaatttcaggttttcgtttcgatccagtgtcatacctacgctccaggagtttacgaacaggagcagcggattgcccttcatgtcttttaccttcttcatatcggaggttccggtcagtttttccacatcaacttcttctttgttagcgatccagcggatatgttcgtatggcaggttttccagacggatatctacgttgtattcgttttccagacggtattttaatacatcaaactgcaggacaccgacaacgccgacgatgatctcttccattcctcccatgtattcctggaagatctggatagcaccttcctgtgcgatctggttgacacctttgacgaactgttttcgtttcatgctgtctaacagacggactcttgcaaagtgttccggtgcaaaggtagggattccttcgtaggcaaattttttacccggtgtgcacacggtatctccgatggagaaaatacccgggtcgaaaacgccaataatatctcctgcatacgcctcttctacgatatggcgatcctgtgccatcatctgctgtggctgggaaagtcgcatctttttatcgccctgtacatggtagacttccattccggcatcgaatttgccggagcagatacgcataaatgcgattcggtctctgtgggctttgttcatgtttgcctgaatcttaaagacaaacgcggaaaattcttccgtcatcggatcgatcacgccacagtctgcggttcttggcagcggtgaggtggtcatcgtcaggaaatgctgcaggaaggtttccacaccgaagtttgtcagagcagatccgaagaataccggagagagttttccgcagcttacagcttccatgtcaaattctgcgcttgcgccgtctaacagttcgatctcatccatcagctgttctttctgatcttcatccatgacttcgtcgatttttgcatcgtcgatatcgatttcttcgatatggccttctttggttcctttcatggtatcggagaaggtcaggacttttttggtatctcggtcatagacaccgcggaatttttttccggatccgatcggccagttgaccgggcaggtcgggataccgagttctttttcgatatcgtctaagagttcgaaggtgtcgttggcatcgcggtccattttattgataaatgtaaagatcgggatgtggcgcatggcacagactttgaagagttttctggtctgtgcttccactcctttagatgcgtcgatgaccatgacggcggaatcggctgccatcagggttcgataggtatctt

SEQ ID NO: 2461 - DNA, 30837 bp, Unknown
  gut microbiota DNA sequence
gatcatcgtgcgatcctgatagtcccgcagtctctcacttgccgcctgtattgccgcatcgtcctggtctattcctattaatctccccgtggcagataataatttgcacacttctgaggcatgtcctgcccctcccaaagttccgtcaacatagatgccatccggcttgactttcagattgtctatggtttctttcagtaataccgatttgtgtttaaactccatctaacgctcttactcctttttctttcaccggactttagatgataattcccatctcctgcatgtcttctgcaatcgcatccatatcatcatagtcattattttcactccacttcgccttgctccagacttcaatccggttcagattaccggtgagtaccacatctttttccagacctccaaattcccgtaacgttgccggtaccagaattctcccctgtcgatccagttcacatgtcgtcgcacctgccacgaagaatcgtgaaaattttctcgcatttttgtttgtaagcggtaaagcttccagtttcttctcaaagactttccactgttccataggataaatagaaaggcagccgtctaaaccctttgttaacacgaattcatctcccagttcttcgcgaaacttagacggtataataagtcttccttttgcgtcaattgtatgactgtactctcccatgaacatagaatttaccctctttgagtaccggggaactccccggaattatgaaataaacggttctccccaaccttttatttcgggtgcttgttggaatcggctgccacacgttctccccttcgcaccactttcctccactttctaccacttatgttctttattctaaaccatatgttgaaagaatacaaggggaaattttggaaaaaaaatgaggaaaagtcgaacttttcctcatttttcctcgtttttttactactcatttacttatacattgaaacggaataaaatcacatctccgtcttttaccacatactcttttccttccatgcggaccagacctttttctctcgcacctgcataggaaccggattccagaagatctttatagttgacaacttctgctttgataaatcctctctcaaaatcggtatggatctttcctgctgcctgcggtgctttcgttcccactttgatggtccatgcacgggtctcatcctcgccggcagtcagataactcatcagtcccagcagttcataacttgccttgatcagtttctccagaccggactcctcaattcccagatcatccaggaacatcttcttctcatcgtcttccagctctgcaatctcctgctcaatctccgcacagatgacaaacacaccgctgttctgctcttttgccagctcgcggactgcctgtacatgcggattggaagctccgtcatccgccagatcatcctcggaaacatttgctgcaaaaatgaccggttttgctgtcagcagattgtactcctgcatccatgcctcttcatcttcattttccagctccaagctgatcgccggttttccgtcttccagatgcgctttgattctctgctgcagttccagctctttcgctgctgtcttatccattctggctgcctttgtcgtcttggcaattcttctctccaaaatctccagatccgaaaagatcagttccagattgattgtctcaatatcacgtaccggatcgatctttccatctacatggataacattagaatcttcaaaacaacgaactacatggacaatcgcatccacctcacgaatattcgccagaaactggttaccaagaccttcacctttggaagcgccctttaccagacctgcaatatccacaaactcaatcaccgccggagtcaccttcttggaatgataaaaatcccccagcagtttcagtctctcatccggcactgccacgatacccacattcggatcaatcgtacagaacggataattggcagactcagcacctgccttagtcagtgagttaaataatgtactcttacctacgttcggaagtccaacaattcccaacttcataatctatattcctctttcctgtctgttattcttcatccagcccttatattcccggctgtatttttccatgtattccctatgaatacacatcttcttagagtctaccatatttcccacacacaggcaagttttcttttctcccaccatttgttttgaaaaatcatttttggttttttaatattttaatggtatgctgttcctcttttaccctacgcccttctgtttttatgacgtttcttataatcctctctgatcgatgcacagcaggcggatatcgtctgattcatctccactctgctcctcgatttccttacagcagatacggtttcggaaaggacctgataattcagagcagttccttctctgtcgcattcataattgatgccctgtcagctccgataccaactcttccggcgacttcgattgcatctatgttggctcccaggaataagaattcccagccatacttctctttttccttctcaaccattttcttcactttatgaaaggaatatttatgactggcattttccataccatcggttgttataataaataaagtcttttccggtctgtcctcttctctggcatacttgtgaacctttgcaatatggtgaatcgctccgccgagtgcgtcgagaagtgctgtacaccccctcacataatattgacggtcattcatcggctctaccttatctaccggcaccctgtcatataaaacctcttgccgatcatcaaaaagcactgtggaaatgcaggcttcgccttcctctttgctctgcttctcaatcatggaattaaagccgccaatcgtatccgcctcaagtcctctcatagaaccgcttctgtctaaaataaaaacaacttctgttaatcctttacgcataaaattcgtcctcctttacgattctcacctcgcggtgttttctttttacagactcattatacgaaaaagatcttccaaaccggtcgctttcaaagcgaccttaaatttctatgaaattatacacggcaagccatgctcctccagctgaatatcaagctcaatcatgtcataaatttcattctcaatgaaatacgaaaagatgatatccgtcttatcacagggcgataacgcatatcctgctcttgccagcaaatcttttgattcatccagattcacctttgccccaacacacaggcataacgcggtcagcttgttgggatggtagtttgctctcgtgcggttcttcaaaatcaaggcatgcagtctcatcactttcacataatttatcgccttgtcgaacttctttcgagagatatttctttgccgtttccttttttaatgtggaagtctgacgtctttccatcctctgagcgttcggaagatacgcgtcatagaccagttcgctttgtcttatcggaacataagcatcaccatactcttttttcctggcttccttaacatagttctgatcgatatacgcttccagtccgggataaattttctctcccagctgagtagccttcgtatcaaacactatcaggaaaatatccatttcattgctaagcaaaaatgcattcatctcatctactgcaattcgcattccttcttccttgggatacccaaatcctccggtagaaataaggggaaatgaaatagattttatgctgttctcctttgcaatctgtagactctttctgtaacaggaacgaagcttttcttcctctccctgatctcctcccatataacgcggacttactgcatgaataatataccttgcctcaagattaaatccaggagtgataaaagctccaccttctggcacaaaaccaattttttcttttcgatatttcagaagtttatcgtagcctgctgccttgtaaacagcactgtcacagccggtaccaactgatacatattcatttgccgtgttgacaatagcttctgtatgcatttttgtaatgtcattgcgtacgatcctgaatggcactccaatcgcctcctgttcttccctttcctgtcgccctattccggaactgctatcacaatccccctgtaagccaccaaatttcttaataaacgcgtaaaatataatagccgggtgacctcccagtgcaaggggaaaagcaaaacatacacactgggagtccccggttactaccaagaatctattcagtttccgaaacctcagactgaaatccagtcttttttaaaacgtaacctttaacgtcttaatctcataaggtttcatctcgaaagtcgcctgatttcctgtaaactctacaggatctgctccttcctccatcatattacactcgacaacagatgtcaattccttaccgaaaattagtgtcaccggagttcttctgttatagcactcgtacagacgaacgatgacagcatccgaatcttccgcttttttcacaacctcgatcactgcattatcctgatcagaggaaaccagagaatattccggagcaagtgttcctccttcattctctttccagctgcaggtcagagggttattgatctggtaagcctgttttaccgtaccggcttctcgccagccgccctgatgtggataaatagaataagtaaattcatgcagttctttatcagcttccggattcggatgaatcgcagatttcagcatggacataccgatcacaccattgcggacaccaacaccatacttgcagtcatttaacatactgacaccgtagccatcctcggacacatccatccatttatggtggcagacttcaaattttgcaaaatcccaggaagtattgtcatgggtatcacgttttacgttaccatactggatatcaaatgtagcttcgttggtatgtacatcgatcgggaagtagtctttcacaaagatctgatgctctttccagtcaattacattcttgatatcgattcttggaatgtcatgatacagataaataaactgtgtgatcgtggaatccagatatttacgctctacttttacacaggctcttaccggaccattttctacgacttccatcgcggatacctgatcgatatcccaggatttttctgtatagtaattgtttacatcccatgcatcatagttatgcggacggtcttcgtaacttacgatcacgttaccggcttcacccggtttcagtacatctcgttctgctttcttatcatagatcttcgcaaactgacctttttcattatattctaccttgaagaattcattttccatcactttggtggatacttccatcgtcggtgtggtatctgctgcttcttctttcacgttataagtcttatatccttttcccggtaggcctgctgcaaagaatacatatgcgccgtctgcggttttctgaacagccagttttgtctctccatcgtaaactgcaggttctcccattccttccggaacagtaaaggttaccagatcatacgctgctgcactgttcgggttatatacaaccagagaatgcttcggtgcttttacacctgctgcgatatgtgccagtgttgcatcggtcagcgctttgttctctgcaaagatgccttcgtactctgctttggaatcatcatatacttctttgatcgaagatcccggcagaatatcgtggaactggttacgcagaatgacctcccagccctcatgcagctctttttccggatatgcaccacctgtggtctgtgcatccatcattgcgtacatttcttcgttctgatatgcaaattctgctttccggttgaactttttgtttcttgccatagaagtataagtacctctgtggtattccagatacagttcgcctacccatgtcggcagatattttttatcggttacatgtttatccagcacatggaagaattcttttgcagtagacatcttggttctcggcatacccgggagaccttttgccagacgtctctgattctccagcatatctttggttgggccaccgccaccatctccaaaaccgaaactgcaaagtacttcttcgttcagatatttctggctgtatcgtgcccatgcacccttcatctggcttggattgatatatccgttataggtggtaaagtgttctgtctctgtaccaccctcaactgctgccctattgtaatcacgggtcggaacaaaatgtgtcagtacacgggttccgtcgataccttcccattcgaatgtatcatacggcatcttgttaaactcgttccagctgatctttgttgtcatgaaatacggaattccacatttctgaagaatctgcggaagtgctgcggaataaccgaatacgtcaggaagccacaggatctcattgtccacgccgaactcttctttgaagaatctctgtccgtgtacaaactggcgaaccagtgcttcaccggaagcgatattacagtctgcctctacgaacataccgccgtccggctcccagcgcccttctttgactctttctttgatctgttcataaacatccggatcatttttcttcacatatttgtacagctgtggctggctggacataaatacatattccggatattctttcatcagttccagtacggtagaaaagcttcgaactgccttatcttctgtcacacgcagtgtccacagccatgcacagtcgatatgggtgtgtcccacacagtagataatcgggctcttctcgccgtcgcaatatttttcataaaattctttggtaatatattcctgtgctttttccaggctttcataatactctttggaaccttcttttctcatgtccagcaggttcagagattcgttcactgcctgaatgatcgtgatatatgcctgatcttccgtgttcagcagtctcgcactctggtacggaacttccaggtcatagtaatatttttctgttttacgatccagtactttcaggctggaattcatcttcagactgaagttctgatctccggtaaatgcagacaggacgatgcgataggtatctcctgctttggcaggttctgccaggatgatctctctatggttgacatcaagaccctgtactctcacaccgtttacaaagatggaaaactgtggattcgttgcatcccactctccttcttttccggttttcagttcatacactacacactctccgtcaaattcttccggaattgtcactacggtctcaaaccagtaatattctctgtgtccgccccacagttcctggttcgtaatctcggtccaggatgaggtatccagattgtttacatccaggcatctctcatcggtgcggatcatcttgtaactcggaatcgcaacctgcttcggatatacctgtgcctgcagatactccagcattttaccgattctttctttgatcagtatcatttttactacctcccgataaataataacatgacagtaaccgctttcttctttaccccctgcggttacgcaaaaaaaccatcgctgatgcctgcgcacacagcaaatagtaaaataagtctgcgtacttcctgtatccagcgatggttttctcatggctgtcctcttcgtaaacagaacatacagcagaactgacagcttcgtgtcgagaactctccggtcacggaaagcgtcattggtaatattataccatacactcgcttttttttaaagttctgatgtcatctttttccacatttattcattttgtcagaattttttcgtcaaatttactttttcatcgaaagtgcgaaaagtgcaaacagggaattcgcccatgcgaaccactctctggtaaatttcttcggatcctggcagtcaaatccctcgtgcatcactttacagtctgcatcggtagccagaagggtttccagcagttcttttctctcttcttcgtcatcagaagtcagtccctgcatcgtcagtgcgatgtgccagatatactgatccggtgtgtgcggacttccgattccttttgcgctggcgccttcaaaataatatggattctttttgcttaatacaaaagctcttgtatttttatagattggatcgtcttttccacagtatgccagccacggcagagataacagactcggcacgttggcatcgtccatcagattgtagttgccaaaaccgtctgtctcgtacgcatagatctttccgaaggtttcatcttccacgataccgtatttgcagataccttcctgaatctctgcctgtaactcttttgcttcttttgccatctgtggatcctggaaatctttctccaggaattctgccatataatccagaactacgcttgcaaacatgttggacggaatcagataaccatatttgcacgcatcatcactcgggcggaatccagaccaggtcataccggtgtagcctaccggtgcgccctttccatcgttacttaaggtatcagacggtggacagttgagacgtacgaaagaatactcggaattctcgtggtactgctcggtctgccatacatccagaatgtcgcgaaatgcctgttttacttccggtgtaaagacatcccttgctccggaattctccacgtactgtttgatcagccagatcgggtagcacagggaatcaatctcatactttctctcccagttccacggattgtattttgtcaggtctttctcccagcagtttccgttgtcttcttcgttaaatgcattggcatacggatcaatatgtacatactttgcctgacgggcgatcagcccttttaccatctcttttaagatcggatattctttcagatatggcagataatgaacgacctgtgcagaagaatctctcagccacattgctgcgatatctccggtaaatacatacgcttctccgctctcaagaaattttgtcgtggtttttgcagtacttacataacagttctggaaggtttcctgcatcttcgggtttccttcccagtatgctgcttctttttttgcgatctcttctaccgcctgcaccagtgcttctttcttttcctgtgtgttcatgtaaaaatcctccttgtcacttcagtctttgctttgtatcatcaacagtacaccctgttcccagctgacatctgccacatccgctgtgatctcattgctcacccccagaccttcccggtcttttaactgatagtgatccagcggatatttaaagcccttaagtgtcagtccttccacggtttcacccatggggaacaaagacacataggtgccatactgttcttcttttttgagagaaaatgttttttctaccggaagaccgatcttatttctgctgtccacgatccataccggtacttttttctcccatgcttcttttaatatctgcagattgcagaccacgtgatcgatcctggtccccgttgcccccagaatccagatctctgtactgccgtcttccagggctttatccagtgcgatctttgtatctgtcgcatcctttaccggattgtaggtacggatcgggatctctccctcctgccggtaacgttccagaatctcgcccggaagactgtcaaaatctcccacgatataatccggacgaatatcatgttcataacaaaactgtaaccctctgtctaccccaagaatataatccggcttcagtttctgtataaaggagagagcaaaatccacctcgatcatgccccctgtgataatcagcgttttcatttcctatctgcgctccattctctctttcaggcggcggacattttctccgatgtttccgccaaagacagcagatccggcaaccagaatattggcgcctgcatccagcactttgtcgatggtcttttcattgatgccgccatctacctgaatgtccacatccagtccggcatccgtgatcattttacgaagtttctgtacttttccggtacagctttcaatataactctgaccgccaaatcccggattgaccgtcataaccagtaccatatccaccagatccagcacacattccagctggctgaccggtgtacccggattgatcgccacaccgaccttcattccggctttgcggatctcccgtaaggtgctgtccagatgcttacatgcttccgcgtgtacggtcagcatatccgctccgctttttttgaattcttcaatatatcttcccggctcctcgatcatcagatggacatcaaaaaaaagaaaactgtttttccggatcgatgcgatcaccggcatcccaaaggaaatactcggaacaaatgctccgtccatcacatcgatatgaagccattccactcctgcttcttcaacctgtcggatctgttctcccagacaattaaaatctgctgccaatatagatggtgataactgatacatgttttaatatctccttttttcctgttctttcagttcttcatagaaactgacataattttgatagcgctggctgtggatctttccttcttccactgcctgtttgaccgcgcagtccggttcatggacatgcacgcatccctgaaaacggcaggctccttcgtattccgcaaattccggataatggaaccgcagttcttctttctccatcccctccacaaacagggaactgaatcccggtgtgtccatcagataggtatgttcacccactgtcaaaagctgtgcatggcgggtcgtatggcggccgcgtttcagttttttactgatctcaccggtctccatgctgacttctccctgcaaaagattcgtcagcgacgattttcccactccggaaggtcctgcaaccactgttgtttttccatccaggatccggcggatctggctgatcccctcttcctgttcggcactggtaagcaatacctggtacccgcaggaactgtagatctggtacatccgttccagttcttcctgttccgccagatcttttttattgaaacagataatactcggaatctcctgttgttccattgtaatcaaaaaacggtccagcagctggtaattcggatccggctgacggactgcaaaaatcacaagtgcctgatccacatttgccgctgccggccggatcagctcattctttcttggcagaatctgaatcagattgcctgtcttttctttttcatcgagaacttcaatctctacgttatcgccaaccagaggttttttcttttctttccggaaaatccccttggctttacattcataaattccggattctgctacgtccacgtagtagaatccggcaattccttttataatctttccctgcatagatacctcttaagactgtttgaacggtacatttgaataatgtccacgttctacatattctccgtctaccatttctctcagatatacggttccggtatccacgccgtctgcaccggcaatggtcagtgtatatgggaatgtaattgtctgtccgtccagaatcacagtttccacgttctgtccgttgatattctgtaccagtgtcagctgtaccggaccaccaatgtaggtagatggctgatccagttttacattacaggtccagcttccgctgtctgcggttccgccattttccgactctgccggtacggatggtgcatgatacacctgcagcgtaatggttgaacccggatctacagaagttcctgctgccacactctggtttgccacgcagccttctgccacattaccggaggcatcggttgttgtctctacatttacctgtaatccctgatcgttcagtgtcttcttggcggttgcctcatcctgtccgatcacgttcggtacttccacctgtttgttttcttcacccagactgactaccagtgtgatcgtagatcctgcggacacctgtgtgccctcgcccggatctacactgataacttttccgattgccacggtatcactgtaatcctgctggatctctgtattcagtcccaatgctttgatcagtgcttctgcctcactctgtgactttccgattatactcggtatcgtcggtgcatcggttcctgtacttaccacatagttgatcacagttccctgatccactttggttcctgcctctgtttcctgagacatgatcgttcctgctttgtattcggaagacgggctttcgccgatcttatttccctttaagcccagctgttcgagaacactcagtgcgttttcttctgtcatgctggtcagtttcggtacggatacctgtccgttttcatctacggtatcatcgatttcttcctgctcgttctgctgtgcatcgtccttgttggcagatcctccgatattaaccagacctgctgcccttgcgataaagaagatcagaatacagataatgatcgctccgatgataaatccaccgattgtcatggctttttccagtttggaacttacttcaccctcgtcgtcatcatcatcttcatcgtcgtattcctcatcatattcgtcttcgtcatcctcgtcctcatcttcatcctcataggtatctttctgaggagtcgcataaccggaacgaccttcccggatagcttcgagttcgtcttttgaaagcatcacggtctgtgcatgctgtgccagcggtgtcacggtgacaaagtttccgttcggatccagcagggaatgtttcagatcttcgataacctccgacatgcttgcatatctgcggtccacactcttctgtgtacattttaaaatgatctgttccaggctgtacggcagatccggcacgtattttctcggtgatacgatctcttcctgcagatgtttgatcgcgatggctaccgtcgtatccccgtcaaacggaacccgtccggttaccatctcatacatcgtaataccaagagaatagatatcactcttcgcatcgctgtaaccgccacgtacctgttccggagaactgtaatgtacagatcccatcacattggaactgatcgtgttcgaagatgctgctcttgcgataccgaaatcagacagttttactttaccgtccacggaaatgatgatgttctgcggttttacatctctgtgtacaatgttgctcttatgtgcggcttccagtcccagagaaacctggatcgcaatactggttgcttcccttacggaaagttttccttttcttgtaatatagtctttcagggtaatgccctgtaccagctccataacgatatagtaaatgccgttatcctccccaacgtcatagacatttaccacattcggatgcgccagacctgctgcggcctgtgcttcctttcgaaatttggaaataaagcctttgtcctggctgaattccgctttcattaccttcaccgctacaagacgattcagcttatgatcttttgctttgtagacatctgccataccgccgctgccgattctgctgatgatctcgtatctttctcctacaatcattccctcttttaacattctttcacctcgtttgtaaatggttcgattagaattactgatatattatctctgcccccgtttgtattggcagttgccaccagttgtctgccggactgttcgatatcttctgaactctgaatgatctcctggatctgttcatccgctatcatattactcaatccgtctgagcacagcaaaatccgattcttttcctccagctgcacatcgaagaaatcgatatccacctcttcggacgctcccaatgctcttgtgataatgtttttatccggatggttccgggcttcctctttgctgagttctccccgcatcaccatctctgcgatccaggaatggtctctggtgatctgcaccagtccctgctcatcggatacatacagacgactgtctcccacattggctacatacgcataatatcccacaacggtcacagccacgagggttgtccccatcccggcttttgctgcgtcttctttcgcaagctcatgaatcttttcatttgcctcctcaatcgcatgacgcatgatctttatgggattaaaactcatatctttttttactgacgcttcgattacggaaacggcacagcgtgaggcaaaatctccggcattatgcccgcccattccatcggcaagcacaaacagatttggaagatttcctatcggctgctcggacgcatatacataatcctgattctgacttctgacttgtcctacatcggtcaaagaaaatgacttcatgccagcttctcccttgtcttctttatttttcttcggcggagtcttttgttgtattttcctgccggtcgctgtatttctttctcagctgaccgcaggccccatcgatatccctgcccatttctcttctaatagtaacattaattcgatatttttcaagtttatttttaaaattctctatcacttttttgtcggactgtacgaaatcccgctccttgatcgggttgaccggaatcaggttaatatggcagtttaacccgtgtaccagccccgccagctgtcttgcatcttcctggctgtcgttctttccgcccaccagactgtactcaaaagtcagtcttcttccggtcttttcaaagtaatatttgcatgccggaaagacttccgacagcgaatatttataggcgatcggcatcagttcttttcgcttttcatcgtttggtgcgtgaagcgaaagtgccagggtgatcgtcagattctcctctgccagctgacggatccgcggcaccagtccacaggtggacacggtgaggtttctctggctgatgttctgccctttttcatcacttaagatccggataaagcgaagcaggttatcgtaattatccagcggttctcccgttcccatcacaacgacgttggacacccgttctccggtcatctcctggatccggtagacctgatcgagcatctcggacggcaggaggtttctggtcagtccgccgatcgtggatgcacagaaacggcatcccatccggcagcctacctgggaagaaatacatacggaattgccgtgtttgtatttcatccacacactctcgatcacgttgccgtccgccagacggaacaggtatttttgtgtgccgtcgatcttagaagtctgcacttccaccacttccagatgcgtcagcggttcctgtttcgttaatttctgccgcaggctctccgagagattcgtcatctcctcataacttcccaccgctttctgatgaagccactgatacagctgttttcccttgaacggtttttcgccaagtgaaaccatcttttctttcagctcgtcttcatacagcgatttgatatctaattgttccattctgtttcctcttttttccttaatcttgccaggaaaaatccatcggtcttatgcacgcccggaagcagctgcagatacccctgtgctgttgtctcgctgtggagttcttcgcacagatacggatccaggctttcgagtacaaacggataattttccgtaaaccatgccacattgtcctgattttcctcccgggtgatcgtacaggtactgtagatcagtaccccgcccggttttacataagatgctgcattgtgaaggatccgtttctgaagtaccgaaagttcctgaatcttatcctcatccgtacggtacttgatatccgtcttctttccgatgacgcccagtccggaacacggtacatccgccagcacaatatccgctttttcgatggattctttgtccaggatcgttgcatcttttcgatacgcacggatattcagtgtctgtgttcgctctatattttcttcgatcagacccactttataatccgtaagatctctggagtccaccatgccttctccctgcatcttatcggctgcatgaaggctttttccgccaggtgccgcgcaaagatcaatgacataatctcccggtttcggatctgctgcttccgttaccagcatcgaactgacatcctgcaccacgaaccttcccatcacaaaagatttaagtccttcgaggtggctgtaatccgacagatagtacgcatacggaagatacggcgcccgcttaaccgtcgctccctgtctctccagactgttgatcgtcagctccggatctacccggtgcagctggcagcggatcgtcagcggatgatccgtcaggaaatccttcagcataccttccgtcgtctctgttccataagccttcacccagcgttctaccagccactgcggtacggaatagtacaccgacagatattctgcagggctggtctttgcatccggatatgtgatttcttctttttttcttgccacattacgcatcacgccgttgacaaagcctttcagactgtaaaatccttttttctgtgccagttttaccgcttcgttgcaggctgccgagtccggcacgctgtccataaataacagctgatagacaccgcttcgaagaatgttgcggatcaccggtttcatcttatttacctttacgctggaaaactgattcaggatatagtcgatccgaagcatatattccagtgttccctccacaagacggttgataaatgcccgatcctgtttcggaagatactgtactttattcagggcattgcggatcgccagatggctgtattctttttcctgtgtaatctccaataatatctccagggcgattccccggagttctgttccatttgccacgtttttctcctccggctgtttcatacactaacacggaagcacggttcccgcttccacggtatagcctcgtaaaaatgcctgcgcatccatccgtttctttccttctaactgcaaggtgtcaatcttcaggattccctccccggtctggatccgaaatcccttggcatctgcctgcagtacggttcccggtgcttttttctcaccgttttcttcttccaccgaagcttcccatattttcaacgtttttccgttcagatgggaaaatgcactcggccacggattcagtccgcggatcaggcgttccagttcctctgctgattttgtccagtccatctcacccattttcttgctgatcatggcggcatacggagtggtgctctcctccggctgtttttcaaagacggcactgccatcctccaacttcggaagtgtctccaccaaaagttttgcccccgcctcgctcagacggtcaaacaggctgccacccgtttctttctcatccagtgtcacaattactttattgatcatatctccggtatccagtccttcgtccatccgcatgatcgtcacaccggactccttatccccgttgatcactgcccactggatcggggctgcaccgcggtatgccggaagcagggatgcgtgtacattgatgcatccatattttggcatttccaggatctctttcggaatgatctgtccgaacgccacgactacgatcacttccggctccagatctcttaccacctggataaatttcggatctcttacctttttcggctggtaaaccggaagtcccagttccattgccacttccttgaccggtgtgggctgcaggttctttcctctgcccttcggcttgtccggctgactgatcacgccgacaatctcatgacctgccttcgccagctcttttaatgttcccacggaaaaatccggggttcccataaatactactctcatttattcgtcatcctcttcttcgtaattcacatcgtgcagttcgccttccacgtgttccacatacaggataccgtccagatgttcacactcatggcagatcgcacgcgccagaagtccctctccggtcagcgtaaacggttccatgttgatatcctgcgcctctaccgttaccacgttcggtcttgtcacgataccggattttccgggtacggaaaggcatccttcttctccggtctgttcaccggaagtctctttaatcaccggattgatcagcacatacggaccgttttcatctccgacatcgatcacaacgattcgttttaacatgcccacctgcggtgctgccagtcctacaccgtacgcatcgtacatggtttccagcatatcttccaccagttcccgaagcttcggtgtcatctcttccaccggtctgcacactttgttcaggatccggtctcccatagttctaatttttctgattgccattcttttttgtcctcctgtcagtggttaaaatccagctggatccagatctcccgaaaaccgctgtttacttctatatattgttccagtctgccctttgcacgcaacagcagctggtggtcttcctgttttacataaataactttccgatacatatcggcgatcttcgatacggtttcatccgcaggtccgatgatctgcagctgtccgtggctatccacccggttcaggaattttctgatatactgcattcctgtctccagaagttcttcatttccgcagcttccgtgaattgccagcaagtttgatgccggagggtatccgagaagctttcgatagccgatttcttcttcgtaaaatgcccggtaatcctgatgcatcgccgcctgaatactgtaatgttccggctggtacgtctgaatgatcgcctctcccggtttttcccctctcccggctcttcccgccgcctgtgtcaacagctggaacgtccgctcacttgcccggtaatcgctgatattcaaagaaagatccgcagccagcacgccgaccagcgtcactttcggaaagtcatgtcccttgacgatcatctgtgtgccgatcaggatatccgcctcctgatttgcaaatgcagccagaatgttggtatgtccttctttttttctggtcgtgtccagatccatccgcagaacacgcgcctgagaaaatcgtttttttacaatttcctcaatctgctgcgttcccgcgcgaaatcctccaatatacggagatccgcacaccgggcactgctgcggctgtctcgtctcatatccgcagtaatggcacaccagttttccgttccggtgctgtgacagggaaacatcacagtgcgggcatttcatcaccgtcccgcaggaacggcaggagaaaaatcccgcatagccgcggcggtttaaaaacagcatgatctgttctttcttttttaaccggtcttcaatcttctcctgtaagattccgcttaagatcgaccggtttccctgttttaattcttcccgcagatccacggaataaacttccggcatctgcctgttttcataccggttgttcagttcaaacagccggtacgttccgttctgcgcctgatagtaggcatccaccgacggcgttgcgctccccagcacgaccggacagtgttccagattgcctctctcgatcgccgtctctctggcatgatagcagggaaccgtctcactctgatacgaggtttcgtgttcttcatcgatcacgatcagaccgagattcggaaacggggtaaacagtgcggaccgcggaccgatcatcacctgcaattccccttttttcgcccgctcaaactgatcggaacgctccccgggggaaagtctggagtgtaagaccgagattccggctccaaaccggcggtagaaccgctgcaccgtctgatacgtcagtgcaatctccgggatcagcaggatcacctgttttccctgtcggatcacttcctccatcagttccatatacacctgagtctttccgcttccggtcaccccgtggatcagtaccggacgaagatcctgttctctccagcccttcaggataccgtctgccacttctctctgcggcggtgacagcggctgttttgtctgttcctgttctgtgttctgcaccggattgcgatacacttccttggtctggatacaaaccgtgccggcactctccatcgtcttgatcacactggcagtcagatgcagtttatccagtgccaggctataggaaatcgtattgttttcaagcagtgcttccagaagacgctgtcttgccacataatgttttctgcggcatagttccaactgctcgttcgcttcgtcctttgtgagcagtaactggatccagcgctcttctttctgtttcatcttctgcttgaccggaagtacggtttttaatgcctggatcatcgtggcaccgtactgttcccggatccaggcggcaagcgcgatcaggcgggattcgatggaattgcttcccgtctccacctcccggatctctttcatgcggctgacatcaaaagacggctgatccgtcacccggatcacataccctttgatcgtcctgcctccgtttccaaacggaacctgcacctgcatccccggctgtaattttccttctagatgttccggaaccagatactgaaaggaccgatccagtttttcactggtaatatctacaataatatccacatatgtctttgtcatgcttttttctttgcatcttcttccaggatctcacggatcagcacacgttcatccatcggatatttttttcctttgatttcctgatagtcttcgtggccttttcccgcaagtacaatgatgtctcccggctgtccgtgatggatcgcataggcgatggcttccttccgatcaatgatctccacgtattttccatcggttttgctgataccggtcttgatatcgtcgatgattgcctgtggttcttcatttctcgggttatccgatgtaatgatcgtcagatccgccagtctaccggacacctctcccatctcaaatcgacggtcacgggaacggttaccgccgcagccgaacaggcataccaagcggttcggtttatattcccgcaacgtagtaaggagggattccaaactcatcgcattgtgcgcgtaatcgatcatcagggtgaaatcgtcggatactttttccatctcgattcttccctttacttttgcatatttcagtgccttgcagatgttttcttcggatacgttaaaatgtctgcagattgcaatggcggtcagggaattgtaaatactgaattttcctggcagatcgatctctaccgggaaattaagaagtccctgcagctcataggaaatacccagtacgcctttcttggtcagcagtttcggattgacagcgcgaaggtcggcctccggtgaaaatccgtacgtctccagactgcaggtatgtccgtcaatgatcttttcataatgttcgtcatctctgttgacaataccgatccggcactggcgaagcagcatctttttacaggacaggtagtgttcaaagctggtatgttcgttcggtccgatatgatccggttcgatattggtaaagataccgatatcaaaggtaaatcctgcggttcgatgaagcatcagtccctgggaggatacttccatcactgcacagtcacaaccttcatcgagcatctgacgcaggtatttctgtaccagaagggattccggtgtggtatttgccgacgggatcacagtatctccgatgatcgtctcgatggttccgatcagaccgactttgtaaccggcattttccagaatagattttaccatgtaagtcgtcgttgtttttcctttggttccggtgattccgatcacacgaagtttatctcccggataatcataatacgccgctgccgcaagcgccatcgcataccggctgtccttcacctggatcaccgtcacatcctccggcacatccaccggttcttccacgataatcgctttcgttccctgtccggctacactttttgcaaatgtatgaccatccacaacggcaccacggatacagataaaaagagaaccttcctttgcttttctggaatccgcaacaacttcctcaatctcctgatcaagggtgccctgcagacatgtatattccaaacgttctaaaatctttggtaatttcatcaactgtcaacctcctttggattgtgggcgggtcaattgcccatagatatttataggatagcatatttcacgcaaaaaaagaagagggaggagggattttacggggaaataggtttaagacggacgccggagaaggggacgggcgggagcggggagggaggggcaacgcgtgggcaggggaactttgagctagccgctaactccggctattattcacgagggtcagctgaccctcgcgaaagcctacgtaagcgtcggatctcaaagcttcccctaaccgcccacaaagtgcgttcgccccttccctccccgctcccgcccgtccccttctccggctgatattggctaaaactggtgatgaatttccccggaaaatccctggggaggaaagatggatcgctggttttacgttttcgtagtagtttttcttcgatatatgtgatactttaaatatattttcataatatgttttctgtacggaagttttgctccttattactgtttttcgattttttctttcgtaaatctctatcgtattttctcacctagatacactatttactcattttcattcatccccaatctttttcatcatttagtactcaccagtacacagccagcatggcttgggagcctgggtgcgggaacactttgtgggcggttagagcaagctttaagatccgacacttacggagactttcgcttgggtcagctgacccaagtgaatttagtcgtagttagtggctagcttaaagttgctctgcccacgttcccgcactcaggctcccaagccatgctggcgtccccccccttaaaaagcaaaaagaactaccgtcttcaaaacccttcattttgaaaacgatagctcttttctaaaaaagcacaatataatctcttaacagatcactgtacccgtccgtccaaggtacgcatccactgccttatcgattgaagtaatcacagccttctttccttcgccctgttccacgaactcgacagaagcctggatcttcggcagcatggtgttggcttcgaactgtccctcagccatatattctttcgcctgtgcaacagaaatctcgcccagttcttcctcatcctgcttgtggaaattcacagaaaccttctccacactggtcaggatcagcagttcatctgcatccagctgttctgccagacgaccgctggtataatctttctcaataaccgcacttgcacccttcagttccgtaccctgctccagaaccgggattccgccaccgccgcaggcgataacgatctgtccggcatcaagcagtgcacggatcgcatcgatctccacgatcttctgtggcttcggtgcagctacgattcggcggtaaccgtcaccgatcttggtaacgtaattacccttattttcttcctcttccgcttcctgctcattcagcacacgtccgatgactttaacaggttcagcaaaagcttcgtcatacgtgtctacggttacctgtgtcaggatcgtggataccggtttgtagatgccttctttcatcagttctgcacggatcgcattctgcaggtcgtatccgatataaccctggctcatggcagaacacacggacattggtgcgtatgtataatccggatgatactttccgaattcattcattgccatatggatcatacccacctggggtgcattactgtgagaaatcacgacctctgcgccctcttttaccagctgcgcaatgatttttgcagttctttttgtagcttctttctgctccggcaacgtattaccaagtgcccggtgtcccagagcaatgacaactttcttcttctccatgttacgccctcttactttctctcatacataatcgggtaaaaataccttttgcgaatttcacccgtcactgtcacggtatttaccgaattccatacagatatgggtttcggtttatgatctgccgataccggtttctgttacagatcaacacctctatcgttagtttattcctgttttctactttatgcaagcaggaaataagcaagtaccacaacaccaagagcgatccggtaccatccaaataccttgaaatcgtgtttcttgatataacccatcaggaacttgatcgctgcaatggaaacgccaaaagcgacaaccataccaagcagcagatacacaacctctgttccggtaaaatgcagaccaaattttatcagtttcagaaagcttgctccaaacataaccgggatggcaaggaaaaaggtatattccgctgccagttttctgctcatgccgaggagaatacctccgatgatggttgcaccggaacgggaagtacccggaatcagggcaagcagctggaagattccgataaacagtgcatctttgaaagaaatatcactgagctttgttctgctgggcttccggcttttattgtagttttcgataacaataaacagtacaccgtatacgatcagcatcacggaaacgacccagtaattcataaatgttttctcgatccagttgttaaacggaagtgccacgatgattgccggcacacaagataccagaatctttaaccacagcacgatcttattcatgttgatgtatttgtctgcaaatttctgtaatttcccgatacgctcattcgtactgatatagttccagttactctctctggacggatcatttttatgaaatggccataattttttaaaatccagtaccacaaccgccagtacggctcccagctggatgaccacaaggaacatctgccagaattcctcactgactttcagtttcataaactgatccaccaggatcatatggccggtactgcttacaggaagccattcggtgattccctccacaataccgagaaaaattactttcagtaattcgataatatccatattttcccctttatttagatctgtgcgatatcaatcagcgtaagcctgttcagatctgtattttccagactggttaccagtgctttggctgtgtccatagcagtcagaacgttaacacctgtctcgatagcatttcttcggatcaggaaaccgtcttttgcgtgttccacaccctgagaaggtgtatcgatgaccaaatcgatcttgtgacccaggatcagatccatcaggtttggtgacggctgttcgagcttattggtacggattgcttttacgccggcttcctgcagcgttttagctgtatttctggttgcatagatccggtaacccagtgcttcaaaccgttttccgatctcaactgcttcctctttatcctcatcacgaacggtcatgatcatatttttatgtttcggcagattgatacctgcgccaaggaatgctttgtacagtgcctcattaaagctttccgcaatacccagacactcaccggtggacttcatctccggtccaagactgatatccgcaccacggatcttctcgaaggagaataccggcatcttgatcgcaaaatattttgcttccggctgcagtcccggtgtataacccatatctttcagtttgtatcccatgatggcttttgctgccagaggaacgatcgggataccggttaccttgctgatgtacggaacggtacggctggaacgtggattaacctcgatgacatagacttcttcaccgcatacgataaactgaatattgatcataccgatgacatgcagtgcttttgccagacgtttggtgtattcttcgatggtagcttttgcagtcttgctgatggtctgtgccggatatacagagatactgtctccggaatggatacctgctctctcgatatgctccatgatacccgggatcacgatgtcttcgccgtcgcataccgcatcaacctcgatttctttacctaccagatatttgtcaaccaggatcggatgttcctgtgcgatccggttgatgatgccgatatactgttccacatcttcatcgttgatcgcgatctgcataccctgaccacccagaacgtaagaaggacgaaccagaaccggataacccagttcgttggcagctttcttagcctcttcagcggtaaatacggtctgtccctttggtctcgggatctggcactgttccaggatctcatcgaacagctcacggtcttcggctgcatctacattttctgcggatgttccgaggatcggcacacccatcttcatcagtgcctcagtcagtttgatagcggtctgtccaccgaactgcaccactgctccgtccggtttctcgatatttacgatgttttccacatcttccggtgtcagcggctcaaaatacagtttgtcagcgatatcaaagtctgtacttacggtttccgggttgttgttgatgatgatggtctcgtaaccttcttttgcaaaggcccaggtacagtgtacagaacagaagtcgaactcgataccctgtccgatacggatcgggccggaaccaagtaccagaacctttttcttgtccggtgtgcgttctgcttcattttctccgccatatacagagtaataatacggtgtggtggctgcaaactcagcggcacaggtatctaccattttgtaagctgcggtgataccgtatgttttacgcatttcttttaccgtttcttctgtctttccgttcagttttgcgatcacataatccgggaattccatgcgttttgcttctcttaacagatcctcgtccagttccctggtctttaacgcatattccatctcggtcaggatcgcgattttatcgataaaccacagatcgatcttggtgatctcatggatctcttcctgagaaataccgatgcggatcgcctgtgcgattctccagattctcatatcatctacaatatgaagttcctgcagcatctcttctctggacagatttgagaaatcgtaggacatcaggctgtctacgtgctgttccagggaacggatggctttcatcagtgcaccttcgaagttattgcagatactcataacctcaccggttgctttcatctgtgtggtcagggtacgttttgcactgataaatttatcaaatggcagacgcggaatcttgacaacacagtagtctaacatcggctcgaaacttgcataagtttttccggtaatggcattcgggatctcatccagagtgtaacccagagcgatctttgctgctacttttgcgatcgggtatccggttgccttacttgccagtgcggaagaacgggatacacgcgggtttacctcgatcacacagtattcaaagctgtccggattcagagcgtactgtacgttacatccaccggtgatgccaagctctgtgatgatgttcagtgcggaagttctcagcatctggtattctttatcacccagtgtctgagacggtgccacaacgatactgtcaccggtatgtacaccaaccggatccaggttttccatattacaaacggtgatgcagtttcctgcgccgtcacgcattacttcgtactcgatttctttccatccggcgatacatctctctaccagaacctcgcctacacgggaaagacgcagaccattttccaggatctcgatcagttccgcttcgttgtgagcgataccgccaccgcttccgcccagggtatatgccggacgaagaaccaccggataaccgatcgtgttggtaaatgcaataccgtcttctacggttgtaacaaccagggatgccgcaaccggctcaccgatcttttccatcgtatctttgaattcctgacggtcttctgcttttttgatggtctgggaagtcgtaccgatcagtcttacattatgttcttttaagaatcctctctcttccagttccatcgccaggttcagtcctgcctgaccacccagggtaggaagcacgctgtccggtttttctttcaggatcagctgttccacaacctctacggtcagcggctcaatgtaaactttgtctgcgatatctttatcggtcatgatggttgccgggttggagttcaacaggacaacttccacgccctcttctttcagagaacggcaggcctgtgttcctgcatagtcaaattctgctgcctgaccgataacaatcggaccggaaccaatcatcagtactttcttaatctctggattctttggcattactcttctcctcccatcattttgataaaccggtcaaacagataaccggaatcctgtggtcccgggcatgcttccggatggaactgtacggtgaaaatatttttccctgtatatttcagtccttcattggttccgtcgtttacattgataaacgccggtacggcaactttcggatccagattgtcggtgtctaccacatatccgtggttctgagaagaaatatacactcttccggtttccagatctttgaccggatgattgcctcctctgtgaccgtatttcatcttatgggtatccgcaccggttgccagtgccatcagctgatgtccaagacagattgcgaagatcggtgtgtcggactcgtataatttacggatctctttgattacttccgtacactccttcggatctccagggccgtttgacagcatgataccgtccggattggatgccaggatctcctctgctgtggtagatgcaggataaatcgttacctcgcatcctcttttattgagagatttcgcgatgttgttctttgcgccaagatccagaagggctactttctttccgctgcctttcagtacctttttctcagaacaggttactttctccactacttttcctgtagtatatgctttcagtctcggaatgatggtatccaaatcataattttcatccgttgtgatcataccattcatggttcctttttctctcaggattctggtcagcgcgcgggtatcgatccctgcgattcccggaatgtcaaatcgtttcagaaaattctgaatcgtatcttcgcaccggaagttgcttggtgttctggaaagttctcttacaatatatccatccggccatggtctcaaagactccgtatcctcatagcaaataccgtaattgccgatcagcggataagtcatacatacagcctggcctgcgtaagacgggtctgtcagcacttccagatatccagtcatggaagtattgaatacgatctcgctgatgacttcttttttggctccaatgctggttccggtaaatacatgtccatcttcaagtattaaaaaagctttcatcattccgtttcctttctcttttcttatgtaggctttttgcagcccgtttgtgtctttttccgcataaaaggggagaaattccccttgaaatcactcccccttgcgtaatcttagagattttaccacaaagtctttttcatttcaatactttatttgagaaaagtgtcgctttctgcgggagaaatatttttttatctttttttcaaaaaaagtgttgacactttgcgttttatgctgtatagtatcacttgtcgttgacggagcggcaaacaaatttcatacttaacagatgtgcaggaatggcggaattggcagacgcgcaggcttcaggtgcctgtggtagcaatatcgtgcgggttcaagtcccgcttcctgcactatttttttgtctttgtacaggctggcttctgttctatatttattttctgcaatcgtaaaaagatcgctgcattcacatttttctgtaaacacagcgaccttttctttcatctcttattataactgttcaatgccctcacagtttccttttatttttcaagcacaaatgcttcatacgggcgaatcgtcatctgttctttgatttctccttccggataatttgcgatcagatagcttcccttgcggaattcctccggaatctctactgctacttctttttcactgaagttacataccaccaacagtttttcttctcccagtgttcttgtatacatatagatttcttcggactccggcagtaacagatcataagttccgtatacgatgatctctttttcttttcgcagtgcgatcagctttctgtaataattaaatacagattccggatcgtcgacctgtttcttcgcattgatctctttatagttcggattgaccatgatccatggttctacagtggaaaatcctgcataagcactgtcatcccactggaacggtgttctcgcattgtcacggctcttacggcacagataacgcatcatttcttccgtggtaaatacatgctgttcttctaccagttctctgtaagcattgatgctgtccagatcacggaactgatcgatcgatgtgaacggaacgttcgtcatgccaagttcttctccctgatatacataaggagttccctgcatcatgtgaatacaggttgccagcatctttgcagatacatcatgatattttgcggaatcatcggcatatctggataccgaacgtggctgatcgtgattctcccagaacagactgttccaggcaatatcctccagacctttctgccatttggtcagaacagctttcatctcgcgcagatccatctttttatcggtccatttgttatccgcatcagcatccacatccatatgttcaaactggaataccatattcagctctttttcatcgcttcttgcgtattttttagcttcttccagagtcacaccggaacactcgcctacggtaatggtatccgcattgtttaatactttttcacgcatctcctgcagatattcatggacatgaggaccgtttgccggctcattaaagcttgcgtatccattgattcccggctttccatccggcagatccggctttttggagatcaggctgatcacatccatacggaatccgtccacgcctttcttcagccaccagttcatcatgtcaaatacttcttcccggacttttggattatcccagttcagatccggctgtttttttgaaaacagatgcagataatacatatccgtttcttcatcatactcccatgccggcccggagaaacaggagccccagttattcggttcctttccatcttttccatctctccagatataatagtcgcgatatggattgtctttagactttctgctctctataaaccatggatgttcatcggaggtatggttgactaccagatccataacgattttgattccatgctcatgtgctgct

SEQ ID NO: 2462 - DNA, 3289 bp, Unknown
  gut microbiota DNA sequence
aactacatcgcctccaaattaagcgagacggcgctcggtaagatcaaaaccagcatccgcgaggaagtaaccaagacatatgcggaagcaatttttgatcagatcggaaccgccggagacggtatgcaggaagcagccgacggcgcacagcagatcaaggatggtatggatgatgcctccgatggaaataagaaaatcacggataacctgaaagttctggcagacagtacgctgacttttaaagagggatccgaggaactgaccgaaggtctgaaatcttacaccgacggtgtcgctcaggtcaatgacggagcgaaacagctggatgacggtgtcagcacactgaccgcaagtcttccgacactgactaacggtgtggatcggctgaactccggtgtgaaagaatacaccgatggcgtagcaaccctgaacagcaactccgaggcactgaattccggaagtaaacagctggcagagggaagtgagcagctgaaagaaggagccgcaaccctgaacagtggaacacagacctatgtagccggtgtgaatcagttgtccggcggtctgcttggtgtcaatggcgccaacggatatattaccggtgtgaattctctgaccacaggacttctgggaagtgaccagagtgcaggttatatcgacggtgtggaacagctggcgacaggagcaaaacaactgtccggtctgaccggtatcggtcaggtatatgccggaatcgtgaacctgaacaccgcaatatccggagctactacagaaggaacactgcagaatggaaccgccgctttgaaagcaggtatcaaacagattcaggatcaggtatctaccttacagaataccaccagtgcagaaggcttaaagaagctgagcacaggactttccagtgcaaaaacaggtatggaaaatgcaagtgcagcatccacaaaagcggctgagatttccggtcaggtggaaagtagcatcgaagcattgcctggacagttatctactgcattgggaagttacatggatgtggtaaatgcagctgttgcagatggaaacagtaaaatcgcaaaagcgaacgaacagattacagctgcaaatgataaactgaaaaatgtacagtctgtagcggatcagctgacagcactcagtgcaaaagcagcagaagacggaaccgtacaggtatccgcagagatattaaagagtctggcaaatacattaagcagtgtacagggcggtgcaagtacagtggattctgtaagcgcagatacctacactgcaaaagcagcagcagtcacaaaaggaattaacgatcagctgagtgcaagccagacatcactgaacactgcaaaagccggactggaaaaaattgcttccggactgaatgacggagcaaaacagcttgcagacggagcttctgcaatcccatctgatatcccgtcggagccggtgcaggcactttccgacggactggctcaggtatatgcaggagccacaaaggtagataccggtgtcggtcaggtggcagcaggtctgacacagctgcaaacttctacagcatctttcccggcagcagccaagggtgttgaggcactgaatgcaggatttgaaacactgacagcaaacgatgcgacactgaaagccggagcaacacagctgcagcaggcaggaactaccgtagcagccggagcaacacagcttcttgcaaatggttcagccctgacagccggaactgcacaggcagcagccggaacagaaactctggcagccggtgcacagacattaactgccggtcttgcaacgtataccgctggtgtatctactctgaacagtaacagcgcagccctgacaggcggaacacagcagcttgccgatggtgcaaagacgctgggaagcggagcaaccacactggcaaatggtacttctaccttatataatggaacaaaaactttagtagcaaataataacaccttaaacagcggtgctgcacagcttaccgatggcgccggtcagatccgggatggatccagtcagttatatgacggttccaaagagctgggtgatggattaaagaaactggacgatggttccgataccctccagagcagtctggcagacggagccgaaaccgtaaaagaaaataaagcagaagatgtgaactatgagatgatcgcagctcctgtagatgatgatgaagcaaaaatgacagaagtaccgaacaacggtcatgcgatggcaccgtatatgatgtccgtaggtctgtgggttggagcacttgccttctgtctgatgtatccgctgacaaaatacaacggaaaattaaaatccggattcgcatggtggggaagcaaagcttctgtattatatccactggcaatcctgcagggtatcctggtgatcttcctgcttcatgtatttgacggatttaccccggcccagatgggtaaagcagtggcatttgcctgcctgacttccgtggcatttacctcgatcatgtacttcttcaatatcagccttggtaaagtaggaagcttcctgatgctggtattcatggttatccagctggcaggttctgccggaacctatccggtacagctttcaccggaattcgtagcgaagatccatgcatgggtaccgttcacttattccgtagatgctttccgaagtgtcatctgcgcaggagaaagcatccagacaccagtcatcgttatgtgtgtgatcacaatcgtatttacgatcctgaccatcatcgaattccagttccgtaccagacgcatcaaagcaggaaaaccaattttccatgatttcctggaagcaaaaggactggcataagagaacagttacataaagacaaataaaaaacagttgttaccgaaatctttctatgagattcggcagcaactgttttttggttgagtaaaacttacggaatattaagtgtcattatttcttgtgtgtacattttggaaaggtataataaccggctttgactctgtccttgaccaatccacacttgctacaacgtttcagggtatacatggtaattgtacatccatcgctggaattgcccacatgcagttggtgttgtccgtttacaaaagtatgctgacaggtctgacgctgcggggatcgtgtggtatcggattcatcatagtcgacctgggtgccgtcttcaaggacaatgacagaggaagaggaagaaaaatcagcaaaaccataaggaaagatttcggaaaaaattgcctccggatcatctgtcaggcggacataagtaacattttcatcttctgga

SEQ ID NO: 2463 - DNA, 66297 bp, Unknown
  gut microbiota DNA sequence
tggcagaccgtctggaaatctgcggaaaacattcaccggcttacgataccttatttgctttctaccgcagcctcgccagcactctcgccggaaaagctgaccttggtgtccgcctgaaaaaagcatacgatacccatgacttatccacactggagattatctgcgaagaagttatccccggaatcatcaacgatctgtccacaaccagacttctgcgcgaacacctctggatgcaggacgcaaaacctttcggctatgaactcgtagacatcaaactctccggcgtcattgcccgcctcaccagcacccgctaccgtctccgttactatatcgacggcagagtaaagcgcctggaagaactggaagccgaccgcctcccctacttcctcccgggaacccccaaacgcgaaaacctctggcaccgcatcatcagcggcgcagaccttatggatacaatctaacaatctactcttcaaaaccccctcggagcacatctcccgagggggttttattatatgtcagcaaaatacattatcatttttaagctatattcattcatatacaactttcagctacccttcccacctaccaggggttgccactagtgaactccatacccaacttaagtttcaaccagtacccagcccggagtgagaacaacaaggggtggaggcattttgcgtgccgcttagagtgagctttaagatcctctgcctacgtagacttttgcgagggtcagctgaccctcgcaaatatagtcgtagttggcagatagcttaaagtcgctctgcacgctgcctccaccccttgttgttctcactccgggcgtcccattagccaaaaacttaatttaatccagcaacccctgataaacctcccgtttcgagatcccccggtccttcgccaccatcttcatagcgtccttccgtccaatcccctggtcctcatagatcttcatgtgttcctccagcgacatctcttcccatgcccgctgcttctcctcaatcatctctttccggcttctgccttccatcacgatcacacactccccacgtggatcctcctgccggtaatactccagcgcatcctgaagcgtcgtaaggaacgccgtctcatgcttcttcgtaagctccctgcagatcgtcactctccggttcccaagagcatccaccagttcttccagcgtccgtaccagtctgtgcggtgcctcatagaggatcgtcgttctcgtctcctctttcagttcctccagaatcgcctgcttctccttcttatccgtcggcaaaaacgcctcaaatgcaaaccgtctcgtcgacaaccccgagatcgtcagcgctgtgatacaagccgccggacccggaagcgaggtgaccgggatcccagcctcatggcacatcgccaccagttcctctcccggatccgaaatacccggtgttcctgcatccgtgatcagggcgatctgctgtccctgctgcatcagaccgatcagataatgccctttatcaatcttgttatattcatgataactggtcatcggcgttgaaatctcaaaatgattcagcagcttgatactgtttctcgtatcctccgccgcgatcagatccacctcttttaatgtccggatcacacgaaaggtaatatcttccagatttccgatcggtgtcgcgcacaaatacaattttccttccatagtatcggtatcctcctatcttccatccccgtagatttcccggatctcctgtgtatacacgcccggcttttcatatacgatcagcggtttttccactgtaattcttgaatttcctcccagaagcccttcgatcagaaccatgttcggctcccggtccacatacggatataccagacgcatccgcttcggctccagtttgtatttcatcatcagtcccatgatctccgccagccgaaacgggcggtgtaccatatagaaccgtccccgtggctttaacacctgggcggtctgagagatcacatcttccagggtacacagtacctcatgccgcgcgatcgccttcggcagatgtggattcgtcaggccgtgattgccatgcatatacggaggattgcaggtgactaccgaaaaagaagccctgccaaagatggcagcggcttccttgatatctcccgttctgatggtaatcgcatcctccagatgattatacgccacactgcgtcctgccatctcggcactctgttcctgaatctccagcccggtaaaatgctctccctgcgtctttgcctttaacagaatggggatgatccccgttccggttcccaggtctaacgcctgttcccctttcttcaccctggcaaaatcagacagcagcaccgcatcaataccataacagaaatccctggtattctggataatatggtagccgttttgcagatcatccaaacgctcattttccttcaatgggatattcatatttttctcctgttgttattccagttccttcatcatcttctgctcttctttggaaagctttatcttctctttccggcagcatcctctggaacggaattttaactcttctactttatactcacggatctctttctcatcgttgacatccatgatcacttttaccagctgacgaagtacattgacactctgtacctcacccttgataccttccggtgtcattacctgatctccaacattcggcagctgtttgttcagatactcataagtctcctgctcattttttagacagcacatcagacgaccgcacacacctgagatctttgtcggattcagtgacaggttctgctctttcgccatcttgatcgataccggagcaaattctgacagataggtatgacagcacagcgggcggccgcagataccgataccaccgagaatcttcgtctcatctctcacaccgatctgacgcagttcaatacgtgtcttgaagatcgctgccagatcttttaccagttcccggaaatcgattcttccgtctgcggtaaaataaaacaggatcttgttattgtcaaacgtatactccacatcgatcagcttcatttccaactgatgcgcacggatctttttcacacagatctgatacgcttctttttctttcttgcggttactctcctctttcgcgtcatccttctgtgtagccatacggatcacgtctttcaaaggctgtaccacctgcttgtcttctacttctttcggacccagtaccaccgttccgtattccacaccgcgagctgtctccacaattacatgatctcccggtttcatctgaaaactcttcggattaaaataataaatctttcctacatttcgaaaccggacaccgataatttttaccattctagttctccctgattgtcatgaagagcagttccatcaccaggtcaaagtttacattggaatgtagacgctctctggccttaccaatggcatcaatgatattttcaatgccctcataggaacttttctttgctctttctttaatataattatactggtctttaaatatcagaccatccacttcttttgtcgccttaaacaacagtacatcccggaaccacatggtaaacagatccagataatcgtaaatattctgtttctctgctgtcagctctttgatcatctccaccagttcatacagctccagctcattgctctttctcaggatccggaaagcccgctctgccatctccgcaaattccgtggactctgcgatttgtttcgcctttccgatatttccctgcgcaaatgccgcgtcgatctgtgcctgataatccggcagatgcatatgctccatcagatattctttcacttcgttctctttcaccggacgcaggttcaaagtcacgcaccgggaagaaatcgtaggaagcagggcatccgcattgctggtcaaaagcaggatcaccgcataagccggcggctcctcgatcgtctttaacagcgcattctgcgcctgcagcgtcagtttttccgcttcgttcagaatataaattttataaggacctgtataaggtttgatggatacatcatcgatcagctggatacgaatatcctcgataccgatagagttcggtttctcatgtgtgatcgtaataatatccgggtgatttttgcttaatgctctcttacaggagtcacattccatacatggatccgttccatgcttttcacactgcagtgccatggcaaatgcagaagccagcatcttctttcctgctcctacctcaccgttaaaaatatacgcatgtgaaactttccccatctgaatggcattctgtaaatgatttacaacatcatcatgtccgataatctcatgaaatcctgccatacaatcacctcctgtgttcttttgttttcccactccggtctttctcaacatttatatgtatcaaagatactatattaatattgcagactttctgcggaatataattattatagcacactccttaaatacttttcaatctcagagtatcctcccgccccgtccatattagaaaaacgacagtcaattcctgcctgccggatcttttcctcgctgaaatcctgcgcatccgccaggaatctccgacacatttcttcgtatttcggcacttcctgcgtctcttccctggcgattgctctcttcagccgttcgccgtcttccacttctatataaataggacggatcttttcctctccataatatgcctttaatttttcataagactccagcgtgccgattcccagatagtttttctcttccagatccatattatccgccgtaaaatacctccacagcccgtaaaccgtctcatatccccggtcctcgataatcttccctgctgctttcagcttctgaaaatcctcttccgtcacaaaatggtactctctgccatccagttccccgtcccggatcggacgcgtggtgtagatcaccagacgttccagagaaaactccgaatttcttaaaaggcgctgataaatcgtatcttttcccgatgcgctctttcccataatataaaataatctgcccatagcttctcttctctctttccattcactctcatctatcttaccagaccaccgaaaactcttccagatattttaaacatttcttaaaagagtttagaaatcctttatctcatttccataaaatggacacaaactcacggtatacttacagtatcaaaacaaagaggacggcggatgcagatgatgacagccagagccggtaacaaagactgaaactcattgccggaacatttttacaagccctgtgactgtcggacctcgacaaaaaacaattaccatttatatagattcgtgcagctgtttgcaccagctgccaaaacactttttcatactgccggggcacaagagccccggccctcccttttctaattatatataagtaaaacgaaactgccgcaggatgttaaaattcctgcggcagtttcgtttctcaatctttctatttactctgcgtacgaatatcttacagatattttttcagaacgtctactttatccagtttttcccatggcagatccagatcgtttcttccgaaatgtccgtaagctgctgtctgtttgtagatcggtcttctcagatccagcatcttgatgattccggccggtctcagatcgaagttctcacggatgatctctaccagtttttcatcgctcactttaccggttcctgcggtatctacgttgatggaagtcggatgtgcaacaccgatcgcgtaggacagctggatctcgcactgatcagccagacctgctgctacgatgttctttgcaacgtaacgtgctgcgtaagctgcggaacggtcaacctttgtgcagtcttttccggagaaagctccgccgccgtgacggccatatccaccgtaagtatctacgatgatctttcttcctgtcagaccactgtcaccgtttggtccgccgattacgaatcttcctgtcggatttacaaagaatttggtgtctgcatctaccatctctgccgggagaacctcatcgaagacatattttttgatatcttcgtggatctgttcctgtgttacatccggatcgtgctgtgtggacagtacgactgcatccaggcggtatgcttttccgttatcatcgtattctacagttacctgggattttccgtccggtctcagataacccagtgtgccgtcttttcttacctttgtcagctgtctggtcagtttgtgtgccagagagatggccagcggcatatattcttctgtctcgttggttgcgaaaccgaacatcataccctgatctcctgctccgatggcatcgatctcttcgtcagacattttatgttcttttgcttccagcgctttgtcgacacccatagcgatatcggtggactgctcgtcgatggctgtgatcacaccacagttctctgaatcaaaaccgtattttcctctgtcatatccgatctcacgaacggtatctcttacgattttctggatatctacatatccttttgttgtgatctcacccataaccagtaccagaccggtagtgatagctgtctcgcaggctacacggctcatcggatcctgttccatcagtgcgtccaggactgcatcggaaatctggtcacagattttgtccggatggccttcggttacagattcggaagtaaataaacgtttttccattctcattctcctttttcttttggggtttacccctgggtgcttttctcccgggtttatcgtttaagataatgtcatatcgcattttctttccaacgtataatctaaaaatgagcccgccaaaagcggactcaatacttcgatatatcaaatccccttattgttcgattactcgctcaggtaggcaccttccgtatccggggttgccgtgacttcacagatcctatgtatctccatcactctgaataagagaaaagctttctatacaatttacgtctaataacataacgcagttttgcctgttcgtcaagagggaaacggtgtcaggcaccataaaatttttataaataggtcaaatcttgattttcatccattttccgctccggaaccgtatgccgcttagcatcagacggcagaactgatccgctacgatacccatccagattccgtagattccccagccaacaatatagcaacatatatacgaaacagccgttctcacaaaggtaacgctgatggtagaactgatcattgtgtacaccacatcgcccgcgccgcgcagtgctccggtgaataccacctgacagatctggaacagcacgatcactatcagaatccggctgatcctcacaccgatctccacgatatgtgcttctgcaaagaacagtccgaacagccactttccgcagaacagatagaacatggacataaaaacagccatcacaagtgccactttttcacaggtcatcccgtgtcgctttgcctcctgcggttctttgcttccgagactctgcccgatcagtgccacggctgccgcctgcataccatcaccgaaagagaacgaaagactcagcgcattcattcccacctgatgtgccgccatcgccgccgttcccatgtcagctgccatcacagcggttgacataaaaccgatacgcatcagaatctgctccacgaatgtactgcttgaaagttttaagattatttttaccgattcgaaccgtttccacagcccttcttttataatatacggaatactgaggaaggaatccttccgaaacagtgacattacactgatcgtacaccccacaaccgttccaagcaccgtcgccagtgctgctccgcggatccccagtttagggaatccaagatgaccaccgatcaaaagataatttccaataatattgacgatgctggatatggtgttggtatacatcgcgattttggtgtttcctgcccctctctgtgcagcattgatcaccatggatataatattaaagagcatcccacccataataatctgaaaataaatcaccgctccgtcatgggtatccggtgcggatccacacttttccatcagccatcctgccagacccacgcaggcagccgtgatgaccgtgccgaagagaatcgtaagaaggattgcctctgccagcgtttcatttgctctccttttgtctttttctcctgttcgtctggcaacgatcgcggcaatcgccacgttcatcgcaaaaaataaagacagtccgaggaattttggctgtgtcgtcagtcccaccgaagccactgcttccgaaccgagtccactgaccatatagacatcgatcatgcccgccagcgagataaaaaaagactcaaagactgccggccatgcgattttcaataccttcgtcaattcctttttctgttccacccatccgtttttccggctttcgccggataccgagtgtccttccatctgctcactccttttctttctcatgtactctagagcgtgtctgaaaaatcatttccgcaataactgtatcattcacttgtctacgaatccgattgcacagttcaaaattcgaacacttccggaaaaataatcagaataaaataagtaacagaagctctttttctaccgatcgttcagtagcaaaagagcttccgcttttcgcatgcatcttcgtcactttcccacagagatacgattatttacgtgatcaataaaccatgggattttttgatccgtgatcctgccacacaatctgcattataagatcctgcctgttcttacagcttgtctcccctgcggatataacccggtttttccggctctgcaataatctgattgctgtggatcagtttcgcatgtttgtcaatgaccatattttccacatgcacatctttgccgatcactacgtctgcatttaccacacagttgcggacaaccgcacccttcctgatctcacatccacgtccgatgactgaactttctaccgttccttcaatcagacatccattggaaattacggatgattttacattgctgccttcaaaatactgggtcgggcaggaatcgttggtacgggtgtaaaccgtccattcttcatgaaacagttctcttgctttcctgcggtcaatcagttcttcgttggcatcaaaataactcttgagatcggtcattgctgcaaaataacctctgtgagatattccacggatatccatctctttacaggattcgttgagtgcatctgccagtgtatatacggaagacagcttgcgtcctttatcgatcagatccaggaagatctcttttttcattacataggtgtccatgaaaatatttctgttttttacatttccatggtttggttccagagacagcacacctttttgtttgttcagattcagcacctggcagttcaggaaatgatcttttgcattgtccacattctgatacatcagtgtgatatccgcaccggattcgatatggttctgcaaaaattcttcgtaatccgcagtataaaccatatagcttggtacgataaccacgtattcttcactcatctcctcaatggcatccagattttccacataagctgccagatccgtactgtaaatactattttcgtctccgttttcacagaacagaagatttaaattaccacgtttggaattgatattgtaatgccgtccggttcccagatgttctaccagagaacgtggctttctgcggatgtacacctgaatagaatcaattccactgttactcatattagagatcgggaagtcgatcacacgatatcttccaagaaaagagatcgctccggtcggacgataagcctgcatcggattcccctgtatgttattgcctgcgaaatttacgattccaaatgctctactcatcttattcttccccctttacacgttttgcaaccagttcgatattttcactgtctgcactgccgacaaccgcattctttccgatctttacgttgttcgcgacaagggcgcgtgttacgactgcaccttcttctacttccacacccggcatcagtacactatcaataatctttgctcccggtgctacttttgctcctgtaaacaggacagagttcttaaccagaccatccacgatacatccctgtgtgataaatgctctctctatacttgcctgtgcaccgatatactgtggcagcgcatcggtatcctgggtatagatcttccaggaactgtcggcaagatccagtgcattgttcttatccagcagatccatattggcttcccataaggaatcgatggttcccacatctttccagtatcctttgaacttatatgcatacagtgttttctgatcttgcagcattcttgggatgatgtcttttccgaaatcatggttggaatccggatctttcatatcagcaagaagcatcttccgaagcagtttccagttaaagatatagattcccatggatgccagattgctcttaggctccgcaggtttctcctcgaattctacgatttttccgccttcttcggtattcatgataccaaaacggcttgcttctttcatcggaacctcaataacggcgatggttgcatctgcatgatgttctttgtggtaagcaagcatctcatcatagtccatcttgtaaatatggtcaccggaaagaaccagcagatattccggtgcataagtatcaataaagtcaatgttctgagaaatagcatccgcagttcctctgtatacgtccaggtttgcatctgctttctcccgtggtggcagaatatatacgccgctgtctttggtatccagaccccatcttcttcctgcggctgcataactgttcagcaggacggattcgtactgagtcagtacgccgactacatcgattccactgtttgcacagttactcagtggaaaatcgatgatccggtattttccgccgtatgatactgcaggtttggcaactttttttgtcaggtcatgaagtctgcttcctcttcctccagccaggatcatagccaacatgttattttgtttcatatgtaagccctctctttcatatttctgtgtccattatactattttttatgctattatgctacatatttccataggaaaacttaattcattgaagaatttaactaaattcttacaatactatgtctgttttttgggacattcatccttttctttcgcttcctgttgctttttctttgcaaatccagatgttgccggtttctttttttctgtctgaatccctgcggtaaatcggaaaaattccgacaactttacagaatctttagaaatatcccactttgtttagatgaaaaaacacaggtcgtatgctatactgaagatatcattatggacaattttgtccatctataaaagcagaaaacaggtgaaactaagactatgaaactgaaaaatcgtatggttatctcatttttcgtgatcatcctggttccactgatcctgaccggcgttgctgttgccggttttaccatgtatcaggtctggtcactcgaaaaaaaatatggtatcgagggagtcacttatgaaaatctctccaataataccatgttgttaagcaagatgacgcagaaaacattctccacactcgagaaaacggcatcctcggattctgaaaagctggaagatacatcttatctggattcactgaaccagaatctgaccgggaaaaatgcttatctgctggtacggaaagatgatgatgtattttactgtggtgcacagacccaggatgaactactcttttcggaacttccggaatacggcgatgcatcggcgggcaatgaccgtggcgtctatatcggtgctgatgtgcagtcccttgtcaaacaggtggattttacctttacagacggtgcaaaaggcagtgcatttatcatctttcattcgaattccatggttccgcagctaaagagaattctgttggataccgtctttgtgatcgttctgatcctgattcttaccgctcttggactttgtacctggacgtaccggggtgtgatgacacctctgaatcagttaaaagaggcgacgaaaaatatcaaagaaggcaatctggactttacgatcgagaaaacgggtgtcgatgaaattggggatctgtgtgacgactttgaggagatgcgcaagcgtctgaaggaatccgcggaagaaaaagtggcatttgacaaggaaaataaagagctgatcagtaatatttcccatgatctgaagacgccgatcacagcggtcaagggttatgtggaaggaatcatggacggcgtagcagacacaccggagaagatggaccggtatatccgcaccatctataataaagctaacgagatggaccggctgatcaatgagctgactttttattccaagatcgatacgaaccggattccgtatacatttaacaagatccatatcagtgattattttgaggactgtgtggatgaactgagcgtggaactggaatcgagcggcgtatcgctgacgtattttaattatctggaggaggatgcggtggtgatcgcagacgcagaacagttgaagcgtgtcatcaacaatatcgtcagcaattctctcaaatatatggacaaaccgaagggcgtcattaacatccgcctgcgcgatgtaggtgattttatccagattgagatcgaagataacggcaagggcatcgcacaaaaggatctggcaaatatttttgaacgtttttaccgcacggatgcttcgagaaattcttcaaaaggcggaagcggtatcggactttcgatcgtcaagaagatcatggaggatcacggcggtcaggtctgggctacaagtaaagagggcacaggtacaacgatgtatctggctttgagaaaatatcaggaggtaccggtacatgagtaagattttgattattgaggatgaagaggcgatcgcggatctggagaaagattatctggaactgagcgggtttgaggtggagatcgagcatcgcggagatgttggactgaaacgtgctctgacagaggattttaatctggtgatcctggatctgatgctgccggagatgaacggctttgatatctgccgtgagatccgagcacagaagaacacgccgatcattatggtttctgccaagaaagatgacattgacaagatccggggacttggactcggagcagatgattacatgacaaaacctttcagtcccagtgaactggtggcaagagtaaaagcgcatctggcgcggtatgagcgactgatcggatcgggtgtacaggaaaatgatattattgagatccgcgggatcaagattgataagacagcacgaagagtctgggtgaatggagaggaaaagaattttaccaccaaggaattcgatcttctgaccttcctggcacagaatccgaacagagtgtttacaaaggatgagttattccgggaaatctgggatatggagtctgtgggagatattgctacggttacggtgcatattaagaagatccgggagaagatcgagtttaatacagcgaagccgcagtatattgaaacgatctggggagttggatatcggtttaaagtttgataaaaacagggattcgttcctatatttacggtactgacaaaggtccgtcgaagaaaggcgccctcatagaaagcaggcagggtctgcgctcggtttgagcctgtagtctcaaactcgtgctcgacaagctgccaactttccatgagggcgcctttcttcgactgcgattgtggtgtggagaaggttgcggtcgtaattgtatagattttccatttgccaacgcacagcaatcggctgaccgtttctgatccaggcaacactttgtgggcgcttaggggaagctttgaaatccagctcttacggagacttaggctcgagcgctctcgcgagagtcttagtcgcaattagggattagttcaaagttcccctgcccacattgccaggattagaaacgatcagccaattgcgtccgttctatgttatctctctcctcccccaaaagagtaattttatccccttgaaaatgcccaacacctgataaatcagtccccgccaacgcacagcggccggatgaccgtttccggtccaggcaacactttgtgggcgcttaggggaagctttgaaatccagcccttacggagacttaggctcgagcgctctcgcgagagtcttagtcgcagttagggattagttcaaagttcccctgcccacgttgcctggaccggaaacggtcatccggccgcgtccgccttacaacgtatttacaattttaaaattactcttcaatcgtaaccttatccagatgccagatctcatccacatactgctgaatagttctgtcagaagaaaacttacctgcgcatgcagtgttcagaagagccatcttagcccatccttcgctgtctctgtaagcagcctctactctcttctgtgcttctgcataagacttgaagtctgccaggataaagtaagtatctgcgcgatcgctgcagtttgtgttcagcagagaatcgtagatctcgtggaacatgttgaaatctccattggagtaagttccgttgatcagctgcatcagtacgttacggatatccgggtcgttgttgaaatactgcattggatcgtatccaccgttgttttcatagttgataacctgatcagcggtcagaccgaagatgaatgcattctctgcaccaacttcttctacgatttccacgtttgcaccatccatggttcccagagtcggtgcaccgttcagcataaacttcatattaccggtaccggatgcctctttacttgcagtagagatctgttcagaaacatctgcggctgcgaagatcagttccgcattggatacacggtagttctcaataaataccactttcagttttccgttgatagaagcatcattattgatcacatctgcaacggaattaatcagtttaatggtcagttttgcacggcgatatccggcagctgcttttgcaccgaagatgaatgttcttggatagaaatccatttccggatgtgccttgatctcgttgtacaggtacattacgtgcagaatattcatcagctgacgtttgtactcatgcagtctcttgacctgaacatcgaagatggaatgcggattgacttcgattccattatgctcctggatgtattttgccagacgtactttgttctggtatttgatattcatgaactcctgcaaagctttcttgtcatctgcgtaaactttcagttttgccagttccggcagatcggtgatccagccgtcgccgatgtgatctgtgatccagtcagccagcaacgggttcgcatgcatcaagaaacgtctctgtgtgataccgtttgtcttgttgttgaatttctccggatacatctcgtagaaatctttcagttcctgtttcttcaggatctccgtatgcagtcttgcaacaccgtttacagaataaccgccggcgattgccaggtgagccatcttaacctgtccgtcgtagatgatagccatcttccggatcttttcctgatttcccggatatttgttctggatctccaggataaatctgcggttgatctcttcgatgatctggtatacacgcggaagcagtttggagaacagctcgatcggccatttttccagagcttctgccatgatggtatggttggtgtatgcacaggtatgcgttgtgatctcccatgcttcttcccattccattccttcttcatccagcaggatacgcatcagttcggcaactgtcatggtcggatgggtatcgttcagctggaaagtaactttcttcggcagatcatgcagatcgtcgtgatttttcttgaattttgcaattgcttcctgaatacttgcagaaatgaagaaatactgctgtttcagacgcagttcttttcctgcatagtgattatcgttcgggtacagaacctctacgatattttttgccagattttcctgctctactgctttatggtattcacctttatcgaacaggtccagacggaaatctgtgatcggctctgcatcccaaattctcagtgtgttgacgatcttgttgttgtatccaacgatcggcatatcataaggaattgccataacagactgataaccttcctggatgaaacggtttcttccggtagctgcatcatattctactcttacatatccgccgaattttacttcttttgcatattccggacgacgcagttcgaatggataaccatctttcagccagttatccggtacttctatctgatagccgtcttcgattttctgtttgaacagaccatagtgataacggataccacagccatatgcacagtatcccagagttgccagggaatccaggaaacatgctgccagtcttcccagaccaccgttacccagtgccggatccggctcctgatcttcgatcacgttcagatcaaatccaagctcgtccagtgcttcctttacttctttatatgcagtcagattgatcagattattacccagggcacgacccatcagaaactccatggaaagataatatacgatcttcggatcatctttctcatactgtttttgagttgccagccagttatcgataataacatcttttacagccagagaaacggcctggaagatctgctgttgtgttgcttcatcgatcgtcttacggtaaagcatctttacgttttctttgaccgctttcttaaactcttcttttttgaaatgactgtctaacattagaaacctcctcatttgcaatgattttttatagtgatacagaatgcaaatagtcctgtaccattgaaaaaaggggctggtacgctcgtacccgccccctgatccacatacttggttgaataacttatgtccgaataccgtcttcagactgccaaaccgttattattcattcactttttcaactcccagtgttacttcctgggaattgatattccaggattttacataaccctgagcagtatcggtaagcagcttctctgccaatacctctgtctgaatctcttccgcatgtgccttcataatgtcttcaattactttgttgtctttcacatacacctggatcttatccataacttcaaagccagcttcttttcgcatggtctggatcttgctgatgatctctcttacgaaaccttcctcgatcagttccggagtcagattagtatccagaacaactgcgatatcgttgtcagattcggttacataaccttccatctgtgcagtttcgatcagcaaatctccctctgataatacaacttcattgccatcgatgtcaagttttaactcgccgtttgcacgaagctcagccatggctttgttgccatccagttcgctcagagtcttacggataccgtttaacagtttgccgtattttggtcctacggtctttaactgcggtttgaagctgtaagaaataaagctttcgatgttatcggtgaattttacctcttttacattcagctcgtctgcgatgatcgcggtaaagtattcggacagttcgtacggagcttttacatacatggctgcgattggctgacggttcttgatgtttgcagtatttctgcaggcacgacccataacaaccacgttcagcaggtgatccatatttgcttccagatctttgtcgatccattctttgttggcaaccgggaagtcacacagatggatactttccggagcatctttgtcgatacttcttaccaggttctggtagatatcttcagtcatgaacggaatcatcggagcggcaactttggaaatggttaccagggaagtatacagtgtcatgtaggcattgatcttatcctgttccattccttttgcccagaaacgttcacggcttcgtcttacataccagttactcatatcatctacaaattcctgcagtgctcttgctgcttccgggatccggtagttgttcaggttgtcatctacagtctggatcacagtattcagtttggacagcagccatttatccataacggataatttgtcgtagtccagggtgtattttgttgcatcgaattcatcgatgtttgcatagagtacgaagaacgcataggtgttccacagggtactcatgaattttctctgaccttcctgtacggcttttccgtggaaacggttcggcagccacggtgcgctgttgatgtagaaataccagcggatcgcatctgcaccgtatgtctgcaatgcatcgaacggatctaccgcgtttcctttggatttactcatcttctgaccattttcatcctgtacgtgacccaatacgataacgttctggtacggagccttgttaaataacagggtggattctgccagcagagagtagaaccatccacgagtctggtctacagcctcggaaataaactgtgccgggaactgctgttcaaacaggtctttattttcaaatggataatgatgctgtgcaaatggcatggctcctgagtcaaaccagcagtcgataacttccggtactctgtgcatcggttttccacattccgggcacttgatggtgatatcatcgatgtatggacgatgcagttctacggtcttcgcacgctcgtcaccgctcatctcatacagttcttctctgcttcctacagaatgctggcatccacattcacactcccagatgttcagaggagttccccagtaacggtttctggaaataccccagtcctgaacgttttccagccagtcgccgaaacgtcctttaccaatgctctccggaatccagttgatggtgttgttgttgcggatcagatcgtcttttaccgctgtcatcttgatgaaccaggattctcttgcatagtagatcagtggtgtatcacaacgccagcagtgtggatattcatgctcgaatttcggtgcttcgaagagttttccttctttgtccagatctaccagaaccttcggatccgcatcttttacaaaaatatctgcatacggtgtttctttggtcagatgaccttttccgtctacaaactgtacgaacggcaggttgtaattgcgtccgatacggctgtcgtcttcaccgaatgccggtgcgatatgaacgataccggtaccatcgctcatggttacataagtatcacaggtaacaaaatgagctttctttttctgtttttctgctgcttcgcctgcgcatgcatacagcggttcgtattctttgtattccagatcttttccggtgtatttttcaagcacttcgtaagccggtttttcttcgtctcccagtttaccaagcactttgtctaacagagcttctgccatgtagtaggtgtatccgtctgctgcttttactttgcagtaaatctcatccgggttcacacacagagccacgttggatggcagagtccacggtgttgtggtccatgccagaaaatacgcgtcctcaccgatcactttgaaacgaacgattgcagagcgttcttttacggttttatatccctgagatacttcctgtgcggaaagcggggttccgcaacgagggcagtaaggtacgatcttgaaacctttgtataacagacctttgtcccagatctgtttcagcgcccaccattcggactcgatgaagttgtcatcgtatgttacatatggatgctccatatctgcccagaaacctacggtagaggagaaatcttcccacatccctttgtatttccatacgctttctttacactgctggataaatggctccataccatattcttcgatctgctcttttccgtccagacccagtttcttttctacttccagctctaccggaagtccgtgggtatcccagccggcttttctcggtaccatgtaacctttcatggtacggtaacgcgggatcatatccttgataacacgggtcagcacgtgaccgatatgcggtttgccgtttgctgtcggcggtccgtcataaaatgtgtaggtttctccctgttttctctgttccatacttttttcaaaaatatgattttctttccagaactgttctgtctttttctctctgtccacaaagttcagattggttgacactttctgatacatctcagaatcctcctttattattttcaaaagcggtttgttatacttcttcctgtaaattcaaaaagccttcgtccctgtaacaggacgaaggctacattaccatcgttataccacctcttacaatgtacgggttcttcaccgatacaccttccctttaacggcggaacaaccggcatctcctactgcccgcgggtttcagagtgcaactcaggagtgatattcatctgaccgaccggcaccgggcttccacctcccccggctcgctgaggctttcaggcacagactactgtctccgtcttcgtttttactaaccttcattatatataccttacaaagcggttgtcaaggaattttactgtttttcaagggtaaatttcgctttgtttgctgtcgtactgtctgtgccgatgaaaacttcaaagacgcctgcttcgctctcgaaaatatgattttcgctcaggaaacgaagctgtggttctgtgatcgtaaattccacgcttgtctcctctcccggctgcagggtaactttccggaaatctttcagttctttgaccgggcgcaccacgcttgcggcaacatcgtgaagatacagctggacggtttcggttccggcacaggttcctgtattttttacggttactgctgcctggatgctttctccgtctttcatgctgtttttatccagagagacttcggaaacagcaaatgtcgtgtaactcagaccgtagccgaacggatacagcggtttgttcgggatgtccagatatttggaacggaaacggtctttgtctttgccttccacatgcggacggccggtcgcgtactcgttataatgtaccggaacctgtcccacacagtacgggaagctcatcggcagttttccggtcgggttgtaagcgccgtacagaacatctgcgattgctccggctccctctgttccaggcatccacacttccaggatagcttttgcctttgctttgatggcacggatatctaacggacgaccggagaacagaaccacgatgatattctcattcacttctgctacccgatccagaagtttctgctggatctccggaatctggatattcgcattgcttgtcgcctcaccggactgcaggcggtcttcaccgatacaaagtactacttttttggctccggctgctgcctttactgcctcttccagcatctgtacctcttcctccggtgtgctcgaagacgtctgttctccctcggtaaatccttccagaaccacatctgcgccaagcatcggggatccctgtgcaaagactgcatgctctgccagatcttcctgtttcagcatttcctcgatcgtctttacatcttttgcttctccgatgatcgaccaggatcccatcaggtttctggagtttacataaggtccgatgtatgcggttttttcgtttttgttcagtggcaggatattctcttcatttttcagcagaacgaaggattttcttgccgcttctctcgccagtctgcggtgttcttcacacaggatcacctgtttttctttctcctcgtcggcatctttatacggatgttcgaacagtcccagcttgtttttcagctccaggatccgcatacagcactcgtctaccagatcctcggaaatttttccttctttcaccagacggcacaggttgttgctgtagattcctgtcatcatgtcaatatctacgcctgctttcgccgcacggatcgctgcttcttccttgtcgacacagtaaccgtggtagatcatttcctcgattgctgcccagtcggagatcagcacgccgtcaaatcccagttcatcacgcagaatatcgcgcatcagtttcttgctgcccgtagccggcacgccgttcagggtattgaacgatgtcatcacaagtgcagctttcgcatcgattccagccttgtaagacggcagataaaactcctggaaagtatgctcggacaactctaccgtattgtaatctcttcctgcggtcggtgcaccatatcctgcaaaatgcttcacgcatgcgccgatccggtattcctcgctcagatcctctccctggaaaccatgtaccatgctttcacaaaaacggctgttcagatacggatcctcaccggtggattccatcacacgcccccatctggcatcacgcaccagatcagtcatcggggcaaaggtcacatgcagaccactgacggatgcctctttcgctgcgacagcagcgcatttttctgaaagttccggctcaaaagttgctccctgtcccagcgggatcggaaatacggttttgtagccgttgataatatccagcataaacaacagtggaatgtgatgcgggtgtttttccatgtaggctttctggatctttttcaccgtctccgcacccatcgatccgatcaccgaaccggacagtgcgatattttcttcggtaaatcccatctctgccatcggtcctgtgatcaccgtatcgtcatcaaaaaatccgccgactacctggctcatctgattgactttttcttccagtgacatatcgtttaataaagcggttaactcctcgtttgtcatttctcttctccttttattttttctgatgttgatttccataatactgtgtctgaaaatgttttcgtactctcacagcatatctatttgtactcactatataacaatccaaccgtaatttgcaagtcctgttgttactgttctctccgttcccggcaacacgctttttgcgctctgtttcttacaatttgaccgttcccgcgctttttgtcgtattttacctgtggctatggtataatagatgagattggggtctggacccctgtattttatacagtaacaaatcatgtaaaaggagttttttatgaagagacaattctaccgccgccgcctgctggcgctgtcgacggctgttttactgggactttccagtctgtttccatccatagctggtgcaacggagattaccgctgaagaaccggcagtgacggacaccgtcgatcctgctgcttccacggacacttcgaatcctgcttctgctgataccgtggaaaccgcagacggggaaacaaccgaagaaaccacagaaccggaacgcctagagccggatgcctactttgagccgatccagtccaacgataccgccgactggccacagggacctgccgtatgggcagaatccgcagtggtgatggatctcgacagtggggctttcctgtattccaaaaatatggatgacaccaagtatcctgccagtatcaccaagattctcaccacactgatcgcgatcgaacattcccgtccgtccgaaaaagtcactttttcggaaaatgctgtctacggcatcgaacagggaagttccaatatcgggatccggcttggagaaaacctgactatggaagactgtctgtacggcatgatgctcgaatctgccaatgaagtctgtgtcgccgtggcggaacatatcagcggcagtgtggatgcattcgtggaactgatgaatcagaaagcggcttccctgggatgtacgaacacgcattttaccaacccgaacgggcttcctgacgaaaatcattatacgacggcgcatgatatggcgctgatcgcacaggcggcatacaataacgccactttccgcaaggtctgtcagaccactacctactgcatcggaaccaccaacaaatgtggggaaaaacgatggctgagcaaccatcacaagatgctcccggacagggattatacgtatgagggatgtaccggcggcaagaccggattcacccaggcggccttaaacacactggtcacttacgcagagcggaatggcagacggcttgtatgtgtatcgcttcgaaccaacggaagacagatttatacggatacggcttcccttctcgattacggattcaataatttccagaattattccatcttcaaccggaaaacctgggcagatgcaaagatgctatacccatcgctgtacttcggacagccggaggcggttgcgaatcttcgcccgacctgcacggtaacgctgccggccggcatggatctgtcctctgtagagaccgcctgcaacccgggagacggaaccctctgccgcagctatacatacaaccagtatccggtaggctgcgaatccatcccggacactgcgatccaggcactgttacacagtgaacccacaaacatttgcaaaaagtccgggagcgctgctgcatctgatcttggaaattctgcaaaagaaacagcttccggtatttttcagaaaatactcgcatttgtcgctcctgtgggcacggtgattacttcttttgtcacctctgtctttacagctgtcccctggtattactttgcactgggcggtgcgttgtttctgatcatcattatggagattgtgcttgcgatgaagaaaaagaagaaacggaagaagaaaaaaacagccaaaaagaaaaacgtaaaataaagaaacaggcagatatgaattcataaaatcatatctgcctgtttctttgcatcgtataccaataattatttcttatccacttttcttctgcaatccatttttcaaacgttacctgatttacgccagggatctttgaaatcattgcattcggtatattttcctttatctatcatagaacgacaaatctcttttttcgtattttacactccgattaaatctctttgcctttcgttccgatcacatgtaccacaaacggaataaacagtgtgatcagtgctgcataaccgaggtaagcatatcctttcttaacaaccgtcatcagaccgaactgtgcgatcgcgaaagccaggaaggtaaagattgcagtgaagactgcgtttcttgccaaatggccttttgcttttttctctttgctgtccatgcggcgttccatcgcgttaacgcaacgggttacaataccggagatcatgtttacggctgtggagatagcgcctaggatgatcaggatcgagatgatcggtgtcaggacgcctgcacctacgccgttttgtaccagaaccagcatcggaacggatgcggttgccagatctgcgacatatgcgatggcaagcagaccgaagatggaaagttccatcgccaggaagttgcagatgaacatccagatggctgctttgttgatctgttttacatcggtaacatcttccatatgctggtacataacagataccgatgccagctggaagaagaaatacaggatcgcggaccacagtgccggaccaaatgcaccggtctcagacgagatcaccggcatctccccggaggtcatccgtccgatggaggctgtgatatcaccccactgtgcgatgatattcggaaccagtaccagtaccagaccgatgataatcagcacactcagggtagaagcacattttcttactacattggttccatacagagcaatgaagaagataaatgctgcaatgatcagtgtacatacccaatatgggatgccaaacagtgtctgtaaggtagaacctccggttgcaaatgctgcagcggatgcggtaccgatcatgatcaggtaacagatctcatacaggttggacatcacgtggcgggtcttgccatacaggctgtctgaaaaacttctgtagtcgtatgttttgtgtttgtatgcataacgcatgccataccagaaaaacagtgcatataagccctgtgtgaccagtggcaggatcagacaccagataccgtaattaataaagtactgatagatctgtgcgccggatgcgaatcctccgccaaactgtgtggtaaatgctacgaacgcaagtcccatcgccagaggcatcttacttttgtcgaccagtaatgattttttctcactcatactttctttcccccgatttcctttattttcggaatatttctgattatttattaaactcgatcactttacccggatttaggatcagcttatcgtcaaatgccagcttgatggatttgtacagctggatcatccgcggtcccacgaactcttccaggaattccagacggccgtttccgataccatgctccccggataactgtccgcccagttctttggacagtgcatacagctctgtcaggctggcgtgggttgctgccttccactcttcgtcgctcatctccggtccgcgaagcatctcggtgtgaatatttccgtctccacagtgaccacacggctctacccggatgccatgcgcgctggcgatctttttcgctgcctttacatactcggcgattcgtgctctcggaacaaccacatcacactcttcctgtgccacagaatccgctttcatgccttccaggataccgccacgcacgctccataccgctccggcacgttccggagttccggcgatcgcacagtccagcgctccatttgccagtgctgcctctgccgcagcttccaccgcactatcaagctcctgtttgctcgaagcatcgtacatgacgatcagaaccgcctcgccctctttgaccgggaacattttattcaggttccgctctacaatgtctatcaattctcgctcaaggaattctatcgcagtcggtacaaacggcagttccagtaccttcggaaccatgtccgcacactcttcaaggctcttaaacggcataaccagcgtacaggtgcaggtcggtgccggaagcagttttaatgtcacttccgtcaggatacaaagggttccctcggaaccgatgatcaggtctttcacatcatatccggtcgtatttttcacaacattggatgaaaaattcatgatcgatccgtccggcataactgcctcgatacagcggacaaaatctctcgtcagtccgtaacggaccgctttcataccgccggcatttgtaatgacattaccgccaatggacgctgtcttttcccccggatccggtgggtagaacagccctcctgctgcggctgctgcctgaatatcaatcaacagtgcacccggctgggcggtgatcgtctgattcttccggtcgatcggaaaaatcttgttcatccgcatgatggataacatgatgccgccgtatttgcaggtagcacctcctgccagaccggttcccgctccacggcagaccaccgggatattttctttgtatgcatatgccataatggctgatacttcttctttgtttacaacttccacgtacagatccggctgatatacaccatactccggcatctcatcccgataatattcgctggcgatctcctctcccacccatacacggtcaggagcggtgacagaacggatatagtcacaatcctgggaagtcattttcttataagggtatgccatgacttagtcctccttctgtttttttgccaatgctgtcagttccgggacaacctggtataaatcatctacgatacaataatccgccacaccgaagatctgtgcctgcggattcgtgttgatcgctacgatacattccgatccgttcatacaggacgtaaactggatcgctccggatacgccacaggtgatgatcagcttcggacgcacggtacgaccggacagaccgatctgatgcgccgtatcgccaaatccgttttctaccatcggacgggtaaatgccagctgaccaccaagcgcctctgccagttcccggcacatttccacatctttttcatttcgcacgccacggcctgctacgaccagcacatcctcttcttccaggctcttgactttatcgatcacctcagaagaaaggatcttgattcttgattctgccattttatcattgaccggacagacaaccacttcgccgtgcgggttcgctaccacttcagctttatccatgactttatatcgcaccgtcgcaaactgtggtctggactttgtgattccgatctgtgccatgatattgccgccaaatgcaggacgtacctggatcatatcggtatttggtttgatatccagtgtggtacagtctgcggtcagaccggtatggaaacgggtcgagagtctcggtgccagggaacgtcccagtgcggttgctccgatcagtacagaactcggtttatttgccgcgatacagtctgccactgcatctgcatagcagtctgcccgaaatccttcaaatcccggatcttcatatacatacacatgatccacaccgtaaggaagcagcttctcggcattttccttcgttcctttgccgcctacgatcacacagttgacttcgtaaccgacttttcctgccatctttctggcctctcccacaagttcgtaggtcaccggatggatctctccacgttcctgttccacatagatcaggaagtttttccagtcatctttgttaaatgcttttgctttctgctcaaactgtatggccttctccggacagtttctcacacagagaccacacatacggcagctttcgctgactacgattcccgctccctctatggtcagcgcaccaaaaggacatttttctacgcagattccgcagagactgcatttgtctgcatcaaatttcataaattccatatgtatctgttcctcctatatgatcttctttccggttaagatggaaaaaagttcctctgctttttctttcgcactgccttccagatagacctgtttttctccttccggtggtgcaaacatacgctctacagaggtaggagatcctaccagaccatatcggctcagatcctgatccggcatattttcaaagctcaggatacggatcggacggtctgcggttgctttctttaacagataggacggcagacgcggtacacaggtatctttgtcgatcgtcagaagacacggatacggtatctcggatatctgggatacactgacgagatcctgtctcacctgaatggctttctcattcacatccacaatctctgccacccatgcggcatgcggaatcgtcagatgttctgcgatcgccggtcctacctgggcggtatcgccatcggttgtctgtcttccgcagatgatcagatccgctccgccgatcacctgaatcccctgcgccagcgcgtaagaggtggcaagcacatcggctcccgcgaattttctgtcggagaggatgaccgcatcgtcggctcccatcgtataggcatcgcgcatcatttcctctgcctgcggcggtcccatcgtcagtaccgttacggttcctcccactttttcacggatctgaagggctgtctccagcgcgaacagatcgtacggattcgtcctagtctccccggacattctcttcatggcaccggtttccggatcaatatccaccttggaactcgccggtacctgtttcatacatactacgattttcatactttctacttctttcttcactttctcgcttcaacgctttaaacggttgtattattataacatcatctgattaaattgtcgaggttttcaggacaatttgcacagatagattattctttctgcttttcatctgccaaaatactgactgtcatatccggctctgtaaaataattttcattttttagcatggattttgactcgctgttcacaaaaaaatcccggacaattttatcttctgtccgagattcttatttcaacatcgtgtaaacttgtattcaaaatttttatacgttctgtttccctatttctcttccatctgcttcccgcatcggatcttccgaaagcttaccgtaaagtagataatctccgcgactcccgtcaatatccaagagaacgtatacagcagatacaacgacggaaccgtatggaaatacgcaaagatcgtgtacacccagatcacacggaacacgcaggaaccgaggatcacaatcaccgtaggaacaccactctttccgattcctctcgatgccgcaatcgtacaatccataaacggcgcgatcatataggaaaaccacatgatccgaatacgttccagccctgcctgaatgaccggttcatccgtagcaaacaggccgaggaactgccgtccgaaggtcagaagcaggataccgaaggtggcacccgccacaattgcatagaacatgctgatcagatacgattgcagcattcgcttcttatttcccgcaccccagttctggctgataaagctggcacaggcagtatagaatgccatcataatattgaagatcagcgtatccgcattcatggctgccgcattaccggataccatcactgcgtcaaacgaattcatcgccgtctgaataaacaggtttgcaatagcaaagatcgcattctgaagtccggtggtgattccgagaaccagaaccgctttacaggcactctcatggaaccggatctttgacgggtacagatgacattcatccttccggcgaagcagattggctatcaccagtgctgcagatgcatactgtgcgatcacacttgctgttgccacaccgtctgctgccatgtgacatcggataacgaagaacagattcaggataacattcagtacacccgcaatactcaggtagatcagcggtttggtcgtctctcctctggcactcagcacgccgtttccaaagttatagaccgccatcgccggcataccaaaggcatagattttcatgtagagcaccgctccgtccatcagctcatccttcgtgttcatcaacgccagcatattaccggcaaatgcaaaacagatcatgcagatcacgatgccggtacaaaggcagatcagcagtgatgtatggatcgtatcctctgcctttttccggttgccggctccaagttcatgtgccacctttacattgacaccacagcccataccgatcagaaaaccggtaaagagtgtcaccagcagtgtggtggatcccaccgagccaagtgcccggtaatcggcaaatcttcccacaaccgccacatcgctcaggttaaataatacttccagtacctgtgaaaacatcagcgggatactaaacagaaaaatatttttccaaagagatcctgtcgtcatctctacgactctttttttcttctcccctgtaacgctcattttttatttttcctgaaagaactcgatctcttctcccaccggtccgttgcagaaagccacacgaaccggaaattccggctgagacgggatcacgatgtcttttggctctacggtgatcggatatcctgcttcacggactgctttcacacatccgtccacatcatccgtcttcagtgcaaaatgccggatgcttccctgaggcagctgtccttcagcatcggtaaagacttccaccaggcctgcacccgtatcaaacataaagccttcaagttccggttctccccaagaacgaatcacaggcatacccagaaccccctgataaaattcttttactttttcgatctccgatttttcgcatcggatacatacatgatgaattccctgtaccaacatattatttttctcctttcttacgggcccgtctttttcttttgatttcttcttttttggtccgtatctccatggcttcctcttccgtggtatatttcatggtctttaccgcaaagactctgccctgctccgtcttcttcatccggatcttgcccttcatccagccatgtaccggacagtacgccaggcagtaataattcttctgccccgccgcaaaccaccggatctttttgcggatattttttctgcacagatgacagcggctgctggtgatctccttatccgccatggcttcttctttggagtcaaattcccgggaaataaatttttcataccccggataaaagactttgatctcttcttccttccgtttcggattctgataacagtcaatagaataaaacgtgtccacgatctcgcttcggagccgcatcaaaacctttgccgtataccaggaatccgccagtgcccgatgaaattcctgctgtttttcaatctccagtacatccacggcatattccagagaccttctgctgtctccgtcctcccggtcgatactgaataatttttgcacatccagataacggatcggtccttttaaaagctgcaggatgccgtagtatttcatgtttcgctgcagttccagcagatcggaattgccccagctgcaaaaaagggcatcctcaccgcaccatttcaagaattctttgacagcacggtaaaaaggaatcccttcccgttccaacagtttcatatccatctggatgatctctctggtacggtgatgaagtttcttatatacccgcggctgtatcagtacctgatactggtctatgatctgtcgctcactgttcagttttactgctccgatctcaataatctcaaagggaattctttcattttcctggccttttccgtaaggacactgattccactccagatcaaagacaatataattcataagtgtcgttccttcctttttcctctatctgcaagtataatgtattctttctgtatggtcaacctgttgttacaggatgttgcggtcactccattcacagcagctacagaatttctctgaccctgcacacagaattttcatttgatttttctccttttttttgccatactgagttcagaaaaatatatgttatccataatcggaggtgtatgttttatgcgattactgatagcagaagatgaaaaatccctgtcccgggctctggctggcagatattcaggagcagacaaaacacctgacttccctgaccaataacctgattacactctcccggatggaagaggaacgcacccggctgcaaatgatcaatttcccattctcggatgtggtagaagaaacggtacagtcttttcaggcacttgcccgcacacagaacaagacttttgaaacctcgatccagccgatgatctccctgtacggagacgaaaaatcactcatacagctggtatcgatcctgttagataacgcgatgaaatactccactccggaaggcgagatttcccttcgtcttgaaaaagcaggaaacaacgtgaaactttccgtatacaacaccgccgaatccatcgaccgtgaacagttaccacacctgttcgaccgtttttaccggacagataagtccaaaaactcccggaccggcggctacggtctcggactctccattgccgctgccgtggtcaatacccataaaggaaaaatcacagcaaccacgcaggatgaacactctctgctgatcactgtgacgcttccgttgaagacgcaaggacgctagagcgtgtctgaaaaatcatttccgcaatctgcaagccccactttgcagtatattttaccctcattcggttgccgtagcccgctacgccgcccttattcggataaaatctcccacaaaccgggactcgcagctcacgaaaagcctttttcagacacgctctagttcctctaagaaccgctccccatatttctcatactttgcctcacccacaccggacacctccagcatggaagcccggtcggtgggttttttcacgcacatatcaatcaacgttttatcactgaatacgatatacggcggcactttctgttctccggcgatcgtgaggcgaagctgacgcagccgctcaaatagctgccaggaggcagcatccagatcttccgtaagcccggcgcgtttccggatctttttcccgctgccatccgttttcgtctttttctcctttggttttgagaatttcatcacgatcttctcatcctcctccagaaaatcctcgcccttttcttccagatgaatcagcgcatatttgtccggtgtcgcccacagatacccctgtgccagaagttccccgatgatctccttcaggcgcggctcggtagtctgtttctgttttccataactttccacagcttccagcccatacgattttactttcgcattctgacttccccggagaaccgcggcgatcgttcctgcaccgtaatttctcggcagttccgtgatgcattccataatatcccggcaaatctccgtcacatcctcctccacatactcatggaggcagttcgaacagttttcgcaccgcctcggacctttctcaccaaaatatttcaggataaaaccacgcagacactcctttgtcgtgctgtaaaacgtcatcatccgcaggcgctgggcatcccgctcccggactgcttccgcctcgtcccggtccatatcttcccgaagatccttttcctctaacaaaaactgattgatccggacatcctgtggggaatacagcaggatacactccgcccgctccccgtcacgcccggctcgtcccgcttcctgatagtaattttccatgctctgcggcatattataatgcaccacataccggacattcgacttatcgatccccataccaaatgcattcgtcgccaccatcaccggcttttcatcaaaaataaaaagatcctgattcgtcttcctctcttccgcagaaagccccgcatgatatctggtcgccggtatatcttccatctgtaacatcgtgcatacctcttccacgttctttctggtcgcacagtaaacaatcccgctctccatccggtgttccttcacataatccagcagctccgccttcttattccctgtccgcacctcaaaataaagattcgcccggtcaaaccccgtcaccagcaccttcggactccgaagccccagcacacacaaaatatcgtcccgcacctgctccgttgccgtcgccgtaaacgcactcaccaccggccgcaccgccagctgattcacaaactccacaatattcagataactcggccggaaatcctgtccccactgggaaatacagtgtgcctcatccaccgtcaccatactgatctgcaccctctgtgcaaaatcaagaaacagcggcgtcagcaaccgttccggtgccacataaataatcttataccgcccctgcaccgcatattccatcgccttataaatctgaccttccgtaagcgaactgttaatatacgccgcatgaatcccggcctcattcagcgcccgcacctgatccttcatcaaggagatcaacggagaaatcacaaccgtaatccccggcaaaagcaacgccggaacctgatagcaaatcgacttccccgcccccgtaggcataatccccagaacatccctcccggataagatcgccccgatcagatcctcctgcccgttccggaacccgtcatacccgaaatatcgtttcaatacttcatacatatccatatattattttacttttcctttcctgatctaccagacaaaagaagactcctttctcacctgtaacctctctaagaggctgttcacagcgacttaatcagaatacagcccaaatccctttccatactgactttcactcgcatgtctcagattttatcatatccacaacaaaacgcctcgcaggataccacctgtaaacagtggttacaccttcttctcccgccgccaacacccagaaagcccacactgacccggtaaggtcagacagccttttgctggcgttcttagccaggatgagatccagcgtttacggaaacttaggcgcgaagcctttgctgagcgtcttagttgcagttaacgcttagctcagcttggcgttgccagcggttgtctgaccttactgggtcagtgcgggctttcgtctgtgcagccagtctttcgtccatgcaggcaatatctcactttaccaactcctgcctttcatcaaaccaaacccgatccccttcattaatatctctgtcatacaacatctgatccctctgccgaacgatttttacatccccgtcctcgtcctccagccgaaccactgccatcaccggatccccctctttccgctcctcgcagccaaactccacatcttcctctatccgtaccactctataattcataatccgtattttccctatattaaaacccttaactatttattattcatatgctataatatcacgcccccaacccctttacaagaaagaatccaaacacagcaaaccacaactgtgagaaacacgctttgtgagtttctcaagttatcgcggcagtcgccaaggtctcatgcaagcatggactttggctcgttgctcgcgtaaaaaaagtacgaaccataccgcttactttcaaacgatacacttcgcacttctcttcttagcattaatattatataaacgtaactgttcagtaccttcacagttacgtgccaaaatgcatgtaaaatcaccttcggtgatggcattttggcttgtatgtctcgggattttggcatattcatgccaaaacacctcgcggtacagtgactactgaatagttacatataaagtatccgcaagcctcagaaaaaatatttctccgaataaatcctcagatcctctttttcccagactccgctttccacatgaaaactgttcaacaccggatactccgccatcaacgacaaaatcagataactggccttcgaatcaaacgccagccgaatatcctccaccgacggccgtgacggagaagacggatgagaatgccagtttcccagcggttttaacccattggcgcgcatatccttgattgcattcatctgatctctcggatccagcgtaaagtgatcttccgcatgatccttattttccagaaaatacaccttctggatctctcttccctcttctgtttccaccccggcgagaagcccgcaggcttcctccggaagatgttcctttacataatttacaatctcatcatagagatgatctctcattcttataatcgccataactgtctcctcttctcactctgtcttttctgtttcctctgcttctgcccggaaacatcaggcactccgggaagctgatattgatattcttcattactgctcgtctctcgtcgcaaaccgccctgctgtctcctcgcagacttcctgttcgtaatcaatcggctccaggatcgtcggattgtctccgcataccgggcacttatgtgtgtctttcggcagtttgatcttgtggaattccatcgtcagtgcatcataagtcagaagatatccggtcagaagatcaccgacaccgatcagatatttgatcgcttccatcgcctgtaaggatccgatcacaccacccatcgctccgatgacacctgcctgtttacaggtcggaacggcatcttttggcggcggattcttgaagacacaacggtaacacggtccctgtcccggtacataagtcatcagctgacctttgaaacggatgattcctgcatgagaaaatggttttttctcaaggacacaggcatcgttgatcaggaattttgccgggaaattatcggttccgtcgatgataaaatcatactcccggatcagttcccggatattggatgcatccacgaacatccggtaagtttttacctctacatccgggttcatggcattcatggtctctttcgctgattttacctttgcttttccgatatctgctgtgctgtggatgatctgtctttgcaggttggaaagatccacttcatccgcatccacgataccgatggttcccacgccggctgctgccagatacatggctgccggtgcaccaagaccaccggctccgatgatcagcactttgcctttcaggagctttttctgtcccttggcaccaacttcttttaagatgatgtggcgggaataacgctcgatctgttcatctgtcattgccatttagcatccacctcccatgaagtacaggaactctacattgtccccctcttttaacacggtagactctttatcctcggttgcaataaattcttcattgatagaaacggttacatattccggcatctccacattttcctgctcgatcagctccggcagtgtcagtccgtcttttacttcttttttctctcctgctactgtgataaccatgtcttttctcctttatgtttctctatactctcttcagatctgttcttcgatccagctgtttaaatctgcctgtttcagtgcacccactttccggtctttttcctgtccgtctttaaagaggatcaaggtcggattggactgcacttcatactgctctgccagttccacatcaaagttcgtatttaccttatatactttgatcttatcttcataatcgtcttccgcgtttcctaacaccggcgccagttttttgcacgccacacaggaatcggaataaaaatccaccagaaccggaagcgcttctttcaatactttttcttcaaaatccgctttgcttacccgtactgccattactcttccacctttcttacatacatggtgtaagtgccgtcttcgttatcggttaatttcagtactttatgtccttcctctttcatacttcgcggaacattctgtaccggttctccgtcgttcatgcggacagccaggacttctccatcctccagctcttcgatggcaacttttgcctttacgaatgtcagggggcatactttatcggtaatatcaacctcatcggttacttcaaaatctaattcagccatgatggttctcctttcactgtccctcgtacgcttctttcaactgcttgcggaagtcttcctctcccacacgctgtaatgttttgcggaaacgttcgcttggatttgcatttttctcaaagaaggtgattgccgcatcggtcacacggaacagagtttccttgtccgggatcagcggaagcagttcttctcctttgtagatgttatttccgaaagttccgccaaaagatacaatatatcccggagttccctcccatgcatccaccgggcagctcttgacacagcgtccgcagtgattacatttttctgcatccagctctactttaccgtccaccattttcagtgcttcctgtcggcaggctttcacacacacaccgcaggaaatacagtcgtcttctttgtatgtgatgttcatgccacctttgattccgacatcattttcttcggctttcagacagttattctgacatccggtaacaccgaatttgaacttatgcggaagttcccgtccgaaatatctggcatccagttctttcgccagtgtgtaggtgtcgatacatccgctgggacagacctccgatccctgacaggctgtgatggtacggacacgcggtccgcacacgccggtttccacaccgccttttgccagttcttcttttacttcggcaagttcttccactttgataaatggaatctcgattccctgacgggatgtcatatgtacatagccgcggccgtatttttctgctacttccgccacttttttgatattttctgctgtcagattaccaccgatcaccgccagtcgcagggaaccgtaacctttctgtttttgtctcatatagccgcctttttttaaggctgcgtaatctactttctgtaccatcgctctctcctcctacaacgctccgattttttcgatcgcctgtgcaaaatctgctttcagatcttcaatatcctcgattcccacgctcacccggatcagatcctcgaaaacgcctgcgtcttctttttcctgttccgaactgtgaagactgatcgtagatcccggatgaatcaccagtgtcttcgtatctccgatattggaaagtgtgtatggaatcttcagtgcatcgatcagtgcaaatgcattttctttgcttcccacccgcagcgtcaggatcgctccgtatcctctggaaaactgttttttagcaatctcataccagttgctgcttttcagtcccggatagttgacggtaacagacgggtacgtctcttccagccactgtgcaagttccagtgcattgctgcactgccgttccatccgcagccccaatgtctccatcccaatcagattcagatacgcgttcatcggtgccagacacgcgccggtgtcacggaaaaggctgtttcggagtcttgcgatatacgccatcggtccgaactttttataggctgcgatctgcggatacatctggggatcccattggaatcttccgctgtaagtaaggataccgctgatggaattgctgcttccgttgatgtatttggaagaagaattgaccacgatatcggcaccgtgtttcaagccctggaacagatacgccgttgctgttgtattatccaggatcagcggaatcttatgtgcatgtgcaatttctgccagtctttccacatcggtcacatccagacagggattgccgatcgtctctgcaaaaagcaggcgggtatgttcgttgatagctccctcgatcgcttcccagtcattgttttttacataccgggttttgataccaaattcctcgatatcacgaaacagatcgatggatcctccgtaaagacttgcggaagatacgatctcgtccccgcttcgcacaatatttaaaatagcattcatgatcgccgccataccggaagcgcaggcgatcgaagccatgccgccttccagttttgtgattctgttttcaaatgcggttactgtcgggttccctacgcgggtataacagtagccgggagctttattttcaaatattttttccagatctgcggctgtgtcctgttcgaacgcactgctttgatagaccgggggaagggttgctccgtttgcctcccgaaccactcctgcatggagaaggtctgtattaaaactcatacgcttattcctctctcacagtaacgctctaggatcatcttgcggaacgttactttttatttcaaatattcagccaccgctgttgctgcgttggctccgtcggaaaccgccgtcacaacctggcgcagtttctttgttctgacatctccggccacatacagtcctgccagactggtttctccggtttcgtctgctttcacatagcctgccgggtccagttccaccagattctttaccagtgccgtctgtgggaccgatccgaaggctacgaatacgccatctacatcgatcactgttccgtcttccaaagcaacacctgtcactttcgcttttccggtgatttctttcacctgatgttccagtacaaacgtgacattctctttttctttcagttgttctactgtaacgactgcgccacgaaactcttttcttctgtggatcacatacacctgctccgccagacctgccagataaccggcatcatccagtgcggtatcgccgccgccgagcacggcaacttttttgccccggtaaaaggatccgtcgcagatcgcacagtaggaaacgccttttcccgcatattctttttctcccggaatatcaaccctccgtggggatgctcccgctgcatagatcacggtctttgattcgatcacagaactgtctgagaaggtgatctgaaactgtccggactcttctttttggatcccggtcacttcctgttccagaaactcaaccccgagttttacggcatgttcccggaaagtttctcccaggtcgtatccgctgatcccgggcagtcccaggtagttgtctacccgaccgctctctgcgatctgtccggttccctcatattctttttctatcactatagctgacaggttcgcccgctttgcatagatcgctgcgcttaaacctgccgggccgctgccgatgatacttacatcatataccatatctttcgtttccttattattcttctttcaggtcgcccttctttacagaagccacgcagaagtccagtctctcttcatcactgtcttcgtcgtccccattcatgcctgttacgctggatcggttcggatccacacctgcaactacagttacctttccggttcctgctcctttggatgctcccggtacacggaagctttccacatccagcgactcgatagatacttcttctgcatgtgttgcctgcggtacccattcgtatggtgtgcggtatgcacggtaaaccatgttcatcttgaagtttccgccgatatttttaaagtaagggttcacatattcccatacgatctcatgttccagtgtcacttcgatcagatgtccgtctgatccttcagtgatcagtgtgttgccgtttggcagtcgctgtgcggaactgatgtaggagctgtagaacttggaagcatcggtgaataacaggtttcctgcttccagtggggtgtactgccagatgatctccagtgtgatcggatcaaattccagaacacgggagtaatctctgtgtgcgttgttgttaccggtcggtgcggatgggttcgggttaccgtaaccaccttcaccaccgttatcgaataccagcagattgccttctcccggcagacccttcggaatcatgtggaaatgatgctggccgatgatccatcccagtttgcgaagctctttcgttttagaaaaatcaggtccgatctgccatacgatttctccggttttcttgctgatgatcgccagaatatttgcatttctcgcatcaaagatcaggttgtccggatggaatctctcatctcccgcatcgtaccatttgttctctccgagaacagatacgcagttaatgtgcatccagtcaccaccggcttctccgtgaagtcccggattacggaacagaacattttttgcagcttcatcaaaatcaaattcatcaaaatgatccgaagcccgccagctccacagaatatttccttcccagtctacttcgatgatcttgtcatcgatcagttttttatctgaaatctcatgattgtatacattttcatgggtcaggatgatggtatttccactgtcggttttcgtttcgccgcccggataataatatccgacagtatttccttctctctggtaatcgtgatgctgtcttgcctgccaggtcggttcttttcccggatctgcgatcagctccgtgtgatcgaatttccagacgatatttccgtcataatccacctgcaccagatccagctgatcctgatatgcatattttccaccacgctctccggtagttcccatgacatacccacccggaaggatcttattcggaaatccgccaagacctgcccacagattcacttcgtttccgttcatatcgatcagaagtgctccttttgcggatggataaattgtgtatccgttatacgctttctctttgttatatactaaaactcctgttggaaatacagttggataacccatattcttttacctcctgtggtctgctttttatgccagttttttaatctcttcctgaatgatcagcggatgaacctcacccaccagtctgttttttatctctccgtttttgataaacagcaatgtcggtactgccgagatatcaaatctgctctgtaacagtgcttcctgatcaatgttgcattttccgaagaatacatcgtctcctttttcttcggaaagtttatttaatgcacccaccagcttcttacagtggctgcatgcggtggtgtagaactctacaaccaccggtttgtctttattgatttcctggtcaaaattatttacgttcagttcctgtatcataactgcggttctcctttgtctcttattcgatggtcacattatccggaaatgcgattttggccacatcggtgttgataaaatcgcggacactgtaatctttcgggaaacttccgtgttcaaatccccatttttcgatgtcttccagatgtgtcgttgcttcctcggaaaatccaggctcaaagctgtagtttttccagttttctttaaagtcttctgctttcagaccaagtttgtctgccaggtattctgcggattcatccagatgatcgttgatatactgcgtactttcatcgacagcctgcaggaactttgcaagagtgcctgtattttctgaaatatatttgtcggttgacaggaagtaggatccggtctgaataccgatttcctgggaagttgccacctgtacccatccggcttcttcgatatactttgcttcggaaccgttggcatacacagcggatgcaccacccttctggatcagtgccagtctggtctgggaagaatcagtgttgatcaggttctgtttgctctcatccaggcccagatattcgatgcacttacttgcatagtagtatgttaccgttccttcctgatacataaatcctgcggaaccgtccaggctcttcggatcatctgcgtatttcggatctacatacagaccaccggacagggccgactgaccaccggagatctgagaaaagatttgcaggtttgtggcatccagggtgtttcccagacggttgactgctgcataatctgccatcattccgatgtctgcggttccgttgactaccgcatcgatggtattgataccggctacaaactctgtcgtctgtaagtcaatgccgtatttttcaaaaatcccctgccagagaccaatttctgtcgcatactgatcaagctgaccggtcatcactgcatctctcacggtcaccagatctccaccggatgaagatgcatcggaggatgctgttttgtctgttgtctgtgtgctgctatttccgcatccggcaagtgttccaagaacaaaaactgctgcggctgccaaactgatgattctttttttcataataatgtttcctcctctttctaaagctgttttatggtttccgcgaaactgctttctcctcatatcgcaatctcgcaggtatttttctcttccggattcctacgcttctctcactccgaaatgttttaagaacgtacaaccgaaaagctgaagcagacggtctgcaacgaatccgatcagtgccagggtaacgattcctgcgaacgcccaggctgttttgtagtacatcttggagctctggatcagatatccaagaccgtcattgccaaccagcatctctgctgcgatcacacagatgatactgctgctgagtcccagccggataccggtgaagatattcggaactgcggaaggcagtaccacggtgaaaaacactctcagccggctggcgcccatacaggatgccgcctccatcagagaatgatcggtagcaaccactcctgcgatcgtgttgaccagcacctgaaaaaatgccgcatacaggatcagtgctactttggaagtgtcatccacaccaaaccacatcagaaacagtgatgtcagtgcgatagccgggataaagcgaaacaggctcagaatcggctctatgatccagcggaacggtttgaaatgtccgaccaccagtccgatcggtaccgcaatgactaccgccagtccccagcctttcagtacacggcttacggacgctgcaatgtccgcccacaacgtaccgttgcttaccagttccttgatcgctgcccaggtctctgccggacttgggaggaaaatctcatcatactgtaaggatcccagtccccagaacagaaaaacgatcagccaggagacgatacctgttttgataaccttcaaaggcagatcccaacttcctgtcttttttgtatttgctgtctgtgatgccatggctttctgcctccttcctagatataatacatactggatatatccagtcctttgtttgtcagtgttgttgttgtcttatcatcaaagacatacatctgattgatgactacccatactttgtcgccgttctttaacggtccgttgaccagcggtgaattcgttctcagtgtgatgccccggatatttaacagtacctcaaagtaattaccccggaaaatactctgttctacggtagcatgttcatagatcgaactttcttcggttatatctttcggattcttgatctctacgaattccggtcggatgatcgctttcgtatccggtccgatcgaatcaaatccttttaattttccataatcttcaatgatcgaagattttccgataaactgtgccacaaacggtgtcttcggatgcagataaatctccaccggatctcccatctgctctacgcggccctcattagtgatgatgatctcatccgccacctcgatcgcctcgtcctgatcatgtgttacgaaaatactggtgattccgatcttatcgatcgtctctcttaaccaggtacgaagctcctgtcgaactttcgcgtcgatcgctgcaaacggttcatccagaagcagcagttccggattcggtgccagtgctctcgccagcgcgattcgctgtctctgaccaccggagagctgatccggatatctcttttccagccccggaagccctaccagatccagcagctcggttactctctgtttgataaatttcttatctttcttctggatctttaacccataagcgatgttgtcatataccgtaagataaggaaataatgcgtaattctgaaatacgaatccgattcctctctgactcgaaggaaggtcgttcaccacatttccgttaatacagatatcaccggaatcctgatgctccagcccggcaagcattcggaggatcgttgtctttccacttccggacggtccgagaagaccaaccagttttcctttttcgattgcaaagttcacatctttcgatgcctgaaaatcaccgaaggatttattgatattttttaattcaatatacatagcttgtcgtccttttctctctcctgtgcctgtttttgtcttacctattattcctatcgaattagtatgttgtattcgttgtagagataatatcacttatacatttttatgtcaataaatgtagttataggaattttttaggattggctataggttttccctataacaaaaaagatcccgtacagttttatcctcacctgtacgggatcttttccatatgttttctttattttgctctcgccatagcctcctgataatctttcgtatccacgaagatctcttctttccatgggttcttcttctgtgcttttgctctctttaatatataagcaaatacgaatacgttcacagcaaaggatactaccgagatcagtccctgtgccgtcggactggcaacggtcggcatggtgcttcccatcgctgctgcgataccaccctctccatagacagaggttacagttgtaaagtgactcgcatcctgaaacagcgggaacacctgcgcaaacatgcaccacagtgccagggtatttgcacggttctggatccagccgcctttgttccacagtgctgcggcaaaggtcggtgccagaagcagtgccagaccacagtaccaggaatgggtcggcaggttcaggtaagtatactggaagttccagacatcataggccagaacatatacccagatcatatccggccacagcatatcctgtttgtttttggaagaatagataccccaccatccggtcatacaaacaatattgaaaagccctgccagaccgttcagcacattccaccagccaccatacagccatacgccttccgatgacatccaccagccacctgccagagaacctgcgcggatcgcggattcaaaatcagatgccactgcgatcaggatattgatcgctacaataacaaacggaaatgctttgaaccagtgtgcttttcccagttttccccagtggtacttcaggatcataaatccaatacagcctgcggttgccgcatacagtttcgcataatggaaccagctgttcatatgtacgtaagtatcattgttcagtgcccattccgcaccggatgctgctccgatatagatcgcgataaaatacacggataataccgccgggagcaccagaaaacatgcgattcctccccatttggaccgtcttgcgatctcattcataatgaccagtcctgcaaagacgaacagccagccaagcagctgccatcctgctgtttctccataaatctgaaaaaacatacactcactctcctttttcttacgcggaatctttattccacttctatttccttaatgttgaattcacttccctgcaaaagatacgtgtgttcgctgccacagtgcggacagatctttccgtattctatggtcggataggtcttcgcacattcctcacagtatgtaatcgcaggaagtgtctccacaataagttccgcttcctcaaacagcggccgtttcttcgccgcccacgtccagcagtttagcaggtaggattcgatcaccgttgagacctccccaagttccagcactaccttccgtattttttccacttcattctcctttgccaccttttccagatgatccatgatatgaaatgtcacgccaagttcatgcatatctgcattctcctatttcttcttcgcaaactttactttgatggactgtttcaccatattcggaagaatatacttcagtttatcctcagatgcccgcatcacagatgctcccggaatctctctgtgcagatgaatagcatcaaagacacattttgtggtacatactccacagccgatacatttattcggatccaccacagaagctccacaggacagacaacgggaagtttctgctttcacctgttcttccgtcaggctgtgagacagatcacggaaggtcgctgcctgcgctttttcatctgctttcgccgggatctggcgtttggatgtatcgtaactgtccacggaaatattgtttttatccagctccacaaaatcacgacggtttcttccgatggtcagggtacagttttcatgtacataacggtgcagggaaatcgcaccctcccgtcctgctgcgatcgcatcgatggcaaatctcggtcctgtatacacatctccgccgacgaaaatatccggttccgaggtctgataggtcagtttgtttgccagtgcgccgccgttcggccgtctcttcagatccagattatccagcatattgccccattcgatcgcctgtcctacggagaagatcacatgcttacacggtatggtcatggtctgttcttcatcgtattccggtgaaaatcttccctgttcatccagtacacggatacattttttaaataccacaccggccacttttccgtcttcttccagcacttctttcggtccccagccgcagttcagctcgataccttcttccagtgcttccgcaatctcttccttacttgccggcatattttcccgctgttccagacagaacatggagatcttcgcatccacacagcgactgctgattcttgccgcgtcgatggctacattaccaccgccgacaaccacaacatcaccttcaagcgcaaagctttctttcgctcccgcttcccgcaggaaatcaacggctgcataagtaccttttgcattttctcctgtgatacccggttttcttccacgctggcatccgatcgccacgtagaaacctttgtatccctgttcacgcagttcttcgatcgtaatatcttttccgatctccacgccacagcggatctccacgccaagctcccgaatcacatcgatctctgctgccagaagatctttttctaatttataggaaggaattccgtaacgaagcataccgcccggttcctcatttttctcgaaaatagtcggtttgtatccggtcagcgccagataatatgcacaggaaagtcccgccggaccggcaccgatgatggcgatcttctcatcaaatccacctttcagggacggaatcgtctttttcgggatatatctcgtctccgcattcaggtcacgttctgccaggaatcgttttacttcatcgatggctaccgcctcatcgatggttcctctggtacatgcatcctcacatctgcggttacatacatgtccacagactgccggtaacggattatccttcttaattaatgccagtgcgtcatcataacgtccttcttttgccagtttcagatagccctgtacggcaacatgcgccggacaggcagttttacatggtgcagtaccggtatcgtaacaattgatccggttcacatcacgataattatgggaccacatatgctcaccccacggctgctcagacggaagagggatccgcggatattgcacttcgcatccctctttgtcacacagcttctgacccagttttaccgcacctgccggacagaattccacacattttccgcaggctacacagttggctttttctactttcgccacgtaagcggaacgggacatattcggggtgttaaagagctgggaggtacgcagtgcataacagacattcacgttacagttacaaatcgcaaagatcttatttgcaccatcgatgtttgtaatctggtgcacaaatccgttgtcctctgctgccttcaggatctccagtgcttccgctttgtcgatatagcgtccgtctttctgtgtttccactacataatctgccatatctccgacggcgatacaccagccttccggatcgtccgcgcagccctctccgtgggtcaggcgggaacgacggcaggaacacgggcttgccgcgtattttccctcatatttgttcagccagtgggaaatatgttccagatctacggattcattttccatctcgatcgctttttccaccgggataacatgcataccgataccggctccgccttccggcacgaacggcgtgatcttctccagtggcagacgggacatatgttcaaaaaaggttcccatctccgggttggaatccaggatgtttgcgttcatgttaaaaaattccgcacatcccggtacatacatcggtaacacatactgtttttcgtgcttcggattctcccagttgtattccagaagaccttttcttgacatttcttccagcagggcttcacattttttctcttccagaccggagagtttcacgatctctgccagtgtcttcggttttctcacaccaagttttactgccagttctgcttcctcatcggtaagcacgccggcaagtccccagtactccggatcgtttctggtaatctttttcaatcccagtttctgtggaatccggtctgtgatctttttgcccagtttcgcgatcggctcccggaacggttcgttcggatccggggtgaattccggatagacataatccggatacagctctttatccagttctttcttcattttcatcctcctacacagcgccagccttctatattttcttcgccaaatccaccggcaacgatttgaattcgaataacagacgcttccctttttatttgcagtagttactccctgtaagctactttactcgtaccttccacagatttcccttcccctcatttcttccattctgttacctgcgcagccagccactcggtccacgcatccatgccttcccctgtcttcgcactgatcggaaatacctccgcctgtggatttctctgatggatatactctttcacccgttccatatcaaaatcaaaataaggcagtacatcgatcttgttgatcagcaccgcatcacagatctgaaacatcagcggatatttgagcggtttgtcatgcccctccggtacggaaaggatcatcacatttttcgatgcacccgtatcaaattctgccggacagaccagattccccacattttccaggatcgccagatccacatcgtccacgccaaggccctccacaccctgtcgggtcatctccgcatccaggtggcacatccccccggtatgcagctggatcgatttggcgcctgtttctgcaatcgtctttgcatccacatccgaatcgatatccgcctccatcacaccgatccggaaccgatcctttaaccgctcgattgttcctttcagtgttgtagtctttccggatcccggtgaagacatcaggttcatcagaaatactccctgttcttttaactcccggcggaggttatccgcctgccggtcattgtctgcaaatacgctctccttgatctcaaggactcttacctctttcacgcttctcttatccctttcatgataatctgtaccatctcttcttttccctgttcgtaggtcagtccgttcttgtagagaatatcgctctccagaaagcagattaccgttccccggatcatcgccataacaaccggtttcgagatattcttccggatctttccttcccggatccctttctccagatactgctcagcaagtgcccacccctgactgactgcttccatcaggtacttatactgcttcggatacttctgtgccagttcgaagatcctgctaagtccgatgttataatacttggtcggaattgcacaaaacagccgttccagcttttccagtgtatccagttcggtatccgcctcgatctcctgccgcatatccgtaaaatcacgggcatatcggtctgcaatcgccatcagtacatcctgtttactctcgaacaccgtatagatggtttttttactgatccccaacgctttcgctacatcattcatcgtaaatttcaaaccattcctggtaaattcttcaattgctgtatcaatgattttttctctcatttctctctcctgtcctgttctcatttacggttcagcgaaaaaggaaaccgggaaactgagaacagtttcccggtttccttcattgtaacattacactgactaccggtcaattcactatatttgacaaaaaattcacattgtttttatgcagaacctcttatttcctttcagatctctatctgtaaaccgtcataagccagttccagtccctctgacgccacaatcgattcgtaccagtcatgcggcggacaccagtgtggggacagatgcgtcaaaagaaatctactattctcacgcaggcacttattttccttcaatcggtcccttatccggatattgttcatcagacacatatgtccgccatactgttcattcagtcctgtagttccttccataataactgcatcgtactgatgttcctgtatcaatgcaaactgatcctcgtcataacttccggaatccagcgcatacaataacgtttttccatctttctgaatgatataactgtgggaaaatccccgttgcgacccatgatttccgcgaaccggcaagattctgtacccatccgttttctcttcctttccctctctgatctcatgcagatttattttcagttcttccatgtcatccagactttttctgagcgtttccatcacgaaagaattcccgtaaatattcagctgcgggatatcggtaaaccgtggacctccatgtctcattttttcgacataagtaagcggcagcaagctttcgtctgtatttctccagtgcagatgctgcggatacagatgatcttcatgaggatgtgtgatcagaagtgtcttgagctttgataaattcactccgaaccgggctgcattatcaaaacacgatggtcccatatcgatcagcagctcttcgtcaatcaccatgctgctgtttgttctcaggttttttcctctgtgttttcttgcataagtacaatgaggacattcacaccagtatcccggatatgtttcccctgctcctgttcctaaaaatgtcagtttcatacacgtacctcttttccttattttttttaattataaatctcttttctatcgttttacaacaaaatccgtatattcttcccttcccggaacaaaactccttcttccgacagatttttaaattcccgcatcatggcactccggtccacacacagatattctgctaatgtagtataagataccggcagtgtaaatacctgcttctttttctctcctcccacttcattcagatacgccataatttttttccggatgctgtttctggataaaacatagatccggtttgcctgctggctggatctcatggcgatcagctgtaacagattactgaccatctggctgtgaaagctgcaggcattttcacagcgtttgatcacgtgttcataatcgataaacatcaccctggttcttgtttttgcacatacataataatgttgggacggttccggtaaaagcaagagttctccgaacacatcatcctttttcagttcatccattagatactgactgccttctacatcatttccataaagagatgcctgcccttccagaatcagaccgatttttttcatcgtactggtatactccatgataatctcattgttctgatatactgcttcccgcatctgaaagcagacacgcatccgttcctgctcttccggtaaaatatgggaaaacaatgtcactttttccataccgattcctcccttatatttctctgatcgcttcctttgcttttctcttcttttttatctatacacttgttttgttgcttttgcaacagatttttctgtttttttcggttatactatctacaacagaacatagaaactctggcactcagagttcgataattttttatcaaactatagtttttacaggaggatttttatgagaatcacagatactatcaaatacgtaggcgtcaacgatcacaaagtggatttatttgaaggccagtacccggtagccaacggtatggcttacaactcttacgtgatcctcgatgaaaagatcgctgtcatggacaccgtagatgcaaacttcacccacgaatggctggataacctggagcaggtacttgatggccgcaaaccggactacctgatcgtgcagcacatggaaccggatcatgcggccaacgtggctaatttcctgaaagtttacccggacaccaccgttgtcgccaacgtgaagaccttccagatgatctacaactttttcggacttactctggagggacagaaactcgaagttaccaacggcggcacgttaagccttggaaaccatcagctgacttttgtatttgctccgatggtacactggccggaagttatggtaacttacgacagcactgataaagtgctcttctccgctgacggcttcggcaaattcggtgccctggatgtggaagaagactgggatgacgaagcccgcagatacttcatcggtatcgtaggaaaatacggcacacaggttcagtctctcttaaaagtggcagcaaccctcgatatccggatcatctgcccactccacggaccggtactttcagaagatctcggacattatatcggtctgtatgacacctggtcctcctacacaccggaagaagaaggcatcgtgatcgcctacacttctgtctatggtcatacgaaaaaagcagttgatctgctggctgacaaattaagaagcaaaggatgtccgaaggttgtcgtatacgatctggcaagagacgatatgtctctggctctctccgacgccttccgctacagcaaactgatccttgccaccacaacctacaacgcaagcatctatccgttcatgcacgactacatctcccgtctggtggaacacaacttccagaaccgcacggtaggtctgatcgagaacggttcctgggcgcctctcgctgccaaagtgatgcgtgagatgatggcaaaatgtaaaaagatcaactggctcgataccaccgtaaagatcctctctgccatcaatcaggacaatcaggatcagctggaagccatggcagatgaactgtgcaaagagtacattgcccagaacgacacccttgccaataaaaatgacctgaccgcactgttccggatcggttacggcctgtatgtggtaacttctaacgacggtaagaaagataacggtctgatcgtaaatactgtcatccagctgaccgataccccgaaccgtgtagcagttaatatcaacaaagcaaactattcacaccatgtcatcaaacagaccggtatgttaaatgtcaactgtctgtccacggaagcaccgttctccgtcttccagcagtttggcttccagaccggacgaagcgtggataaatttgccggtcagaccgtacaccgttccgacaacggactggtcttcctggataaatacatcaatgcctttatgtctctcaaagtagaagactatgtggatctcggtacacacggcatgtttatctgcagcgtgaccgaagcccgcgtgatgagcaaccaggacaccatgacctacacctactaccagaacaatgtgaaaccgaaaccggaaaccgaaggaaagaaaggatttgtctgcaaagtctgcggctatatctacgagggtgatgaacttccggcagactacatctgcccgctttgcaaacacggagctgctgattttgagccgatcgaataaataacaaaaataagaagtttatagagtttttaccccgaatatgatacactcaaggaaatagaattttacccgtattttacattagataagaaaggcatactatgaaaaagaccgtaaagaaaatttttaaagtacttggtatcgtactcggggtaattttactggctctgattgcttatatcatttatctctacgccagctaccatcgcatcgaagacaatctggttctggaagtggaacctgcccctgacgccggagaggatctggagggactgacttccggagcgcgttcggcatctgcttccgcgttgtataattcgtccctgactaccggacaggaatattccgcactgacctacaacctcggtttcggtgcgtacacaccggatttcagcttcttcatggacggcggcaaatcctcctgggcaaaaagcaaagaaagcgtacaggatacgatccagggcgccggtgaactgatcgcctcttacgatccggattttgctcttcttcaggaagtggatcttgattccaccagaagttatcacgtaaacgaatattcgatcttaaaagactgtctgagttcctataattctgtcttcgcacagaactatgactccgcatttcttttctatccgtttacacagccacacggaagcagcaaatcagggcttgccctgttttccagatatcaggtgaccgattctcttcggagaagtttcccggtgtctacatccttcagtaagttctttgatctggaccgctgctacagcatctccagagttccagtggataacggaaaagaactggtgatttttgaactccacatgtccgcttatggcaacagcgacgcaatccgtgagggtcagatccgtatgcttgccgatgacatgcagaaagaatacgaggccggcaattacgtcctgtgcggcggtgatttcaaccatgatctgaaagcctccgaggacgattccgaaaatcgcgagtcctgggcataccccttcccgagagccatccttcctgaccacttttctttctgcatcgatcagctgacggacgaggaacgggattccctgtgggacagcgccagaaacgctgacatggaatatgtgccgggtgaaacgtataccgtaacactggatggatttattatctcagacaatatcgaatgcgtctcctacgacaacatcaacaccggatacatctattcggatcatgacccggtatatctcgaattcacattaaaataatataaggcaaaaatataagggaacagacctgtacaacgatctgttcccttatatttttactcagaaatctctccggcaatcgtatcctcgatcacccacaggcttcttatccttcaaaaactatcctttatccgctgacacatcctggccctttttctttttcatataaagccagacgcaaatcaccacgaaagccaccgtaacagctgccagaagcggccatacggtgatcggacagacgctttcactgatcaggttcagtgcctgataggctgtgtagataccgaaaattgcaaagatcacaaatgccagcgtatttaacagtccatccggagtcttgctctttaacagatatcccaccagcataccaagaatgtccgctaaaaaaagtcccagagagcatccgatccatacgataaacgcagcccccatcccttcattggcaccaaaggtaatggctgtcagctgtgttttatctcccagctctgctacaaagaacgtacagaacactgccagaggagcaaatttgatcttgctctttccgccctcttcttcctcttcatcctcgtctcctgcaagcgtcgatgccgcaaaataaaggaaggcaaaagctgcaacaatcttaatcagccattccgggataaattcgctgaccagtccgcccgccagtaccgcaagaccattcagcaccaggatcgctgccgccgttcccatgataatatcttttaacttatacttggaagtcagcgcgatcagcatcagctgcgtcttgtcacccatttccgcgataaattccgtgaaaaatacctttaaaaataataacatgttctccctctctgtgattcaataattgtttttaattattatctgatcacaatataaatcgcatacgccacataaagtgcgatcatacagaacccttccacttttccgatccgtttttttgtcgccgcaaagatccacacacatacggtaaatacaatcagcacacacagatcgatgatattttctctgatgagcgtaatcgggctgatcgcagatgcgataccgagaaccatcagaatgttaaatatattggatcccactgcgtttccaagtgccatatctacttcgttctttttcgctgcaacgattgaagttaccagttccggcagagaagttccgatggaaacgatcgtaagtccgatcagcgtctgactcatcccaagatcaccggcaattcttgctgccgcatcaacagtaacatctccaccaatggcaatagcaaccgcacctccaacgataaaaagaatacttaacggcatggatatcagcctgatctcttcgtccgaaccaccttcaatctccacttgttttccttctttactggctttcatcgctgtacggatcatatagaaaatataaccggcaaagcatcccagaaagattacgccatccagatgccccagtatcatcgaagatgtatctccgattccggcgattccaaagagcagtaacataccggcacagatcagtgaaaacgggatgtctcttcgaatcgtctcttttgccacattgactgtagccagcactccgcagacaccaataaccaccatcagattaaagatattggaacctacgacattgctcacagcaagttcattatttcctgtaagagaagccgacacactgaccgctgtctccggaagcgacgttcccatcgccacgatcgtaagtccgatgatgattgccggcacatgcaaacgctttgccacacttgaacttccctccacaaaataatccgctcctttgatcaacagcacaaacccaatcacaagtgcaaccagaaccagcgcaaatggagcattgttaataaagttttccatagtttcctccttttttctctccatgagtttccgtcatcccaacatcttttcctgtcttccagcagcttacagcactctgctggttggtacagatacgacgtcgacccgctgcccgcgtaaaaaaagactcatgtatatcttcaccccggacaaaacttcttattccgaagcaaagatatacatgagtctcattatttaagatttgccagattgtactctgtactacaatcagaatgttgacaaaccacactttcgcgctaactactccctcatggaatatttaattacttgataaataatatcaaatacggtggtgtgtgtcaacgaaaaaagcacaaaaactctccgtcctgtatatttcctcttttcatccatccgttgcacaatatatgttaatgtttcgtatattttttctaaataccatttatattttttacactttttcgtgcattttccccgtttttctgctataataatacttactgcttattaacgctacttatatttggaggcttttacacatgaaaaaaaacaacgctgttcaaacagcaccgaagcattccatgctcgccaatcaggctcctgtcccccagaaaagtaaagtctcctcacagatgactctgtctgactctattttatccggagcagttgtagaattccgaaaagccggttaccgatttatgcggcacctgcatacgaatattgagatttaccggattctttccggcgaatgttatatggatattcagtcagagactcttcattgcacagagggagattttattatgattctcccggatgtggtacattccttttatctgaatgatacctccgactgtgaatttcagcacattcatttcaatccggatatgttctcaacgattatccttgaaaatgacgggatctttccgatcacgcttcttcatgctgtgttgttttcttcccatttttattaccggctcaactctgatgaacgaattgatgaacagattcggaaactgatcgatctgcacacttcttctgacagtctgtttacggctgccaatattaatgtgtctctgatgaacctgatgctttatattctcgatcatacagaacccgtgcacgagtatgcaaaaccacagctgcaaaacagttatgtggcttacgcgctgaattatattcaggagcattacacaacaaagatcctgcaagaagacattgcacagcagttacagatttctgtacgatatctgagcaagatttttaagagctatatgggtgtcacactctccaactacattacgatctaccgtgtcaaccgctccatcgcactgatgcagagtaccgatctgacactgacggagatcgctttgcaggttggattccgggactctcagcagtattccaaggtctttatgagtgtcatcaatgcaacaccatcgcaatacagaaaagctattttaaaataaacgaaaaaggggcatcgcacttcgtgcgatgccctgtttttatttccgactaaatcttagtcttcttttttccgttttcctgcaacaccggctgccgctgcaattgcggatgctgccagtgcaaatccccaacctgctacatttgttgcatctcctgttttcacagctgttgtggaagtgcctgtctttgtgctgcccacacctgtactgcctgtatttgtacggcctgtacctgtgctgtttccttttgttgtcgtgctattattgttcttggatgtatcggaaggagtcgtagtctgattgttatctttctttgtatcatccttcttttcatcatctttcttgctgtcgtctgctttcttttcttcaagagcactcagagcttctttgatggctttatttgcctcatttacctgctcctgtgtagcatcttccgcattcagcacacctgcatactgtttataaacatcctgcagtttcttcagagaatcctctgtgtacttgtctgttgctgccagtgcggtatctgcttttgctacgttctctttcagtgctgtcttatctacaacaattggttccggttccggatccggatctacggtttctttttctgttgtaaaggtaacggcttctgatggttcagactcatttccggctgcatctactgctgtcacggttacggtgtattcggttccttcggtaagtccggtcagatcataggtaggatttgctaccagggatgcatttacttttgtattgtttacatatacattatatccggctacttctacattgtcggtagatgcttcccaggcgatcgttgcttttgtataagtaatttcagatgcttttacattggctggtacggtcggtgcttcggtgtccgccggttcctctgttttcagtgttgtaaatgtcactgcttcggatcttacggattcatttccctctgcatctactgctgttacgttcaccgtatattcggtttcctcagtaagtccggtcagatcatactcggttccggttaccagttcgtcatttacctttgtttcgtttacatatacgttgtatccaacaacgcctacattgtcacttgcttcatcccatgcaacttttgctgttgtctcggtaacatcagaagttcttacatttgcaggtactgtcggtgcctcggtatccttcggatcttccgttttcaatgttgtaaaggttgctgcctcggatcttacagattcattttccgatgtatctacagctgttaccgttacggtgtactctgtttcttcggtaagtccggtcagatcataggttgttccggttacaggtgttgcatttacttttgtatcgtttacatatacattgtatccggctacttctacattatcggtagatgcttcccagctaacggttgctcttgtctcggtaatgtctgttacggttacaccagacggtacggtcggtgcttccatatcttttgctttttctgttgtaaaggttgctgcctcggatcttgcagattcatttccggctgcatccactgctgttaccgttacggtatactcagtttcttcagcaagtccggtcagatcatactcggttccggttaccagttcgtcatttactttgttttcatttacatatacgttgtatccaacaacacctacattgtcacttgcttcatcccatgtaacttttgctgttgtctcggtaacctctgtagctgttactgctgccggagctgtcggtgcttcggtgtctgctgcagctttatctacataactgatgatcggagttacatgaacagatggtctggttggattgctgttgctctttgttgtcacgcggatcacatcaccctggctaacttcgatttcatcaaagctcttccagtctgttgcctgtacccggctgtttgtaagtgttacactctgtaattcggtatcgtttaacagaagacttaaggtaaccgttccacctgagtttccattctgacgaagatatggctcatcatcttttatattgaaagatacggttccgctcttcggtactctgtatgccattgcggttgtgatacttgtattcggcggtgcggaaagtaatccgtgtacagttgtgtcagtcgttgacacagtaccctgttgtccatcaataccaggaccataataggtatttacacaccagtttggccatccgtctctgtcgacctctgtcatatttgcccagctgccggttccgttcttcatctgaccaaaccacacatttccctgctgtccgttcacatagtccagagtccagttatatgtatttttctgtccgatggtataatcgttggttgttccgtcttccgcagtgatgcgaagtgtcattccggctgctactgcatccttatctgccagttctgttccaccattgagtacagaaacggttgcggtatccgctactgtgatattgtttttcatttcctttacagttgtcggatttttatcggtataaggaacgttcatggttgttccctttacttcatagtaactgtctttcagttctttgtcagagcttgcaattactgtataaataacatcttccataccttcataagaaagaacaatcgttgctcctccttttacaatatcggaatcaccaagaacagtctcgccattcttaatggtaaccttaactcctgcatcaacaataacattcttcaggaattctgctacggttgtatttttcggaaggtcacttacttttgttccagagattgtatatacattggatctcagcacaagtgctgtcactgcatcgctttctgctgctccgatttccggtactgctgtgatggcatgaccaaagaagtcatgatcgatcgtataaccgttcttgtcaacgatcactttacctgcattgatagccggagaattctccgccagtttgtatccgtcaaatacggtagaagcggttggatcttcgtgacgtcttgcctgtttgtcggcagctgctgcgcttggacctgatcctgcatccacaagtacatccgttcctgcatctactttcactgctgcctcatcgttcggataagagcttacattgtagtataagttattgctgtaagtcttgtttccactgatattccagttgcttacagtagccggtgtgctgccctcaaaatagaaaatattattttcaatggtaaccggaccgccattgccgtgtgtgtagtgccagatggtattgataccttctttgatatagaatgtattgttgtaaacctggcagtttccggagttgcccgccggatccagaggtcccatatcttcattctggctgatattgtaacggaatgtgttgttaatggactcccagccacagaacataatggtacttgctgtatttccatggctgtagttgtactgatagtttgttccatcaccataatccgcatcccatggctgtccgtctccattaccattggaagcattcagtgttgcaaaacattcgttgtactggaaaattgcatttttacatttccatggccagatacctgctgctactcgtcctgccccaacaccctgtttgccggtttcgttgccatttgcatccagtctcggctgttgctgggagtaatctgtggtattgatctgctccgctgcattctctgatacattatactgaaccagcggtctgtcaaggtacatcgttgtgatcgcatctccacccacatggttcagatagttgttctcgataaccacgttggaggaaccgtattttgccatgacatcatctgacagggaagcggttgtaaatttgctccactgataggtgtatccaacggcaattccccaacggtttaccgtatcaagggaacagttcttgatctgcacatcattgtattttgcaattccggttgcactctcatcggttggtttttcaacgatgaagtaaatacctccgtttgtcatatgtttgttataaacgttacctgtcacatcatggatatacaaatcattcaacacgatgtgatctaccgttccgttgtctttcgcaacgccggcaacaccggttctgtccatcgcatacgcatcgttatatgctttgtctttttcggtatcggtggtactctttctatcattggtcagttccagaccgtcgatctcgatatactcggtatcttcaattaaaatactggaagatacggtacctttccatttgtggttctggttatccagcgggtttccgtagttcagttcccactgaccgtgaccattggtgttgatctgtggtctgtttccttctccgtatgtggatacttttaccggtgcttctgcactaccactgtcctcttttgtaaagacaagtgcctgatcttcaaataccgatccctttttcaggagtaccgtatcacccggttccagatccagttcattcactttatccagtgtctgaaacgccttgctctctgatgttccgtcattgttgtcatttccgcctttggaatcaacgtaatacgttgttcctgtaccgtctgttcccgctgcctgaacaggaactgccggcatcattgatgcaactgttgttcctgcaagcagaagagccagcgttccgctcatccattttttcttcataccttttctccttctgttattgcagattctctagggtaaaatgatttacatccttcatgtttccttccacctgagaatcttcttcccgctgcgcgatcatatcatcatatttctgctcacgcagttctcgttctactgcaactctcgctgtttccagatctgcattttcttcactatctccaaaaatccagtcccggcttttgtagtgttcaacgatctcatcttctgtcagttccataccttcgcgatccgtatcactgcagtatttttccttcaaagtgctgatttcataatccagataaagtggaaacgtatactctttcagtccatagattacttcccctttttccactttttcttttcgttccgcattctcatctttccagcgcttttccagagcctcataactactgtctgatatatcgccgttttcttttgcgagatcatacactgtatgaatgtatttcagctgctcgactgtattttccgccagaatttcatacccgtatttttccttatactttttcttccagaaatcgtctccataaacggcgtcgtaatcctgctgaatctgcattttggtatcatattctacagattccatgcagtttacatactcttctttgctgatggtatgttccgcaacagtcagatcaaatcgatgatcctttttatattgcatgacgccggcaacaattcccacaaccgcaaacactgctacgatgcctccgatcttcaggaactgttttttccgattcttcatgatgtacctccttcccgtctgaaatcctgttcttcctgcacacagattttctcagtcaagtttgattttattataacaatccgttcttttcacatctcgttctttttgtttgattctgccatggattttgtcaaattcggaactataagtaaatttcccgtaaataccaaaaaaatattaagatttctcacagggcgttcttaacctttccatgcagcaaaaaaggagctgtcggtaaataacgttttttagagctgacagcaccaaacaaaaatatcctgacagttacagagctttctggctctgcaacttgttcaggatattttctcagtttttcgtataaaaaacgatgatatttattt

SEQ ID NO: 2464 - DNA, 1251 bp, Unknown
  gut microbiota DNA sequence
aaacagaagccgtggagggtactgctgatccgacagaagaaccggtggttaccggaaatgaagacactgccaaaacggatactccacaggcagcggaagttccggaagaagcagaagttgtcagtacggggaaagatgaaaaaacatccgttccggagacagcagaagaaaaaacagaagcctccggggattcctgggaggaagacgaagaactgaaactgtatggtacggcagatcaggatgtggacgagaacggacaggtgcaggcagcagcttcctatgacctggacaccgtgatctcccggacggtcagctggaaacggggaacgaatgacagagtatttaccgcggatttcctgaaaaatgtcagcagtacagcgtctgactggaccgtagtattccttggacggctgggaatcggggaagattacagtgcattcttaaaccgagcaaatacgtatgtaaaagaaaaatatgatgcgaacccatccacaggacttagcaccaatacgccgaccgaatggcaccgtctgaccatggccgtactggcagcaggcggggatccgacggatgtgggaggacatgacctgatcgcagacggaacatacaattgtctggcaggtgctccatggaaccagggaatgaacggtgccgcatgggcacttctggctctggattccaaaggatataaagtaccggaaaaagtaaaatatacgagggaagacctgatcagttatatcattgacagacaattatccgatggaggctggtcactggatgataagaacccgtcgttagacctggatatcacatcgatggtgatatatgccctggctccccatgcagcggagaatacgaaggtaagagaagccgtcaaccacggactggatgtgctgcgcaagagcatctctgcagacggggattataactacggaggcacctacagctgtgaatcggtggcacaggcgattatcgcctttacctccatggggatcgatccaaccacggtaaagaatgaaaccagtgggaagagcctgctggatggtctgatgaagtattacagtgccggaaccggcggtttcctgcatgcctattatgacgatgagaaacagaaccgtccgaacagcatggcaactgaccaggcgatggaggcgattgcagcttaccgcctgtatcagcagggcatcaacctctttgatttccgctccaccgccaacaccactcagtatgtggcacaggcagataatggca

SEQ ID NO: 2465 - DNA, 70069 bp, Unknown
  gut microbiota DNA sequence
aagcttgcttgcaggaagatttctgaacttgggacccgccaaaaacatgagtaagtagccatttttcgaagaaaaatgagcggattgcgaatctttttgaggattgtgagagtacgaagtacggaacaatccggtatcaaaggggtcaaaatcccttttgaccccaacatcatatgataaataaaaatctggaaggaaaaagatcatgaaattatatcagcttccatcgggcgatgaggtacatcgttataaaaaatcgctggttatctgctttgcaggagcgcggaaagtgctgggaaccggaccaaataacagcggctatcggacggatctgagagccgtctttaatcatgactgcaacccgggaccgggcatgtcgtgtgagcttcgggcagatacctatccgaaacatatggatctcatagcagcacaggaactgggactggatgcggaacactgcaccggacttatgacggctgcgagtatggaaaatgtatcgatacagtcgatgaaatatgaagattttacggtgacagcgctggtgacaggcggaatccggaacaatggaggacgggtgggagatccggcggtctggcatgagaaagcggatatttcccatcctgtcagaccgggaaccatcaatattctgttacatatcgatgccaacctgtcagagggagcacttgcaagggcaatggtaacctgtacggaagccaagacagctgctttgcaggaacttcttgctccgagccggtattccagaggcatcgcgacgggttccggtacggacggaatgattgttatctgcaatgcggaatcggatgtgtatctgaccaatgccggcaaacactgcaaactgggagagtacatcgggaaaacggtaaaaaaggcggtcaaagaagcattgtatctgcaatcaggactcagcccggaatatcagtatgacatttttcaacggatggatcggtttggagtgacggaggatgctctgtgggaacggtatgagcagaaaacatctggatttgccagagcacatttcagtgatgcgctggatcggatccggagagaagatgaactggtggttcagacttctctgtatgcacatctgctggatcagacagagtgggggatgttaaaaccggacaaagcatggagcgcaggaaagcagttgctcaggcagcttggatgggaagaaaaaaagcagccacagatgtcggaaccaaaaagtacggatgtgaaagacacgtggatcatgtggatgacagaatattatatgcagatggttttaaacaggatcacactttcttctggaaaaaattagatatttcgattataatatcggataaatagaaggttttcttttcgggaggagaaaaggaaaactattgaggtatatagaaaagaagaggatattatatggaagataacgtactaatccgtagggttgcggtggaatctgtcagtgaaaaatatcaggtggattccggatacgatgtaataggcaaagaatgtctgaagaataatatcaaggtgaaacagattacgatgcctgagattagaagaattggtcagcaggcatttttcagctgtacaacattgaaaaatgcagaatttcccaaggtagtaactgtgggaaaggaggcttttgcaaactgtagtaatctgcgaaggatctcttttccgaaatcgttgcgaagtctggaaaaaggggcgttttataagtgcaaacgtgccaattccgtaagtttttcggaggacagtgcgtgcagagagattccggacaggacgtttgcagaatgcaggcagatgaagatcctggtgctgccggatgcgctggaagagatcggtgcagaggcgttttacaagtgcgaagagctgacacgggtgagactgccggataccctgcgaaagatcggaaaacggggattttatcagtgcggactggaagaacttcaccttccggaacatctggaatatatcggtgagagcgcatttttaaaatgtaagaaactggaatatgtccgtgtaccggaaagtgtcagaatgattggaaagtgggcgttccacggctgcggacgtctgaaaaaactggagattcatcacgacccggaagaagtgggcgagtggatcaccaataaaaactgtacgattgtctgtccgaagggaagtaagatggaagcctatgcgaaatcgtacgaggtaaatgtagaatatctgtaaaacagatgttttcggcaattcaaaggaaagagattgacaaatttttgtctatgctatatgatttagctataaaagaatatgggattatggcataattggaaatggtttgtccatttcaggaagtccggtcagattccggtacggcttatccccgctgtaatgaggacgaaagctgtcataccactgggaaaccgggaagggacagcaagtaggagagaactcagagtcagaatacagacagttatgcaccatagtaacggagtccggaggcataaacggaggttttatttttttgtctcgatttgaggatttcagataacaacagaatatagatacagtcgcatctttgcgtggaaagaggaaaccggtcagatcccggtgccatacaggacatagaacctgatttgatcggacagcccgatatactcgctggtacagggtatagtctctggagggatactataccctgaagcaggagaagcgattgtgaatatgaaaaaagtttctcttaggagaaactttttttgatttacaggaaagtaatttcctgtaaatcaaaaaaacgctccgcggggatacgcactgaggcgtagaaggtagatgtcgcaagcgaccgccacaggcgcgagaatgtgccaaggcacattctttgttatctgaaaataagtaaccatccttaaacggatgcgaggtccatgttttttaaatatcacaaaaagggaggagagaggaaaaggaaaagtaggaaaaagatgttgaaagtatgcaaaaaggagggcaataacgcatgaaaagaaaatggcttgcacttttactgagctgtaccatggttgtcaataccggtgtattacctgtagcagcgacaactctggataatgaaagcgcagttgtgcagcagatgaatgaagaaacatctgatacacaggaagaggctgaagagggaactctgaaagcagagagtaactttgaagagatcgcagaggacggagatgtccttacggcagatctggaatccgacacctactggacgacagaaggtgagaaggcaagaaccttccagctgggtgaggaaaacaatgtcaacgatgtatttgattatgctgcaatcgcagaaaaaacagatacatccaaatatcagatcagtgagattgatgtaactattggtgaaaacacactgaaacataaagtggatgcggacaacaaagaggataagacaacagcggaagagatcagcgaatgtttcggagatgattttgtcatcggtgaagatgctgacgaagagaactttatcggggaaggtaaagtatcactggcaggtacagcaaatgaagacgtgacaatcgaagttatctttgaaaaggtggaacagatcgcagattctgagccagcaaaagatccggcgcaggatgatgcagatgtgatcgaagacgaacagccggccgaagatacaacggagcaggcagaagagagaacactgttaagttacttcagagtatccggtacttccggagactttacatttgacaaaacaacaggtgaggcaccagcagtatatgtagcaactgacactacttatatcagcgcccgtgtgtatccgacatccggtgataaagacaccagcatgaaccttacctattcttataccggtacagacggaaaagaatatgagaaggaacttacctgtcgtggatattatgagcgttttgaggctccgttcctggcaaagagcggaaaaggaaatgttctgcatatcaaagccagcaaaggcgatgtaacagaagaatataatatcacggtaaaaagaactgccagcctgcaggggctgacagtagaagatcagaacggcaatccgattgcgattgatccgagcttcaataaaacaaaaacagcatataccgtaaatgtcctggacaataacaaaaccgtaacggtaaaagcagtggatcctgtagaaacagaatatccggacgaatcacagattctgttcaacggagaagcatccgaagatggaagctataaagtagatgtagcggatattccggaagacggaaccacccttgtgatgaaaccggacaacggtgcagaacaggcaacggaatataccctgaccattaaaaaagtaactgccattcctatggaagtaaaactggatccggaaaatgcacagttctgtctgtataatgcaaaaaatgaaagagtttatccggatggtggaaaatactatctgcttccggaaacagactatacttatacagcggcatgtgacggatatgtaggaaagagcggtaccattaattataaagcagatgatacagctgttctggatatcagcctggagaaagcagccgacggtcaggatctgccacagctggatgcagagtacggtggattccgtgcggattccaataaccagtccgttatctcttccaagactccgatcacaaaagaaagtatcgaagtaaaatgggaaagacagatgggaacatctgtaacaccttccagtggaagtaccccggttatcgtagataacaaagtatatacacagtctggtggaaaactgtatatgctggacaaagagaccggtgagatcttaaagagcagcgactgcttcatgaatgccggattcaacctgatcccggtaacctacggcgacggtatgatcttcgttccgttaggaggaggtatccagtgtttcaatgcatctacactggaatctctgtggtgctacaaaggaagaacaggttcctgtaacagcccaatccgttatgaaaacggaagaatctatgtaggtttccagatgggcgattttgtctgcctgacaacgacggatgaagatccgtccagccaggatgaaatgaaaacaccattatggacaagcccgagcagcggcaacaatggttactggtgggcaggtgcctggaccaatgataattatgtatttgctgtaaatcagggaggcgccctgatggttatggataaaaatacaggcgcaacggtacagaaaatccagacaaaggcagataaagtaagaagtgatgtatctttctataatggaagaatctatttctctacacagagtggctatctgtactcttataatctgactgcggatggaaaagtagatctggataacctgatcgagccgctgtattatggtggacaaagtacctgtacaccggcagtttataacaaccgtctgtatattggtatctccagtggaagtacgttcggtgaagacggtgcagcgatcctggtagcggatatcaatccggagaacggtgcgatgacaaaagcatatctggtacctaccaaatctgattttgcatactgccagacttccggtctgatcatcaacggttacgaagatgaggacggctatgtatatgtatacttcctggtcaacagtgcaaaaggttctctgtacatggtaaaagataaaccgggcatgacagcaccggatccggaaagtggtctgttctatacaccaagccatgaacagtactgtatcgccagtgcggttgcagacagcgatggtacgatctatctgaagaatgactccgcatggcagtgtgcgatccgccgtgcagaatcttatctgaagagcgtagaagtaaccggaggaaacgcagtgatcgacggcggcaaagattttgcaggaagtgtgaaagaacacagtgttaccgtagatatggataccgaaagcgtaaccatgaacctgacagccaacgaaggaacagagatccgtatgaacggcgtgccgggagaaaaacaggagatcgctctgacaggagatgcaacaaccgttgaagtagaacttctgaaaggggaatccacacgaatctacaactttaccatttatcgcggaccggtactggattctatggaagtgaccaacaacccgaactcaggaatgggaacaaaattcactatggatcagacttttgatccggcgaacacagaatacacagcaggtatcagtacagcaacgaaacaggttactgacggatatatctgggtaagctgggcagatgcaacagataagctgacagcagaagcagtcagcggtgtaagaggtacgccgactattcgaaccaattacaaaggtgatacatatgtcgatgtaagcttttcagagagaggtgttggagtgacaacatctgcaactgtaaaactgacactgacatctgaagacggttccagaagcagaacctatacggtaactctgtataccaacaatgcattaccaaaagtaacactggcagacgatgccgtagcagaacgtaccgattctacagcaactgtaaatgtaactacaaataaagaaggtactctgtattacctggtacagaaagcagatgcagcagcaccggatgcagggacgatcgagaaagatggaaagagcatcgatgcagcagaaggtgaaaatactctgaacatcgctgatctgacaaaagacggatacaaagtatatgtaatgctgaaagacgccaacggagcagtatctgctgttcagagcgcagaactgaaagaactgtggatcaaaggtgatctgaacgatgatggtgttgtagatcttaccgatgtatcccagttactggataagatcacagcagatgaggatgttttactggcagtcggagatatcaacggagatggaaagatcgatcttaccgatgtatctcagttacttgacagtgtaacagcagattaagaaaaaggagactgaaatggcgggaggacaaaagaaaaaaaataaggggctggcatggctgcttacctgtattcttgctgtttcagctgtttttccacagatggtttacgcggatgtcatgcaggagccggagacggaggcggcaggcattgaagcttctgatacagcatcggaagaggaaacggttttgctggaagggatccggctgaatactacaagcctgattatgaaaacaggagagcagaaaaccctgatggctacgctgcttcctgaaaatacaacagaacagccggagattctctggtcttccacagatcctgatgtggtacaggttgccggagatggaacaacagcggtggtcaccgctccggaaggagaaggaggaaccgcagtaattacagtaacggcaggggactatacagcctcctgccgagtgctggttacagtgcaggaacccatgctggagagcatgatcttcatgcagaacagttccggaagcaaccgttatgagctgacggaagcagaggaaggggttcgggagtataccttaagggtgccggaaagtacaaatgtagtttatgtaagaccacagcttcgggatgatgtgcaggatgcgcagattacagcaaaattcacagatatcacttccggagaagaggtttcggtggatctgccgacggatgaagtaacttcactgaccagcagtgcaggacgacttctgaaagcatataacattcagcctgtggaactgacactggaggttaccgaaggcagctatacagaagttcataagatccatgtggtaagaggtacctatcttggcagtcttcagatcaccgatgatgaaggcggggaagttgcctatacaccgactttcaaaaaaacagtgtatgaatattcggtgcatgtgccgtccagcaggaaatatttacagatgcagctcaaaggtgcagaaaaaaccagcacggttcttaccgtaaacggagaaccggcagagcagggcagttataccttacctctgacagagggaaccatgaaggtggttatgcaggcgggtgacggagaagttgcttctccgtacagttatatactgacggtgtatgtggatacgatctgttatgtgtccatagcaacagatccggaagacgcggtggttgctgtctatgatgcggacaaagtacaggtggatccgaagaacggcaggtatgagctgatcaaagggcagacctattcttacaccgtatcggctccgggttatcagacggaatccggtcagtttaaagtgtcggcggatgaagagaaaaaaatcaccctgaaacagagttccggtgatcagcaggaagatgtggatgcggaatggggcggctactggaagaccgacgataatctgaatatcgtggatgctccgatgccgggatccctttccagtgcagaagtcttatggaaacagcagtatggtacattcggtaattataccaacagtatcagcgacggaatccttgtggatggaaagatctgctgttttcagggaaatgagttgttatatctggatcctgttaccggcgagacacttaccaaagtgaagatgcgggacaagggaaacagtgcatttaccaagccgctgtatgcggcaggaatgattttcgttccgctgacaaacggaagaatccaggcgtttaatgcgaagacactgaaatcgttatggctctacacggacattatcggcggcaataccgcaaccgcactgcgatatgattccggttatctgtatgcgggatttgcagacggtaatctggtctgcctgtttgccggagatgaagatccggagcagacagaggaagataaaacagctgtctggagaaaatacgacagcggcggatattaccggaccggtgtttataccggagaaacgtatctgtatgcctgcggtcgttccggcaatctgtattgcctgaacaaaaagaccgggcagacggtacagaccgtaaaacttccggatgagacgggcattgcatcgactgcgatctgccaggatcagggaagactttattttgcaacggagaatggatatctgtgttcctatccgctggaggaagatggaaccatcgatacggaacatgcacaggttctttctgttgatggaatgatcttcggtacgccggtgatctacgaaggaagaatctatgtgggaagtgccggaaaagaccggtatggaacggtacataatccgtatcatctgaatgtgattcagatggatatggatggaaacatggcgctggcttatcagatgacgattgacggatgcccgaaaggaacgccgacactgacgacggcctatgcaaaagaagacggttatgtttatgtgtattttactacggacagttccaacggaggcatctatctgctgaaagataaagcaggactgacgcagccgggagagggaagcggattgttctatcagcaaagtgaggtaaacggaagcggaagcggtacgatcctgacggacagcaaaggaaatctgtatgtgcgttatgaatcgggctggatgtacgcgatcaaatcctctgcgttatacctggaagatgtgaaaatctccgagggcaatccggtgatcgacaatggcggtgcttttgacggtcaggcgcagaaccatacggttgtgctggaagccggaacatcggaaatcacgatgaattttcaggtggcagacggtgtgacggtgacagtaaacggacaggaaggcgccagccggaaagtgatgttgcaggatggcacggctgaggtggaagtcgtgctcagcaaagacggtcagacaaggcagtacagttttcagatccgtaccaaaagctcggatgcaacactggaaactttacaggtgagcttttcctctatcgtctatgtcatggagatggaactggaaccggcatttcaaaaagatgtgctggaatacaattcttctctgtacggtgacggcgaggacagagaaccgtactatgtatggccgattgccagtgacagcaaagcaaccgtaaaagttacagtggtttccggagtggacggctgtgccgccggtgatgagatcgaagcggctacggcagtttttgatgatcaggtcagagccagatataaggttcgaccgagttcagagaataaaccggcgctgatcaatatagaagtgacagcagaagacggaaagaccacaaaagattacacgctgaagcttttccgggacaatgaggcaccaaagatcacggcaggaacaaatgcagtggtgacacgaacagagaaaagtgccagaatccggatcaatgcaaacatggacggctatctgtattatctgtttgcggataaaggggattacagtaagattccacctgcaaacgagatgaagacgaatggaaaacggattgcgatcaaaaaaggagagcagacggtagaactggacggacttcactccggagagggtgttatgtatctttacgagatgggatattcccagcggttcagcaatggaatccaggtggatataccggagtacaaaggtggagatacaccggtagacccggatccgtccggaaaaggggatatcaatcaggatggcatcgtggatctcacggatgtggcggttcttttggacgctgtgacagaaggaacggatgtcagtctggagatcgcagatatgaatgaagatggcgttgcagatcttaccgatgtggcaattcttatggatcaggtcacaaaagacggataaaggaaaggagaaagaaaatgaaaataggaaaaaaacttttttcattgttaggaacagcacttcttgcaacagctgttgcatggaattttggaggtgcgacggaagtacaggcagcaagttacacagtaaacagttccgtcagtgatgttcagggcaatgtgggagatgttatcaatcttccgattcacatcgaaagtacacagaaattaagaggactttccggaaaattaagaggaaattatgatactacggtactggaatttcagggtatggaaggaaaagatattccggaagcggttctgacatcgacagccggtggaaatttttcctacctgacatccagcagtaacacattttcaagtggaacactgaacctgaaatttaaggtgctgaaatgctcagcagatccggtcagcgtaacgatcagagatctgtattataccgatggaaatgaaagcagtgacaaagtaacacttacagcgaacgttacggttaatcatccacaggatcagagagaagaaaaagtgacaaaagaagcaacctgtacggaaaagggaagtaaatccatcatctgtaaagtatgtggagcaacactggagacacaggaaattccggcgcttggtcataaggcaggtgactggaaagtgacaaaagaagcaacctgtaccgaaaaaggaagcagagaacagcgctgtaccgtatgcgatgaagttgtgaaaacagaagagatcgcagcactcggtcataaagcaggtgactggaaagtgacgaaagaagcaacctgtaccgaaaaaggaagcagagaacagcgttgtaccgtatgcgatgaagttgtgaaaacagaagagatcgcagcacttggtcacaaggacggaaaatggaaaatcaccaaagaatctacctttacagaaaaaggttcgaaagaattacactgtgcagtatgtgatgaagtgatcaaaaccgcagtgattcctttcaaaggtgatatcaatggaaatggcaaaattgatctgaccgatgtttccaatatggtagacagcatcacagatggaagcgcagtagaagcggaaatcggagatctgaacaacgatggtgttgttgatctgaccgatgtttctaaattactggatctgattacagaaggtacggtataaagatgtggataatatgatggaaatcatcatattccagatagaaaaagaaaggaagtaagaagaaatgagcatcagaaaaaaattagtatcactgctcggtacaacaatgattgcagcagcaattatgtttgtagcaggaggagcaaccgaagtacaggctgcaagctatacggtcaccagtacaaccggtgatgtgaccggagaagtgggaagtactgtaaaagtgccgatccatatcagcagcgcacaggatctgagaggactttccggaaagttgaacggaaactacgacagcagtgtattacagtttgaaggaatgtcaccggaaggtatcccggaagcagttctgacatcaacagccggtggaaacttctcttatctgacaagcaaaaataatacatttaagagcggtacactgaacctggaatttaaagtgttaaaatgcacagcagatccggtttctgttacgattaaaaatctgtactataccgatggtaatgaaagcagcgatatggtagatcttactgcaaaagttacaatcaatcatccaaccgataaacgagttgagactgtagccaaagagccaacctgtaccgaaaaaggaaccaaatccgtaaaatgcggcgagtgtggcgctgatctgggaacagaagagatcccggcactgggacacacagcaggtgactggaaagtaacaaaagaagcaacctgtacagaaaaaggaagcaagaatcagctgtgttccgtatgtggtgaagtgatcaaaacagaagagatcgcagcactgggacataaagcaggtgactggaaagtaacaaaagaagcaacctgtacagaaaaaggaagcaaagaacagcgttgtaccgtatgcggtgaagttgtgaagacagaagaaatcgcaaaactggcacatacctggaaaacagacaaagatacagataaagacggatggaaagtagtaaccgcagcaaccaaagataaagaaggaagcaaagagagagtctgcagcgtttgtggaacaaaagaaacagctacaatcgcaaaactgacagctactacaacacctactccaaccgcaacaccaggagcaacaagtggaaataaaaacaacacaacaaccggaacaacttctacaggaagcaagacaaccagcggaacttccacaggttctacagcagtaaaaaccggtgattccaccaatgtagcaggaatggttgcagcagttgcagcttctgcaggtattcttgtgatctgcggcgtaatggttatgagacgtcgtaaagtaaaccgttaaggtaacagtaacttataaaaagagagtatcagaaaacagagaaggtttgctccgaaggtatcttcggggcaaacctcatcttgtaaaaagaggcagggtaaaatttcatgaaaaaaccggatagaagaaaagaaaacagaaagaaagcagcgggtgcactggcaggtctgggactggcagtcttcttttttatactgctgtttggattcggaaaggcagatccggaaaatccgatggaaaataccaccgccgatgcttctcatatgtatttgacatcgtccacacttgccatggataaggaaaaactggcaagtgtggagaatgccaacatcagctccggcggttcggaaaaccaggcacaacaggaagaggaacagcaggaagaagaggagcaggaacaggaagaaacacaggaagatcagaaacagagcgaggaagaacagcagcaggatgtgcagcaacaggaaaatgagcagcagaccgcgcaggatacaaccagtacatctgcaaacacagattcccagctgaatgtatcggacagccttctgaatctgatccagaaaaacccgggaagcggaaacaatggctccggttcggatgaaaacggcggtcagggatccgatggtgacaagaataacgaaaatggaaatccggacaacaacggcggcaacaaaattccttcggacggtggacagcagaccacactgaatccgtcccagtccgaggcattatttaccaccagcctgaaagatggcgatgaagtgacggatccggagtatccgtttacgatcactttgacagaaaaaggaaaacagctgacactggtaagtatgacggtcacacagaatggcagcagccggatctgtaaaagccatgacagcctgaccttaaaagagggagcgaatacggtgtctgtcaccgtgcgtttccgtgacggaaaatacaatcagatcgatgcatccacaaaagtttacacgatctattatttcccggatcatgatgtacagctggaagtaaaaaatgcgagatccggtgcatacatctacgaccaggatcagctgacggtcatgcaggacagtctgtggatccaggtgagagcgagaaaggcttccggcggaaccatcagcgatgtgagtgtccgggtgcgtctgaacaacaagacacagaaagcagattccgacggaatttaccggatgaaacttaccctgggaaacaaccaggtgaaggtgaccgcgggagaaggaggaaacagtcagaggaccgtctcctttaccgtgaattataaagtcgatcagtttatggtcagttttgaaagttctgcaaagacagaaaagatatccaacaatccgggaatcggggataaggtgttcaaaggggttacaacgtttaaatatgcgtcaacatcggcggatttttctttccggatccgttgttccacggtgaccggagatgagcgtattgataagatccaggtgacgaaccgttacggaacactggatgtgacggatcaggcaggtgcggacggatatatcaatattacactggatgcctcccagtccaataatatccgggtgtactgtacggattctgacggtgaatcccagtggtatacctggtcggtgaactacgagcgtgttctggatccggaggaaaatcagaagaaagcgccggtgatccgtgcaaatattacgaatgagacggtccatgcagcactgtttatcgttccggtcaaagtgtttgactataacggcaacgaactgaaagccaatcagaatttccagctgtatctgaacggagaatatctggactatcacagccgggaacaggatggcacttacgaatacaacctgtatctgaccgagggagagaatacggttgttatccgggcggtggataatgaaggatatacggcggaaaagacatacaccgtaacactgaacccggtaaaagaagaggcgagagtccgtgtgatcgtatcggcggaagttatcggactgggaaccatgatcgacgagacggtcactacgaccgcagaccagacggtggcacagatcgtggaagaccggctggcagcttacggatatacgaccattcatgacggagtggcagattcggacagttatttcctgcgtcatatacagaaaccgggaattaacaacggatggaatatagcagatgatgagcggtcgctgctggatatgctgggatatgatctggcggaaggaccgaagagcaatgacagtctcggagaaaaagattttacggctggttccggatggatggtcacactgaaccattattacatcgcacagactatgggaaccagagcgatccgtgacggagatgagattcatctgatttatacactgagtgtgggaaaagatatcggcgtggatccgagtacaagtatttatggataaaggaaatacaggaggaaaaagatgaacaacagaacagatgcagtcatcaatgaaattgaaaaggttattatcggaaaaagagaagtcgtggaacgtgtgctgatggcgattttatcagagggacacattctgctggatgatgtaccgggtgtcggaaaaaccacactggcggttacctgctcggtggttatgggcgtgcagtatcagcgtatgcagtttacgccggatgttgtgccgtcggatatcgttggattctcggtgtacaacaaggcgaccggtggatttgactataagccgggtgtggttatgacgaatctgctgctggcagatgagatcaaccgtacttcgagtaaaacccagtcggcacttctggaggtcatggaggaaggtcaggtgaccgtagatggtgtcacccatccgcttccgaagccttttgtggttatcgccacacagaacccggtgggatcggcaggtacgcagctgcttccacaggcgcagttagaccgttttatgattcgtttgcagatgggatatccggactttaagagccaggtagatattctgcgtgaccgtcagaaagtgaatccgctggatcagattcagaaagtgatcggcggggaagatattattgccatgcagcaggaggtaaaggatatccatgtggaagatgcgattctggaatatgtcacctctctggcgatggcgacaagagaagatgagatgatccgtctgggtgtcagcccgcgaggtgcgctggcgatcgtgcggatggcgaaagcacatgcctatctggatggaagaaattatgtgacaccggaagatgtacagaaggtatttatcgatgtgtgtgcacatcgaatcatcctgaatccgaaggcgagagtggcggaactgtccgcggaggatattctgaaaaatgtaatgaaacgcacgaaatctccggacagtggacggtaacaggaggagcctatgaaaaagtccagagtaatatggggtttgtggctggttctggcggtgatcttctgcttcgtgacagatggagtgacaggatatctgttgctggcagtttcaatcgtattgccgctgctgtcgggaatcacgctttttgctgtccggggaaagatggatgtgcagctgacactggcagcttacggggagaaaggaaaggcagtgacaggaaagctgctggtaaagaaccgcagttttcttccggcggatcgtctgcggtgcagggtctgctgtgagaatctgctgaccggtgagaaagagtataccaatattcctgtggcagctccggcaagatccggggtggatacggaatttcagttaaaaagcagacatacgggtaaggtgagaatctcactgaaatccatggtatggtacgatctgttcggtctgttccgttcccggctttctttccggggagaggcgatggcagtcggtatgatcgcacccaatatatttccgatggaaacacagattgcctacggggaaagtaccaatatggacagcgatgagtattccatgaaaaaggcgggatatgatccgtcggaaacctttgcgatccgggaataccagccgggtgaccggatccgtcagatccactggaaactgacggagaagtttgacaatctgatggtaagggactacggtcttccgatccagaacacgatcctgctgttgctggaaaccggatacgcacaggacaaaccggatccggactgtatggatgcgctggcggaggcactgctctcggtatcacaggaacttgccagccagcaggtggtacacagtatcggatggcagaaccatgaagaaaatacgttctcctgtgtggaagtagagacggaggaagatctgaatctggtgcttccggaacttctgggagcagttcccggagaagaccggatgacggtggcagagcattatatggaaaatcgggaacagctggaatttgcccatatggtagtgttcactccggggcatgaagacagccttggcggactggcaagccagtgtatcgttaccgaagtgatctgtggttcggaaattgccggatatgatcagcaggacggtgttgcgatggtcggaggaggaccggacaacctgtcggaagcgatcgcttatcttgagatctaagttaggggcatgaaaaacatgaaaaataatgagaaaacacaggcatttgtgttgcagccttatccggcagcgcaggggaaaaagaatcaggtgacggcatttgtcgtggatctgtgctttatctggatgtacctggcggggctgacgatctggctggtttccgcgctgaacctgtcggtgaatacaggaatcgttctgttactggcggctgggatcacggttttgtggaaattggcagcagaggttggaaaaagtaaaaaatggatcctttttctggtatggggtgtgctccttgtactgacagcagcgatcggacagaaattgtggctgggaggcatgcatcagatctgcaacagtgcgatcgatgcactgggaagacggtttccgtatctgcttccctcttatggagttgccgtaacggacagtatgaaagtaccggctctttacggggcgatcggctggctcctgtttctggtggtgccgggagccggttatctggtagaaaaaggaaaccggatgtttctggggattcagatggcgggattggttctgcttcagatgatcacaggagtcggtcccggtcttaccggattcctctgttcctttttctgttttctggcagtctggatccggggacatgcggagagggtaacggctggaacacagagactggcaacggtggaaatgatcgttggagtcgctgttcttggcggcatcctgctgaccggcggttatgtactggcagaaaacgtgcttccacaggacggaacggttctttcacagtggaaagaagcgctcgtacagaaagtggaagattaccgatataaaggaagcagtaagatccttccggatggacagtttcagaatctttcttcgtttgaaccggaaaagaaagaagtgctgaaaatcacgatgagtcagccgcagtcctactaccttcgcggatttaccggaagtgtctacacggatgacggctgggaaggagaggacagcgcaaaactctgggagagcagagatctgttctactggctgcatcaggatgatttttacggacaggagatcctcggaaaagccgctacagccctggatgctgaggtggcagcagcggataaaaatacaattactgttgaaaatgtggcgggaaattcccactactgttatacaccatacgaactggctgatccgaccggtgatgcagtacagaatcttctggatacacagaagatcggggactgcgggatcctgaacggagaaatccggggagaaagaacgtatacctatcaggcgtatccggcactgatcacaaaatatccgtcctatacggcagcgcttctggacacggagcatctgggtgctgcggggaaggattatcagaagctggaagagtattataatgcatttgcctatgacaattatctggatatgccggatcagatgcagagagaatgtgcttccctccttggaagctatgagagaaaagacggggaaaagcatgcggattatgcggaagcaaaacagaacatcctgtatcttctgaccacagaatacacggacagtgacaaactggacgaaacgtggaacggagcagactttatctatgaatttctggaaatttcaaaaaaaggatattccgtgcatttcgccagtgcggcgacgatgatgttccgctattatggaatcccggcaagatatgtggaaggatatctggtaacaccgcaggatgctgaagccatgacggcgggagaaccgtatacactggatgacacccatgcacatgcctgggtggaatattatcaggacggtgtgggctggctgccgtttgagacgacaccttcttatctggatattatgaatcgggcagatgagtatcaggatatcagcggactttccggtggaggttcccagaagcagaatcagcaggacgaggaacaggagcaggaggaagaacaggacgaggagccggatcatatgatcgactggatccaggtgctgatcgtgcttctgatcatcggaatcgtgttactgcttctgacgatgctggtatttttgatctggatcctggttcagagaagaaagagcagacagttgaagaaacgattcacctcagaggatccgcgggaagcgatctgttcgatgtatgagtatacgatgaatattctgtcggcggcagggttgaagatccgcaatacctctttgtatcgttatgaaaagcagattacaaagatgtttgatgaggagacaggaaaagaatatcaccggatcgtagatatccgtcaggaagcggtctacagccggaacagtctgacggaagaacagaaacaggaaatgatggaattcaaggaaaagatctggaaaagaatctatgccaacggaacctggatacagaaaatgcagttaaaatacatttattttctgtaagggaaacagcaggcaggaggaagatatgaacagagaagagaagaatacacaaagaaaacgaaaaggaatgcgtatactggcagtgctgttgatggttgtcgtaacgatcacctcatttcctctgcttccggatgaagtacaggcggctgcggtagaacaggcatgggatggtgtcagccgggaaatcccccagatggatgaagatggtacctacctgatcggaaatggagccgaacttgcctggtttgcggatcaggtaaacagcggaaacggatcgatcaacgcaaagctgaccaattatatttatctgaaccgttacaacacttcgtacaaatgggtgatcatcggtgatacgacggaccatccgtaccgtggaaactttgacggtaacggacagaaagtggtgtatatgaatgcacagatcagcaaggaggatccggaccgccgttacgccggcctgtttggcgtaatcgacggcggaagtgttcgcaatctgaccgttctcggaaaagtatttcatggatatggaagctatgacagtgacggaagaaacgaccagttttacaccggaagcggcggcgtagccggatatctgaaaagcggaacgatcgtaaactgtgtcaactatacaagaacaacgatggatggcgatgccctctaccgaaatgccggaggaatcgccggtatctgtgagggtgtgatctcccggtgtgaaaactatggaaaactgtccacaacgatcgtgatcgcacagaaccacatcggaggaatcgtcggacttgtctccggtgcaaccgcacaggtcacgacttcgctgaaccacgcgacggtgcagggatattactgtgtgggaggaatcgccggtgcggtaaaaagcggtgcggaggttacggcatctgccaattatggtgcggtaaaaggaaattccattatcggaggagttgccggaaggatctccaccaccggtatgtacagcaacggaagcgcgaaagagtgtggcatctatgatgtctacaacctgggaacggtcagcggatacggaaccacagccggaagcgagatgggcggaatcgtcggagaagcgggatatgaaaactggaaacaggaagcgcttccgccgatgccggtgatcgagagagcctattcggtagccatcacacccggtgtgtcacgaaacggtgcagtcatcggatatctgctgagcggctgttacggaacggtctatggaatcacttccggtctgtacggtccgaacgtggtaggagcaacgaataaccgggcagtcaagatcctcggggaggcgcggacggtttcttcggatgagatgaagagcgtaacgcttctggaaaaactgggcaatgcatttaccatgtccaatgcatacgatacagacaatcagggttatccgaaactggtatggcagggactgccgtcggacattctggacaaagtggatgaagcacagctggaactcaacagctggatctcggaaaataacaagaagaaatatggaaaaaattacacccagatcgagtctcttgtgaaaacgtataaagaaaaactcggaacgatcacttccgaagaagaactggatgcggtcatggaagaggcaagggaaaaactgaaagcggtcagaccgggcgtcggacaggacacggaactggcagaagccatcgataacggtgtaattgctctggaagagtacaataagagactgttaaaagagaacccggaactgacggacagacagaaagcagagatggaaaatgtcctgaccacctggaagaaaaaactggagacagcgacttctgaagaggaagtacgaaccatggtgcgtgacggaaaagatgcgctggaagaacagctggcatcctttacggcagataagaaactggaagaagtccgggcaaatgcaacagagacactgacaaattacagagcaacagaaagttatgatgttgtctggatgcacaagatcaaactggtgcgggacaaggcactggaagcgatcgcaaaggcggaaacggtagcagaagtgaatagccttctggagcaggcgaaagaggatattgatgcggtgatcgatcagatccccgaggcaggcgcctgggacggagtctcaaagacggaaccggagacaaatgaaaacggtgtgttccagattaccagcggaagtgaacttgcctggtttgcggaacaggtcaatcaggggcataaagatctctgtgcggaactggtgaatgatatcagcctcggcggaaagaactggacaccgattggaaaatcggacgcacacccgtttgcgggaagttttgacggtatgggacatgtgatccgcggactgtatctggatgtggaagatacgtatgtgggtctgtttggaaaagtaaccggcggcagcggacagaagattcagaatctgacagtatccggaaatattccggttggaggaagagtcagctatgtagccggtattgtggcacgcgtagtcggagatgaggacagtgaggaccgggtggaaatcacaaactgtcacagcaatgtaagaatctgtgtgaccggtatccgtaccctggatgcaggtgtcggaggaattgccggacaggcagaatatgcaaaaatcagcaactgttccaacggtggaagtgtgaagattgcatcggagggaagaggaggacttacttattatacgggtggtatccttggtattggtgcttccggaagcaggatagaagcctgctgcaataccggagaaatctggtgtgcacatgcagccggcggactgatcggcggtgttaagggaagaaatccggtctgctattccagttacaatacggcagatgtctccggtctgtattatgctggtggactgtgtggtgtgatcctttcctcgtcgagtgatttcggctggtgttacacttccggagccgtgaatctgaaagattccggtcttgcactgggagctgtcttcggaaagatcacaggcagtgattttaaaaatctgttcgcgctgaaacgggcagatgtcatgggcagaaccctggtgggaagttccggtgatttctcagcgagcggtaagttcctgagtgagaaagaactgaagagtgatgagatcctgaacagtctgaacggcggcggaaactgctttattcacgattatctcggcttccgcaacggctatccgatgctgagctgggagatgacactggatgactttaagacgggatctgtcacagctttgaaaaattcggtacaggaatcggattatacggaagaaaactggacaaaggtacaggcgatcctcgaggacggtgccgcacagatacggaaagcagacagcatggaagcggtggatgcgatccggacacagacgctggctgccatcggtgaggtagagacaaaagcgggtacacaggagagaaaattacaggaagcaaaagatgaggcgatcgcggttttggaaaattatgtggatctcagtgtctaccgggaggaagaacaaagccagatccaggcactgatcgccaatgcgaagaaatacatccttctggcagattcgatcgaagaggtggaacggcacagagatgagacaagggcaaagatcgatcagatcccggatgcatggcagtattacgaacaggtcaatatggctgcggctacacaggtagacagttatatcatgaatatcggagaagtcatctatacctcgtatgtgaaaatctccatccagatcgcgagaaatgcctacgacagtctgacggatgaacagaaagcactggtaagtacctatcagatccttctggatgcggaagccgagtgggcacgcctggaagaggaaaataactttacagaagatgatatggaactggcagcacgggtggatgaactgatcgcagcgatcggaacggtaacggaggacagccaggaagcaattgcaacagcgagaaatgcctacgacagtctgacagacaaacagaagacgctggttgcacatccggagattctccagcaggcagaggaaacctataaccagctgaaagcatccgcggtcgcatctgcgatcgccggaatcggtgaggtgacactggacaagaaagaattgattttcggtattcaggatcagtatgatgcgcttaccgatcagcagaaagccctggtaaaagattatgacattctgaaacaggcaatcacaaaatataagaatctggttgtggtgcagccggtgatcgagcagatcagggaactcggcggtgtggagaatgtaacactggacagtaagacggcgatccaggcagcgatccaggtatataacagcctgaccggagatcagcaggaactggtgacaaattatgatgttctggaagccctggctgcggcgtatgattcgctggccgcggtggatcgtgtgatccggatgatcgatgcgatcggagtggtaagtcaggcgagcggttcacagatccagcaggcacgtgcagcctatgatgcactgaccgtggagcagcagaaacagatcaccaaccgttccacgctggaaagtgcagaagcggcttatgcggcactggaaaaaccacagactacggtagatacatccacagaccgtatcaaaggcaaccaggaatctctggagagcctgcaccgttcgggaagtggttcctctgcctcctcaaaaaatacagaaacgctggaagaagcaggtaaaaaaggaaaaaatcagtcaaagaagaaagatacagacgcaaaagccacagaggaaaacgaagaggcactggaagaagagcaggcagagacggaagattccagtcttccgtcctggctggcagatcagctggatgtgggagcacagagtgaagagacagagaatacccaggagacagaaaaaacaggaaaacatactacgctgctgttggttcttctgatcgtattcggagcctgtgtgatcctgacagccggatttgcagtggcactgtatcaggcttcaaagaaaagaaaagcaagtcaggtacattattaaaaagaggagaaaagaatgaagaaaagttgcggaaaaaaattatggagagcctgcgtcggcattttgctgacactggctgtctggatcacggcggcaccgtatgcggtcgcagcagagacaaccggagatgctaaaagtcaggcacaggagatccgtcagatccaggataacattgtttcctggaaagcaggaacggaaggagaaaaacagctgcttgtcggagatctgctggatggagcgggcagcccgggaagtgactggtatgcatttaccatcgcccgtatgggagaagagaaagagaatcaggcggcttatctgagccggctgcaggatgcagtagaaaacgtatatgccgatctggaagacagcaaaaccagatatcgtttatctgacattcacagaatggcacttaccgtcatggcctgtggtggtgatccggaaaacttcggaaccgatccggacggcaatcccatcaatctgatccgggataccgtatggaacagtctctggggtgatccgggagatcaggggatcaacggttatatctgggcacttctgaccatcgatgcaaaaaactatcaggaaccggaaggcgcagaatggaccagagacaaaattatcagtgaactgctctcaagacagctggcagacggaggttttggtctggtaaagaccgatccttccgatgtcgatctgacttcgatgacactgacagcactcgcaccttatcagggacaggacaaaacgtataccgttgtgaatatcgtaaccaatgaagaagaaacggttaccgtagatgaagtggcagagcaggcgtttgcctgcctgagcaagctgcagagcagtgacggaagtatgctgacgtatggtgcacgtacttcggaaagtaccagctgggcaatgcttgccctggcctcctggggaaaagatatctacacagatgaagattttatccaggacggcaacaacctgctggacggacagaaagcattcgctcttccggatggcggtatgatccacggactggacggcgatgaggaagaaacgaccggaaacaatatggcaggttatcaggcactgtatggtctggaagcggtataccgttacaaagagggacagaaccgtctgtttgacctgacggatgcagagaccgtttcagaagatgagatccaggcggcaggcgaaaaactcccggaactgaaagcgcaggatcaggcagatacaagatcgggagaagaagtagaagaggcggtaaataaccggacgctgtatctgacagctgccattgccgcagccgtggtacttgtggttgtgatcttcctggctgctcttttaaaagacggaaagaggaagaaaaaagcagcagaggcgatggatgatgatgatacagatgatgacgagtggtaaggacgaaggcagagaatgaaaaaaaatattcttatgatcgggttccttctgttgatggctgtgctttttctgaaaggaaccaaaattcagtcggtagacgagtattatctgacacacatggaagacatccaagaggattccgagacggtgacgatcagcatccgctgtgatacgctgcgtaagccggagaactggaagaaactgaagaaacagctgcaggatgaaaaatacgttccggaagatggtgtgatcctggatgagatgacctgcgtgctccgaaaaggggataccgttttcgatatcctcaaacgggcatgccgctacaatcagatccagatggaatacaacggaccggacaccaacgtatacagtaccgttatgatcagagggatcaactatctgtatgatttttcctgtggcgatctgtccggctggatgtacaaagtaaacggaaaatttcccggcaagggctgcagtggatacaaactaaaagataaagataagatcgaatgggtatacacctgcgaccttggaaaagatgtcggggatgactatcaggaaaaggcaaaaaagcagatggagcagttaaaagaatctgataaaaataaagatcagacagtggagaaggagggagaagcggaatgacgggatttggaagttttcatccggcagtattatttatctattacgtgctcgcactggtattttcgatgatcagtatgcatccgcttctggcacttgcatcgctgtgtggatcttttctgttttacgcttttttaaacggggggaggaaaacactctcccagttttttttctgcgcaggtatgtttgtgatcatggcggggatcaatgcgatgtatgtacataacggagagacgattctgtttttcatgaacgataatccgatcacactggaagcactgatctatggagcggtaagttctgtgatgctggtcagtgtgctgatgtggtgcagctgttacagcgtgatcctgacgacagacaagtttctgtatctgttcggcaagacggtaccgaagctgggtctgatcctttcgatggcttttcgaatgattccgctgtttcagcttcagtcaaagaagatccgacagtcacagaaatcgatgggattgtatgcgacggatgccgtggttgacaaggcgggcggaagtttccgggtttttgattccctgctgacctggtcgatggaaaatgcagtggacaccgcggatgccatgaaggcgagaggatacgggttaaagggacgaacgaatttttcgctctttcgttttcgaagaagagacgggattatgctgggcgtgatggctttctttacggcagtgattgtcggctgttttgcccttggaggattttcattttattattatccgtatgtagcaaagatgcagaccacaccggtggcgatcgtcggatatgcagcggtatttttatttttactactgccgggcgcagtggagggagagaggaaaatgtcatggcattactggaagtcaaaaatctgagttttacatatccacggcagccgaaagatacgacagagccaaaaccggcgctttccggtgtatcgctggatatccggaggggagagtttatggtgctgtgcggggcatcaggctgtggaaaaagtacgctgctgcggcttttgaaacgggaacttgcaccggaaggagaaaaaagcggagagatcatcttctgcggaaaggaacagagcacactctcagagagggaagctgcctgtgagatcggatatgtattacagaatccggagaaccagatcgtgacggacaaggtctggcatgaactggctttcggtctggaaaatatgggagtaccgacaccggtgatccgcagaagagtggcagagatggcatgctttttcggcatcgatgactggtttcggaaaaagacgacagagttgtccggtggtcagaaacaattgctgaatcttgcatcgattctttccatgcagccaaaactgctgatcctggatgagccgaccagccagctggatccgattgcagcttcggactttatccatacgctgtcaaagatcaacaaagaactgggactgacgattcttttaacggagcatcggctggaagaagtatttccactggcagatcgggtagccgtgatggatcagggaaaactcctttttgtggagtcgccgagacaggcgggacatgaactgaaaaaattcgatcccaaccatcggatgcttctgggactgccaagtgcggtaagaatctaccagggactggatgcggaggatgtgacctgtccgctgacggtccgggatggcagaaattttatcgaggaaaattataacaataccattaccagactggagagggagccggagaaaaaagaagaaaaagaccgaccgatcgccatgcggatgaaagacatctgtttccggtatgaaaaagaggagccggatgtgctggaccatgtggcgctgacgctgtatgagggggaagtggtaagcctcctcggtggaaacggtgcgggaaaaaccacgctgttaagtgtgatctccggcacgaaccgtccgtattacggaaaaattgaagtgtttggaaaacgactgcagaagtacaggggaaaagaactgtatatccgaaaacttgcatcactgccgcagaacccgcagacggtatttctgaagatgaccgtgcgggaagattatgaggaacttgcgaaagttctgggatgtaaaaaatcagagctggaagataagattcaggcggtggcacagcagcttgagatcacgcatcttctggatcgtcatccgtatgatctgagcggaggagagcagcagagagcggcgatcggcaaggtgcttcttctggaaccgagactgttgctcctagatgagcctacgaaggggattgatgcctggtcgaagcggcagctgggaaatctgctgaaagatctgcgcggacaggggatcacggttctgatggttacgcatgatgtggaatttgcagcggaagtttctgaccggtgcgggctgtttttcgatcatgagatcacatcggtggataccccggaagaatttttctgtaacaacaattactatacgactgcggcaaaccggatctcgcggcagcagtatgaaaatgctattacctgtgaggaggtgatcgaactgtgcagacagaacggaaggaaatctattcgataagacgggaatttggctggctgtttctggtggctggtgtggcgggaatcgttttcatgggtgtacttttattccggcagaggcggtataatctgatctcggctgtgatcacgttgttcgcttgtctgccgttctattttgcctacgagaaacgggagggcagtatccgccggatggtgatgctggcggtgatgacggcgatgacggtaaccggacggtgtgtgtttgcgccggttccttattttaaaccgacgatttcaatcgtgatcctgtccgggctttatatgggaccggaagccggttttctggtaggatcgctgtccgcggtaatctccaatattttcttcggacagggaccctggacaccgtttcagatgctgacctggggaattatcgccatgattccggggcttccgattttccgaaaaacactccggcaccggattccgctggttttatatggaatcttcgcagggatggcatattcctggctgatggatatctggacggcgatcagctggtacggatcctttacctgggagggttaccgggcagcgctgatctctgcgattccggttgttgtggtatactgtatctcgaatgttatatttctgatgattctgttaaagccgatcggagaaaaactggaacggattcagatcaaacatgggattttctgataaaagaatgggggagaacataatgatttatgtcagtcatctgctacgggatgaagagatgaaagaactggtggaagaattgcaggtgggggtggaaagcattgagttttccatctccgagaatttggatcatctctctgaatatatcaaaacgtacagaaagcgtttacaatttatcggaaccagggagcttacgcttcacggtccgtttctggatctgaacccggttgcatatgattcccgggtgcggcgggtgacgatggagcggtttatccagtgctacgaggcggcacaggaactgggtgcaaagaagatcgtctaccatacttgttaccatccgggcatctattttctgatcggctgggcggaacgtatggaggaattttttcatgaatttcttgcggatcgaaaagatatttccatcgttctggaaaatgtcttcgaccgggaatgggaaccgatcctggaggtcaaacagaggctcccggaaccaaacttttccctgtgcctggacatcggtcacgcccactgcatgtctccacatccggtagaagaatgggcgcagaaactggcaggagagatcacccatctccacgttcacgacaaccacggagaacgggacgaacaccttggcctgggaaaaggaaccatcccggtgcgggaggtgctgaagaactttcaggggagagaggactgcacatatacgatcgaatgtaatacaaaagaagatgtacggatgtcctgcaggatgctgcgggagattctgtgaataagtgtaaaggctttgctgacagacgaaaaagggagaaatccccggtggtcagcaaagcttttttgtttgtgcgggggaggggtaagaagaaaatatcaatggacaataccggagggatatgctaggataaaaccaagcatagtatttcatttcagagaatttcaaatcaaatctaaaaaatcaaaattccaaatcaggaaatatctccatgcttaattaaaaattgaaaaatagcagagagatgaagcatgtctgtatgtagaaggattcgttctgagaatctggttatattcttttggtcctatataagaaaagaaagttgcagctgtgaaagggtggaacagttgcagaacaatatacacaagtaagcatatacatgagaaaatctcctgcgtaaaaaggaggttttgtgtgggaaacacagatgtggtaacaaaaaattatatgaggcagaatacggtgtttgcggacgcctgtaattatctgatctatggcggaagaaatatcgtagatccggaaaaactgacagagctggatccaacggaacttggcgtcctgtttgaaacggacagttctgtgcgcgatatggataaaccggaaacgatccagaaataccgggatgttctgaaatcagcagtgattatgcaggatgaccgggcagcgtatctgatcattggtatcgaaaatcagacggatatccattacgccatgccggtgagaaacatgatctatgatgcgttgcagtatggaaaacaggtcgacgagacatcaaggaagaaccagaaagagaagatgaaaaaaccacgcaaccgtggagagtatctgtccggcttctacaaagaagataaactgatcccggtgatcacgtttgtgatccacttcggagcatacgaatgggacggaccaatgtcgatcaaagaaatgatggatccgcaggatgagacgttgctggaatatattcaggattaccggattcatttgatcgatccggctcgactgacggaggaagaacttgggaagttcaggagcagtttacgggaaatattgagctgtgtgaaatattcgaaagacaaagaaaaactgaaagagtatttacatgccagttcacgaatcccggatctggatatttctgcaaatttggttttgaaaagtattataggactgccaacgaatatgaaaacaggaaaggagaaatttaatatgtgtaaagcaatagatgactggatagaagaggaaagaaatgagggaaaaagtgcaaactaaatgtcagtatatcatgatatcatattttcaacagaataaaagaaaacacgctgatgtgaatagagtcctgtaaaatgtggaaaaatccagttcgaactttggtaaatgtggacaatgtgtgtgcaggacaggttgtagagaagaccggaacatgataagataggaaacacagaagagatattataatcatgtggcaacaaacagagaaaagaggaattatcattatgaaatacaattctgtcctggacttacacactcatacaatcgtcagcggacacgcgtactccacgttaagagagatggcaaaggcagcctccgataaagggctggaacttcttggaatcacggaacatgcaccgaagatgccgggaacctgtcatctgttttattttgacaatctgcggatcgtgccgagagaactgtacggcatcgagctggtgctggggtctgaggtcaatattctggatgcgaaaggaaccgtagatcttccgcagaagacgatggaaaaactggatatcatcattgccagcctgcatactccgtgcatggagccgggaagccgtcaggagaacacggaggcctatctgaatgtgatgaagaacccgtgtgtcaacatcatcggtcacccggatgacggaagatatgaggtggactatgaagcgctggtacagggagcaaaagaatacggaaagatcctggaactgaacaatcattccatggatccggattgtagccgttccaacgcggtcgagaacgacacgatcatgttaaactactgcaaaaaatatcaggtaccgatcgtgatggacagcgatgctcactttgatacattgatcggggaattcgatatggcaagagaactgctgacaaaactggactttccggaagaactggtgctgaaccgctcggcagaagaagtgaaaaaatatctgaagaagtaaaatttacagactttacaaatacaaacgtatatgctacgataaactatagtcataaacaaaaacaccgtgacgaagagagtacatgcacgactgtcattacagagaattcccggaggctgagagggaagtgacaaggtgaatggaagatggcttctgagaggcgcaccgagccggaaggttaggctgcgacaggatccgcctgttatagcggcagagtatagaaaagtacttggtgaggtttctttcgtgaggaagagacgaaaaggagtggtaacacggttaatatccgtcttcttacaggaaatgtaagaaggcggtttttttgcattgcatatcgataattggttcagtggaccaatttggattacgcgagcaacgagccaaagtccgtgcctgcacgggaccttggcggctgtcatgatagaaaaaggaggaacaaacaatggcaaaagaaaaattttatatgacaacggcgattgcctacacatccggcaaaccccatatcggtaatacctacgagattgtactggcagacagtatcgcccgcttcaaaagacagcagggatacgatgtattcttccagaccggtacggatgagcacggtcagaagatcgagctgaaagccgaagaagcaggcatcacaccgaaggaatatgtagacaacgtatccacagagatcaagagaatctgggatctgatgaatacatcttatgacaaatttatccgtaccacagatgattatcatgaaaaacaggtacagaagattttcaaaaagctgtacgatcagggagatatctacaaaggacattacgaaggaatgtactgtaccccgtgcgaatccttcttcacggagtctcagctggtagacggaaaatgtccggactgcggacgtccgtgtacaccggcaaaagaagaagcatatttctttaaaatgagtaaatacgctccgcgcctgatcaaatatattaacgaacatccgaagttcatccagccggtatccagaaagaacgagatgatgaacaatttcctgcttcctggactgcaggatctgtgtgtatcccgtacttccttcagctggggtataccggtagactttgatccgaaacatgtaacttatgtatggctggatgcgctgaccaactacatcaccggtatcggctatgactgcgacggcaacagttccgaactgttcaacaaaaactggccggcagacctgcatttgatcggtaaagatatcatccgtttccataccatctactggccgatcttcctgatggcactggatctgccgctgccaaaacaggtatttggtcatccgtggctgctgcagggcgatggcaagatgagtaaatccaaaggaaatgtaatctacgcggatgatctggtagatttcttcggagtagatgcggttcgttactttgtactgcatgagatgccgtttgaaaatgatggcgtgatcacctgggaactgatggtagagagactgaactccgatctggcaaatactctgggtaatctggtgaaccgtactatttccatgtccaacaaatatttcggtggcgtggtaaccaaaacaggcgtaacagaagaagtagatgaagatctgaaggcagtagttacaggaaccaaagcaaaagtagctgccaagatggaagatttgcgtgtggcagactctatcacagaaatcttcaacctgttcaaacgctgcaacaaatacatcgatgagaccatgccgtgggcactggcaaaagacgaagagaagaaagaccgtctggcagaagttctgtacaacctggtagaaagtatcaccatcggtgcttctctgctggaatccttcatgccggaaaccacagaaaagatcctggctcagttaaacggagaaaagagatcttacgaagaactggatcagttcggtctgtatccgtcaggaaataaagtaacagacaaaccggagatcctgttccagcgtctggatctgaaagaaattctggaaaaagtggaagccatgaaagctgcacaggcaaaaccggaagtaccggaagagccggtggttgatatcgatgcaaaagaagagatcaccttcgatgatttcggaaaaatgcagttccaggttggtgagatcatcgcctgcgaagaagtgaaaaaatcaagaaaactgctttgctctcaggtgaagatcggcagccaggtaaaacagatcgtatccggtatcaaaggacactataccgcagaagagatggtaggaaagaaagtcatggttctggtgaacctgaaacctgcaaaactggcaggcgtactttctgaaggtatgctgttatgtgcagaagatgcggacggaaacctctctttgatggttccggaaaagaagatgcctgcaggcgcagagatctgctagaaagagtgaatcgacatgatatttgaaagtcatgcacattatgatgatgaggcctttgacgaagatcgaaaagaactgctggatgccctgcctgcgcagggcatcggcagagtgatcaatgtatgcgcggaagtagaaggctgggatcgtaccgtggatctgatggagcgctatccgtatatttacggtgcggtgggtgttcatcccgatgatgtgggtgcgctcgatgaagagaagatccagcggatgcatcagatctgccggatggaaaaaacggtggctgtaggagagatcggtctggactattactgggataaagaaaaccacgaaaaacagatctactggtttgagcggcagctggaagtggcgagagaagaaaaactcccgtttatcattcacagccgtgacgctgcaaaagatacgctggatacgatgaaacggcttcacgccggggatatcgggggtgtggtacactgcttttcttacggaaaagagatggcgcgggaatacctggatatggggctttccctcggtatcggcggtgtactgacctttaagaatgcaaggaagctggtggaagtcgtagaatacgctccactggagtctctgttattagagaccgacagcccatatctggccccggttccgaaccgtggaaaacggaactcttcgctgaatattccgtatgtggtggaaaagatcgccgagattaagggcgtgtcgcaggaagaggtagaagaagtcacctggaagaacagtttccgggtcttcggaaaagtgaaataaattgttatacaaaaaacagaaaacggatacagaatggtgaaaaatcatttctgtatccgttttttgaacaagataaagtgagaaggtggctgtttccaaaatgaaaatatccactccacacggtagatgtgattctttatgcgttcgtattggctgtcagcgcttttttcttccagtttcctctcttatagaagaggaatgtcagcagcgcacccatacaccagcaaaccagcagagagatccagagcacctgatatcttccgtttggaagttccggggttctggtgaggaaagcaagaccgtaagccagaggcacacggatcacaacggtggtgatcatagagatccacatgggggtcatggtgtcacctgctccacgcatgacgccggagagggactgggtgatggccatggcaaggtagccaacggcgagtatcttcatcatgttggcactgagagttaccagttccgaagtatcggtaaagattgccatcaggtttttgccgaagaccaggatcagaagagtgatcaccgcggaggttcccagtgcaatggcggttccctgacgggctccctgctccacacggtccatgcgatgtgcgcccacattctgtcctgcgtaggtagtcatggcagttccgaaagagaagttcggcatcattgcaaaaccatccacacgcatgatgatcacgttggctgcgatgaccatctcaccgaagctgttggtcagagactgtacgataaccatggccatggaaaagatggcctgggtgataccggagggaagtcccagccggatgatctccagtgtgtatttctttttcatcttcagatggcggaatttgaaatcaaagatatcggtcatccgcagcagtttccagaaacagagtatagcggatactgcctgtgcgatgacggttgcataggcgacaccggcgacacccatctgaaagcgggaaacgaagacgatatccagaatgatattcaggacagttgccaccagaagatagatcagtgccgagatagaatcgccgagtccgcgaagaattccacagaggatattataataggcacttcccatgcagccaaccatcagaatgaccagataagaggtacaccagtcaatgatggaatcaggcgtatggagcatctccagaagcggccgcgagagaacggctcccagaaacataatgatcagggaagaaattgcggtcagtgtgacgcagttaccgatcgtcatggacagctcttcccgttgtcttgcaccaaaatactgagataccataacgccggcacctacggagattcctacaaaaagtaccagaagcaggttcaggatcgggctggcgcttcctactgccgccagggcgttgtcgcccacgtattttccgatgacaatactgtctacggtgttgtaaagctgctgagcgatattgccgatcagcatggggattgtaaaaattacaatcttctcccagggttttcccgccgtcatatcggacggcgcgaaaagttctttgatggtcataagtgctatactcctttttggtgtaaaattttgccagataccggtattgtgtaaaactggctctcttcatactcatagtataactcgttataaggtggaagaccaaacgttttttggtagatattcaaaaaaatgaatattgacaaggagacagggattattgtacaatcaaacctaattaaaaggagtaacctatgtttggaaatctgcgtttgtagtgtcgtcagtacggtggagccatccggtacttcaggaaaatggtgagacttttattgcagtatttgatatgcaataagagtttttttattttaccggaaattgctatcctttgttctgtgatttttgtaactatctaactatccggaaaaattcaaggaatacatataaggcaaaaggaggaggaagatattggatttaagtaatttatctattaaaaaaatacgggagcttattgtgtttacagcacttcttgttgttgccctgtggaagtttgatgtagtgcttgatgtgctgaaaacaatagggcagattatatttccgtttatacttggcggagcgattgtatttgtgatcaacgtgccaatgagttttttggaaaagaaaatttttgaaaatgtaaaaaaagaaaataaggcagcgagaaaactggcaagaccggtcagcctgcttctcacgatcgtattggtggttggcgtgatcgcactggtgatgattggcgtgattcctcagcttacgaagacaatgggaagtttgatgataaatatcacagattttattccgcagattaaaatctggatccgcgatttttttcatgataaccgggaaattatgaagttggtagatcaggtgcagtttaaaccggatcaggcaatcaggtggggaataagtctgcttggaaatggtgcggggaacatgatgaatacaacaatgtcagcggtgggatccgtagtcagcggactggcaacctttttcattgctttttcctttgcctgctatgtcctttttcagaaagaaaagctgcatgtacagatcagaaaagtactttttgcttttcttccaaaacaaaaagcagatgcatttcttaaagtctgttctctgacgtatcggacattcgcaaactttcttacaggccagtgtctggaagctgtgattctcggctgtatgtttgttgttacgctgagcattttgagaatgccgtatgcacttttgatcggagttctgattgcatttacagcattgattcctatttttggtgcttttatcgggtgtgccgtaggaagttttttaatctttatggtaagcccgaagcaggcaattatattcataatagtatttctggtgctgcagcagattgagggaaatctgatttatcctcatgttgtcggagaatctgtagggcttccgtcaatctgggtgctggcagcagttaccatcggcggaaatcttatggggattgtaggaatgcttgtttttattccgctgctgtcagtggtctatactatttttcggaaagttgtgtatcagcgcctgaaaaaacgacatattaaacaggtgacagcgacagatatagaggaatatacagaaaaagaaactgccagtacggaaaaaaatataaagaattaaatttgggtctttattaacagaaaaatggaaagcagagggagataatcacagcgtctggctatgattatctccctctgtttttcgtaacctgaaaggattctacaccgtatccgccagctccatggtgcctcttgcttataaagaaggtgttattaccggaatggaatttctctggtctcatggtgcggtgatacaggcgggagaattccgtcatggacctctggagattgtagaatccggtgttccgtttttgtttttggttcctacagattcctccagagtgattacacagagagcgcttaagtttgttgagaagtggaaggggacagcaattgttctggattatgcaggctttgctatgggacttcatgatgatctggcaccgttcgttatgtttgtaccgctggaatggttctgctattatttttcgatagtaagagatcataatccggatgaccgcagatgttgaatattgatcaggtaaacaaatttactaaagacgaaaaaaatggactgttttgtgataaaacagtccattttctttatgtaaatttactaaataacaggtatgataaattatataaaagtgataaaaatatgtattatacacaaaaaaacagaagaataaccaattatattgttgacaaatcctattatttcaagtaatgtgatggtataaggaatgaaaataaatttactaaacaaaaagaaatattaactaaattacatcggagataaatgtacagtcagacgatgtgatttaattaatcgagaggtgggaatatggctaccatacgagatgtcgcccggagggccggggtatctgcagcatctgtatccagagttctgaaaaatgacactaccttttctgtatctcagaagacaagggaaaggattttggaggcggcaggcgaactgggatacaacaaatgttttgaatactcagccattcaaggtacaagaggaaccataggagttaggcttttgtatggcgaggaagaagaagtggaagataaattttatcagattatccgcgtgaatataaagatggaacttgaaaaaaacggatttaaagtaaaagaggtctttgaatctatgctggatgccaacgcatcgaagatatccgattatcagggtttgatctttgtaggatattccacactctggtatcaaaagaaggtgttcagacaggttgttcagggaaagttgccctgaataaaagtagaaaggggaaagatatggaatacgtatacaaacacatggattggagtaacgtagaggtccttggaagaaatcgtcttccggtcagaccgttttattgtggttatccgaataaggaatcggcaagacagggaagaagagaagaatgttccaattaccgtctgttgaacgggcagtggaaatttgcttattatgagtcaccgttttatgttcctgacacatgtatggagaaggaatatgacgatcgggagtttggtatgatgccggttcccggacactggcagctgaatggttatgattatccacattataatgatgcgatagcattgttcccgattctggacgacccgggcatacaggcagacaatcctacgggtgtttaccggtacacttttcaggaggagaaacaaaaagacagggaatatatcctgaggtttgacggagttgaaagtgcttatcacgtatggctcaacggtacattcataggatacagccaggggcctcgtaacacagctgaatttgatgtgacagaagcattacaggatggggaaaacgtgctggcggtgatcgtctacaaattcagtgatggcagttatctggaaaatcaggatatgtggtggtttgccggaattatcagagatgtatctatgatccggagaccgaaacatcatatgctggactggcggatcgtatctgatctggttatggaacagaatgagacgaccggaaagatttgcctggatgcagtgtttgaaaatcatacggaggatgagacggcgcttactgttgagatggaagtaatggacggcgaacaggtcatcttcagtgaaagccgtgagataagtggtaaaaaaggcgagacagaatatgtgacagaggtaattctggagaatataaaaccctggtcagcagaataccctgagttatatcgggtgatccttaccctgaagaaacagggagaagttctggaatcctatggagagtggacaggattcagaaatatttgtgtaaaagacggattattcctggtaaatggaaaggctatcaaattaaaaggagtaaaccgacatgactggaatgaaaatacaggacgatgcattacaaaagaggatatgctggctgatctgtatctgatgaaacagaacaatatcaatgcagtacgaacctcgcattacccgccacatcctgattttctggatatgtgtgaccgtcttggactttatgtgatggaggaagctgatctggagtgtaaccagatggcttataccaaaaacatgaataagatcagtgatgatacgatctgggaaaaaagctatgtggatcgtgcggaacgtatggtaagaagggataagaaccatccaagtattctgttttggtcactgggaaacgaatcaggattcggaagcagctttgtagccagcggaagatttgtaaaagagtatgatccaaccagactggttcattacgaggaagacagggatgcttctatagctgatgtgtacagtactatgtataccagacataaggcattggaaaacctgggaagagacactgcaaagaagaaacctcatgtagtatgcgagtacgcacatgcaatgggaaatggcccgggaggattaaaagaatactgggaaatatttgaacgatatccaagactgcagggcggttttatctgggagtgggttgatcacggtattaaaaaatatgacggcaacggcaaagcttactatacatatggcggagattacggggattatccaaacagtggggcattttgttgtgatggactgatccaggcagacagaagaccgacgccaggtattttacaggtgaaaaaagtaatggagccggtaacatttatcgattttgataaaaccacaggtgaaattacagtttgcaataaatatgattttactgacctgtctcatcttgaaggtacattcaaggttcatacactgcagggaattctgctggaaggtaaggtggatctgagtgaggtagcaccacatagatgcaaacgcatcatggtatatgattctgcagagtcaggagcatggtgcgatgaacaggatatctggctgacgatcaccgtatgttacaaagaaaaacagatctggtctgaggaagctcatcatgaggttgcgttccatcaggaatgtctcaataaagcagttcggaagacagtgaaagagccggcagataacggaaactccggagaactgcatatggtggaaaaatcaggaattatttatgtggaaggccagaattttactgccgagtttgaccgggttcatggatatttaagtggttatacattgaatggcgaacggttaatctgcaaaggactggggctgaacttctggagagcacctgttgacaatgacaagaatgtggctgaaatctgggaaaaagcgatgttgaaagccatgacaaaccttgttgaaaaggtgacggtagaggagaagaaacaggaagtggttatctccgtttcacagatctatgcaccgataacggttgactggaaaatcattgtgaaggctgaatatcacattcaggcagatggtcttataaccatgagttatcacggagtgccaaccggtgtgcagcttccggagagttttccgcggattggtatgcggtttgtgctggataaagcctgtgaacaggcagtctggtacggaagaggacctctggaaacatatccggactgtaaagaaggcaacgcgataggctgctgggagaagaacgtggaagatttctatttcccttatgtactgcctcaggagacaggtaatcatgaggatactcgctgggctgcgtttgtgacagaggcgggtaatggaatctgtatcgcatcggataaagaattctcttttggagcattacattatacacaggaaaacctgacacaggcgacacatacaaatgaacttcacagaacggaaaatatccaattatctgtggattatgcacagcatggtctgggaagtgcaagctggggtgccgagtgtctggaaaaagataaactgtatccggaaccgtttacatttacctggaagattttcggaaccgggaaggaatcgctggcagagcgggccgagcaatgcagaagaaagtaagaaaggaagggaaaagatgggaggaggaaatgaaagccaaattcggcaaatagaagcatagtcatatttataaacaaagcataataaaacgggtgtctgaagtatattcaaacacccgttttaaaaaggatggaggtttctgtgtacggaaaaaaagttataaaacgagatatttatcaaatcattattccgatgatactggaaaacatacttcagatttcggcaaacctggtaatcacggcaatggttggacggttgcttgcaaatgacatttccgcacaggggatctgtatccggattacggatacattatggtgtttttataagggagtggcaattggggctacggttttgatcgcccgggcatacggtgcgggcagacatcaggattgcaggaagattgcggagcagaccatacttacggaaatgatcattgtgtttgtttttcaggtggtgttatactttaaggcaccgctttttcttggatttttttcaaaggatccccagatcctctctctggcagaggggtatatgaagactattatattcgaattcccgtttgtggtgatcacgacggtggttacagcctctttccagggatacggcaatacaaagattcctatgtatattgcggttcttatgaatgtggtcaatattgtctgtggttactgttttatctttggtgctttcggtattccgggcatgggaataaaaggtgcggctaccgctcttttgacggcacaggcagttggtgcaggtacaggactgtaccttttatataaaaagaagggtggactgtttcgaaaagtaccatctgagcatagatttttcagttttgataagaaatgtatctatgaaatctatactacaggaattccggcagcattggaaactgtattctggcaggtttctgctatcattttgagtaaagtgatattattctacggaaaccaggcgtttgccgcatatcagctgggtatacaggcagaggaaattacggagatgccggccattggttttagcacggcatccactacactggcagccagagcaattggtatgcaggatgaggaactgcgaaaagtttactttaaagagcagctgaaagtgggagtatttatcagctcgataacttcggtgctgctgattttcctcccgcggttctttatgactctgatgacggacaaaccggaattgcaggctataggtgttgtatatgtgttcgttatgggattcatccagatacctcagaatctgtccaggatctacaatggaaccatccgagctatggggtataagaatgcgcctatgctggtagcgggatttggcatatggatcgtaaggattcctctgtgcatgctggctgcttatgtgttaaggctgccgttgacaataatctggattattattgcgatggatcaggtgtccagattcctgctcagtgtaggattgtattatcggatcaacaaaaagcgtgagcagacgatgaacgcggtatagaatgggaaaagggagtaagaatacatatgaacagagaatttttatatgaattactggaaacagcatcggtttccggtttcgaggaagagattcagagaaaagttataaagtatgcaagaggatttgcggatgagatctacacggatgaaattgccgatgtggtaagtattgtaaatccggatgcagagatcaaggttatgctgtcggcacatatggatgagattggtctcatggtatcgcatattacggagaaaggaatgctccacgtatccaaggcgggtggtatttatccgggaacttatcttggacagaaagtcagaattatgcatgaaggaaatgtggtttacggcgcagtccgaaaccatggctctctgaataagaaagagttggaaattacagatatcatcatcgatatcggtgctgtttccagggaagatgccatggctcatgtggcctgtggtgattcggtgagctttgacacggattacagagaacttttaaatgacagactttgtgcaagaggccttgatgaccgtctgggaggatatattatcctggaggctgcgaaaaaggccaaggaaagagggggcacatgtggaatttatgcggcaactactgtaggggaagaactgacaaagcacggagctgcccggaatgtacatataaaatatcagtgggaggacggatgtggaagaacctgtacggacgcagatgctattcatatggcaggcagggggatacctacaacagttatgtccataccttttcgctatatgcataatccggcagaagtgtgcagtatggaggatgtgcagggatgtattgacgtgcttgcggaatttttatgtggaatcgggtctgatatttgcctgaaacctctgaaaggataaggtgatttatgaaaaaatatatggcgattgccggattggtattagttactgttatctggggaggaggatttgtggccagtgacatggctcttgacagtctgtcgccttttcagatcatgaccattcgttttctgttggcttccgtgcttatgggtgggataagtatccgaaatcttaaaggaataaaaaaagaggaagtaactgcaggagtttttatgggcgcagctctttttattgggttttctcttcagatcataggactgcagtatacgactccgtcaaagaatgcgttcctcacagccacaaatgtggtgattgttccttttattgcttttctgatctgccggaaaaaagtaggattcagaggtataataggagcagtgctggccatcgtgggggtgggacttttgtccctggataaagatctgtccctgggactgggtgacggactgacccttatatgtgcagtgggctttgcttttcagatttttctgacaagcatctttgtgaaaaagtacagggcatctgtgttgaactttattcagatgtgtacggcaggtattttatcattgatattcatgattgcctccgggcaggtgcattttcaggttactgcaaaaggatggtggagtgttctctatctcggcattatcagcacaacggtctgttatcttcttcagacagcatgccagaagtatgtggatgagacaaaggcggcaatcattctgtctatggagtctgtcttcggaaccttgttctcggttatgattcttcatgaaagtattacattgcgcatgatattgggatgtgccattattctggcggcggttattctggcgaattcagccacggaggagacaacggcataaggacagcgtcgtgtaattgttcagtaccttcacagttacagcgccgtaacaattcgttgcgtggttgggggcaatatggtaagataaaccatgaaatgcactgacatagctgatgcgattcgaaaaatattgaaaagtatcatgcagagagggatttaagatggctacaataaaagatatcgcagagcgtaccggtttttccgcagcgacagtctccagagttttgaaccacgatgagacgttgaatgtgcaggatgagaccagaatgaaaatatttgatactgccagggaacttcagtatcaggcaagggaaagaaaaagcaggaagcgacacctgacggttggggtttattattcttattccagagaggaggagctgagagatacttattatctgacagtccgtctggcggtagaaaaaaaactagaggcagagaatatggaacgctgtcagatccagaatctggaggagctgaagaatcttggaggactcgatggccttttgtgccttggaacgttcagtaagagcatggtaaggcagatagaagccttcaaaaagcctacagtatttctggatgctatgccaaaaggagatcagtttgattgcgtagtcaacgatctggacagttctgtggaagcggtgatggattatctgacaggactgggacataaaaagatagcatttattggcggctatgaagtcgacaaggatggtgaggaagtgcatgatgaacgaatggtaacttacaaaaaatatatggagcgaatcggtgaattctctccggcacttgtgcgggtgggaagcttcacgccggaggacggttatgtgctgtgcagggaaatccttgaagggaaggagaaacctacagcgatatttgcaaataatgactctctggcagtgggctgttatcgggcagtcagtgaaaagggactccggattccggaggatgtgagtattgtgggatataatgatatagcggtggcaaactatctggttccgccgctgactacagtgcgcctgcatatggaattattgggtgaggaggcggttcgccttcttcgtgaacgcatcacatcctccagggagatagggttaaaagtgatcgtacctgcgaagcttattgtacgtggcagcgcagacagggtaaaataaaaagcgaagcgatgtattaattaaaaaagacaaaaaatatatttgacagaacagaaaaaaataattatacttgggttgtcaaataaatagaaccggggagcttatgtgataggctgagaggaagttgaaaacttcgacccatatacctgatttggataatgccaacgtaggaacgttatgtaagagagtctgtaactgtgaagatacagaaaaattacgacagatttaacgggagatactttggtatctccttttttacgcgaatccaggtataaaagaatgagattgagcgagagttcatgaaggggcgcaccaccgagggtacgtttttttgtggactctttttttgcttcaaggaggtgagatgcaggtgatcaaagtaaacggaaaagaaatcgaactggagaaggcaacttctgtagaagtgtatcttgaaagtgcaggataccagatgaagcggattgcagtagaactgaatggcgagatccttcctaaaaatgagtatgcggacaggatgttagaagacggagactgcatggaggtggtaacatttgtaggaggaggctgaaaatggagacaacgaaggttttgacaaaagaggaaatacaggttgcacttgaagaacgtcattcaccggaaaagcaaaagaaactgtccgaaggccgggtgacgatcgcaggtctcggaggtctgggatccaacgtggcatatgcacttgcgcgtatcggcgtgggccatcttcatcttattgattttgacgtggtggatattacgaatctgaaccggcagcagtattttacagaacatatcggtatgtacaaaacagatgctttaaagtctctgcttcaaaagattaatccgtatatcgatattcagacggattgcatcaaagtgacagaagagaatctgatttcactttttgagaatgcaggaattatatgtgaagcatttgacaatccggaggcaaaagccatgcttgtaaatggaattttggagcattttccggagaaaaaactggtgtccgcatccggaatggccgggtatggaagcagcaatacaattcgtacccagcgattgatgaaaaacttctatctttgcggggatcaggttacggaaccgacctatggcaacggattgatggcaccgcgggttgcgatctgcgcagcccatgaagccaatatgatcacccgtttgctgcttggagaagaagaaatatagcagctattcagcagacattgtgaaaacagtgaaccattacgaagtataaagaatacaggtaactattcagcagatattaagtagacaatgaacagttacgaagaaggagaaataaacttatgagtacaaaagatacatggagccttggaggacatgaatttacatcaagatttatcttaggatcaggaaaattttctttggatcttgtgaaagcctgcattgaaaaagcagacgcacagatcatcacactggcacttcgccgtgcaaacgaaggaggacttgccaatattttggattacattccggagaatgtaaccctgcttccgaatacatccggagcgagaaatgcccaggaggcagtgcgaatcgccagattatcaagagaagtgggatgtggggattttgtaaagatcgaagttgtacacgattccaaatatttattacccgataactatgagacgatcaaagcaacagaaatccttgcaaaggaaggatttgtagttatgccttatatgtatccggacctgaatgcggcaagggctctgaaagatgccggagcagcctgcatcatgccactgggagcacccatcggatcaaacaaaggtctggcgacaaaggagtttatccagatcctcatcgatgagatggatctgccgatcatcgttgacgcaggaatcggccgcccgtctcaggcatgtgaggctatagaaatgggagcggctgccgttatggcaaatacagcaatcgcgacagccggagacgtgccggttatggcagaggcatttaaaaaggcaatcgaagcaggacgaagcgcctacctttccggtctgggaagacagatcgaaagaggagcaagtgcatcatcaccgctgaccggatttctggaggactagactatggaaaatcagcatatcaatgaaagtatcttaagcgaagagattctggaagatcagaagaaaaacagaatcgatcatatgaaatatatgccgggtatggaagatatcgggtctgagatcctggatcaggtcgtagatgccatgcatgcgtatgattatgacaaatacacagcggctgatgtaaaacaggccatcgcacacagttccagaacaccggaagattttgcggcgcttttatcaccggcagcactgcctttcatcgaagagattgcccaggcagcgcagattgagacaagaaaacattttggaaacagcgtctatatgttcacaccgatctatattgcgaattattgtgaaaattattgcatttactgtggattcaactgtcataataagatcaaacgtgcccagttaaatgaaagtgagattgaaaaagaaatgcaggcgatcgctgagacaggcttgcaggagattttgatcctgaccggagaaagcagaaacaaatccacagtggaatatatcggaaatgcctgcaagatcgcaagaaaatatttcaaagtgatcggacttgaaatctatccggtgaactctgatgagtatgcgtatctgcatgcatgtggcgctgattatgtaactgtcttccaggagacctataattccgataaatatgaaacacttcatctggcaggccacaaacgtatctatccgtatcgtgtcaacgcccaggaacgtgccataagaggaggcatgcgcggggtaggatttggtgcactgctgggtctggatgatttcagaaaggatgcatttgcgaccggataccatgcatatcttctgcagagaaaatatccgcatgcagaaatcgcattttcctgtccgcgtctgcgcccgatcatcaataacgatcgcatcaatcctatggatgttcacgagaaacagcttttgcaggttgtgtgcgcatatcggttattcatgccatttgcaagtatcacagtgtcaacgagagagtgcgcgcgggtacgtgacaaccttgtaggtatcgcggcaaccaaaatctccgccggagtcagcaccggaatcggaagccatgtggatgacatcgaggataagggcgacgaccagttcgagatctcagatggaagaaatgtagaagaagtctataatgcactgctttctaacaatttgcagccggtgatgagtgattatatttatgtgtagggaataatctgggaacagtaactaatcatttccacgttgccctggtatataataaattcatggataaaacagaagttattaaccgtctgcggtatgaaaagccgaatatacagatgtgtttccgcacagagaaagcattgtctctgttacatttcgaagggagtgaaatgttatgacagccaatccgattttacttcagaaaaaatatagtcgtgtcatagagtgttttgccagacagcaggaaatttcattggacgctgcattggatttcttttaccattcccaggtatatcagctgattcgagatggtgtttcagatatgcactgtatgagcgatgcgtatcttgcggaagaattaagacaggaatatgctgaattaggatgcagtgacagatagtatgatagcatgcatttaaataaacctgtattattcacgaaaaaaagttgtggataatacaggtttatcattataaatttgtaatagcggcctgttttacatcaggaaattttaccgattcgcacgaattaccctacagggattacctgctgcgatcacattgtcgggaatatctttagttacaatactgccggctacgattacaacattatctccgatcgtaacgcccggtaaaataatagcaccgccaccaatccatacattgttcccaatgataaccggtgctgtttgcgttttacaaaattcgaatgagccatcttcttttggctcaccaaaacgagttattgcatcagtcgattgccgtcagcttgtggatccatttgtagcttttgaagcgcaggaatatgggcaggcatttgaaaatctgatcggattgaacagcaatcaccacaagttctaccggaagtttccagtagaatgcggccagaaaggacaatggcattacgatgcaccagacggaaattaggttcagatacatcgaaaatttggtatctccgccaccctggatgataccgactccgaccggcatctgataagacattccaaccatgatcacactcataataatcataaagtggtctgcatataaagtagcctgaggggtcaatcggtacatggataacagtggacttcggagtaagaataatacagttccaagcaagagtccgatagccagatagagtacagaaagggtacgcccgttgcagcgtactttttcttcgtcattgcttccgatatcttttccgatcacaacagcagaagcaccggctatcgcaatgacgattaccttcagatactgaaaaaaggtgcttgatacggaattggctgcaatcgcatccgcagaaagatgccccaatatcgctgtctgcataggaagggaaactgcccacaacaaaccggaagtcaggatgggaatacacactttaaaaaaggttttccagacagtaccactgccttttccgataataccatcccggaatttttcatcaaacaatttgacctttgtgtcttttttccatacatagaaaagaacgatgccaagttccagtatgcgtgctgcaaaagttccgatggcggcacctctgattcccatttccggtgcaccgaatcttccgaaaatcaggatatagttgattccaccgttcaccaacagggatatgacggatataaggaatgcgatttttacggtctccacactgcggagcatggccagtaaaaggttactgatcataaaaaataaaaatgtccattgtatgatatgaaggtaaatagtaccttctcttatgatatccggtgaagtcgtaaagaggccaatcagtttttccgggattcggatacataaagctacaattccggcagcaattgccaggctgaataacagtgcggcttttgttacctttcggatgggttttgtctgatggcttccccaatattgggagctgattgcaatcaatgcattgccgatcgccagtgcaatctgatttacgataaaataaatctggtttaccgtcgcagcgccggaaagcgcattctggctataacttcccagcatgatattgtccagcatattcacgctgtaggccaccaggttttgcagcgcgattactgtcattaatttgaaaaaggaacggtaaaaagaaggatcccttgtaaaaaatgtttttttcatgtcgttggttcatctgtaaactgtaacgtatagaacagttactccactcctttgattggttaaaatgctgctaatatactcattatataaagttaatagaggattcgtcaatcagtagattttgcaaatgagttcaaaaagagctgaaaaggtcagatgacctcttcagctctttttaatgcagcggatatatttgactggaagttttcttttcccacaagttccacaaaaccggctttttccatgacatgcatgggctgttcattgacgtgggagaatacaagtgtaattcctttgccctcgcaggtttttaccagattctgaagtgcattcatggcagtactgtcaagtgcagggacgcctctcatacggagaaccagacagctggtaaagtctttgacaacgatatgttcgatggcatcagcggctccaaaaaacagtggtccggtaatttcataaacacggatctgcagcggtaatttctgcagatgttcatcgatatccggagtatcatcgtctgtgtacacccagctgtcagcatgggtttcttcgctcatacgcttgatgaaaagcaaacaggcaagcaccataccgatctcgatagcaacgaccagatcaaagataactgtcagtacaaatgttactatcagtacaagaatgtcactcttaggagctgtcttgaccaggtcgcggaaggttcgccactgacacatattataggcaacgataaaaagaatcgcagcaatggtcggcataggaatcattccggcataaggcatcagaacgaccaacacgatgatgagtgtgacggagtgtaccattccggcgatgggagtccgtccgccatttttgatatttgcagcagttctggcgatggcacctgttgcgggaatgccgccaaagagtgcggaagcgatgttgccggctccctgggcaaccagttccatatccgaacgatgtttgctgttgatcattccatcggcaactacacatgatagcagagactcgattgcggcaagcactgcaattgtaaatgcatttgaaacagaagcactgatggtgctgaatctgatcgccggcatatgaaaactcggaagagagttgctgatcgtatacagatttccgattgtggataccttcagtggaagaaactgaaccatcaggattccgacgataactgcaatcagagaaccgggaaccttcttaagaacataaggagcaatgatcaggattgcgagacttacaacgccaacgatcagtgcatcgatgtttatggaagaaatattctggacaaaggctttcattttctccgttgtctcgattggttttacaccatccggataagtaactccgaaaaaatctttcaactggccaatcacgatggtcacagcgattccggaagtaaaaccggtcgtaatggtatatggaataaatttgatcagacttccgaagtggaacagtcccatcaggataagaaatatacccgccattatagtggcgatgataagtccgtccattccgtcgcgtgctacgataccggctacgatggttgcaaatgcagcagtcggtccggcaatctgtacgcagcttcctccaagagctgaaatcacaaaaccggctacaatggcagtaaagataccggcttcagggccaactccggaagcgagcgcaagtgcaatagataaggggagtgcgatgattgcgacgatgatacctgcagtcacatctttgataaactgtgacttgtcataggacttcagacaggttaacagcattggctttaaagaattcataaaaatataagacctttcatattaattttgctgatctagtatagcatagaaaaaaggaaaaaataacataaaacggttatgtttgcatttatatacaaaattggcagctgctcagtctctgccctgtggctgctgaatagttatgaataatatgggactggaatgtctgattcgtctggttgcgggaaggaaatatcatgtacagattattacatatctataaaaattgaatcgggccgtcgtaccaatattggtgcggcgaccctgatttatgcaggcaacgagccaaagtccgtgcttgcacgagattagattaaccaaaccggcacataccagtttctttcgtccacaggcaaaaggtcactagccatgcagattacacttcctgttccgatttcaaccttcaaggactctaggccctcgaaagccgattctttggtaacgggtttcagtacattaaaatttttaatcgctgcttttcccggtgatgcggattttttgatttctatcggagaaagcataccgttttgatagatcagcaggtcaatttccttttggtctttatccctgtaatagaaaatcggaggttcttttcctgcgttcaggtaactcttatagatttccgaaaaaacatagctttcaaagaaagctccagacatagcacctctttccaatgcttcgggatttccccattttaagaggtaagcagcaaggccggtgtccaggaaatggataagaggcatcttcaccacccgtttgagtgcattgttgtggtaaggctgcacaagcgcgatgatatgagacgacaccaaaatagatagccattttttcgctgttggtgctgaaatacctgcggcacttgcaagttcctcatagacaacgggctttgaagtctgagcagccacaatcgtcataaaattataaaactgcatttcgtccgcaacctgtgccaaatcccgaatatctctttgtagataggtgtccacataggaacgataatacgtttcccaatctacatattcatctgcatagagttcgggcatagagcctttgaatattctacgatagatctcgttcaaatcttttttgcttctaacagacagacgattcattagttgctctgcatccgtttgaaatggctcacttggttcctgataaatctccgcatcagacaatccaagcagatttatgattccgacccgtccggccaaactttcgctgacatttttcataagacggaagacctgcgaaccggtgatccagaaatcgccttttcttttggaacggtcaacactcattttgatgtaaggtaacagctctgtcgcgtactggatttcatcgattagcaccggtggggaataccgttgcaaaaacaaagccgggtcgtgctttgccagatatctgacatcaggatcatccagagtaacatatttccgctcgattccttcgcttttctgtatatccgccagccgttgcagcaaagttgtttttcctacctgtcttggaccggttaccaacaacacggggaacatttttgacacccgcgcaatcgtatcttcggcagctcttttgatatatgccatgacaatctctcccttcggttatagtatggtcaattttagctggaatatccgtccaaactaaactgttattttattatagccaaattttgtaagaacgtcaacgaaaatccgtccaaactaaagtgatattttggaatagccaaactctgcatcgtttcacttgccttgatttttttataccttaatgagaatgtataggcactatcagtacaatacagcgttttcaaaatacctacacaatacatttgtctacgaatccgattgcacaggtctaaaagcctcagcgcagcccactacgcctgcgtttttaaacctgcacactcgaatccgtatcctacgtgcatggtatagttatttatgaaacgttgtaccagtatagcatagaaaaaaggaaaaaataatataaaacgattatgtttgcatttatatacaaaattggcagctgctcagtctccgcccggtggctgctgaatggttgccatcatgctacaaaaagttggtcaaatgttgtgatttgtgtatattcatttgctgtaagatggtattataaaaaaagaagaaaataatagaagataatagaagataactagctataaatgagtaaatcccaaatattgcacaaaataaagacaccctctgttgaatgatgtataattgtaataaccacaaaacaattttctcacacaacaagggggtgcctgttgcaaacagtatacatcattctaacagtatttacaattactttaagtctttaaaactcggattatttttatccgatgtgtatttaaaccacttaatgatcatcatggtttctgttttccttcgtggttacagaggaaaaactatcgattttgctgaagtcagctgtatgcacagaacaacaactgcttattttctgaatcatggcaaatgggatgactccgcacttcaggatattctgaaagccagagtgatacataccatttaccaggaagcatatcgctccggaaagcccattttctgtattgtggatgatactattgcttcacacacaaagccttcgtcacaggctttgcatccaattgaagcagcgtatttccatcaatctcacttaaaaaggcatcaggattatgggcatcaggttgtttctgttatgctttcgtgtaatggaatcattctgaattatgcagttatcctgtacgaccggtcaaaatcaaagattcagattgtacaggaaattgcacaggagcttcccgtggcaccggtagtttcttattttctttgtgacagctggtatacttctgtaaaagttatggacagttttatccaaaaaggcttttacaccattggggcattaaaaaccaaccggattatctatcctttcggaatccgccaaaaaagtcagcgattttgcccttcatttacgaaaaacagatacggacgtcagccttgtgaccgttggcggacgtgaattttatgtgtatcggtatgaaggaaaactcaatgatatcccaaatgcggcagtgatcctcagttatccgaaggaagcttttggaaatcccagggcactgagggtgtttatatccactaatgcggagctgtccacacaggaaatccttgatacgtacagcaggcggtggccgattgaactattttttcgtcaaagcaagggaaaacttgcactggataaatatcaaatccgctccagaaaagggattcggcgttactggttaatcatgtcgttggttcattatctgtgttgtatgcattctgagcaatattgtacctttgaagaaggttaccgatattttcagaaacaacggaaaacagagcagttgacaaatcgtcatgcttttataaaaaatggatcgtcgctggaagccgttttcgaaatggtagggtaattttgtgcaattttcaatatttgctcaattatagtttgttgcttgaaaaataacttgagttgtaaagaagcaacaaattctctttttattttctgttcttttagctgtattaattgtaattttaattgctcagttatagatattatttcatcaaatgaaacatgtaaaaaaagttatatatgcaaagtgtatagagtaaaagaatttatatgagtaaaaatatacaagtgatataattttcttcatcagagggaaacatggtagtgtcaaatgatttatgaaaaaacagagtcaaagaaaaaggctctgatgaaccttgaaaattgcagatattaattccaataagctctccgagggcttagggcgttgcccgagcctatcctcgcagccggcaaagccgtctgttccggtattccacggttctattgacaacagttccgctccgatgcagcagtaccatttttctgtatgttcagaatggtctgttgtccaagaaaaatcagaagctgccacttgctaggcatattgtcggcaccctgaagcatttctacttcattgaggactttatagcctgcatgcttatgtggacgcaggaaattatagtaagcgacccagagtgccagatcatagttagcatcgtcgatgttgtcgaaccaatttgtatggtggtaagaagctttataagtacggttcagtcgttcaatcatctgtttgaatggacgatgttctgtagagacagcatcgtcgttggtaagtccaatgacctgagtgacgggaattaggaaccagagtgttgccgcagtggggacagcgtagttttacagcggaaaatctgctttcatcaggtgagaacctggcattgcaaatcttgcacaggagttgtcatttggaacagttgttcttgtagaggaacggttttggtgcatcacaacgcgggcaggtgcaggaatcatcgaaagcccactgcttgagtggaatatatctgcagataaaatttaaaagccagcaaatttgtttatgttggtattgaattaactgaagtaaataaagtataatgtccatgagcattgtctcctttgttgataatggtttgtggtgaattcattatacttcaaaagggaggtcaatgctctttttatttgcaaacctccaataaatcaaggttttaaaggatttagaacaataaaaaagagctagtttttgacactatcgaaaacattaaggaggactaaagtatgaagaaaaaaattatggcagtgacattgtgtttggcaatggtttcaacgtttgcagttggatgcggacagaaaaacgagacagattcaggaaagagtgaagaaaaatcttcaggtaaggtagaaattgaatttgtgcaagtaaaacgtgaagcagcagaaagctataccaaagtaattgaagcatttgagaaagaaaacccagatattgtcattaaacagaatgtggttccagatgctcaggaagttttgatgacaagagctagcagtgatagtcttccagatatgatgaatcattggccaacagatgcacaatttgtgcagtttgaggatgaaggattgctgttggatttatcagaaaaggattatatgaaaaatatagatagcaagtatctggatgctgtaaaagcaaaagacggaaaaaattacatagctccatacaatgtcaattttatgggagtttattacaataaagataagtttgaagaggctggctatactatgcctaccaaatgggatgaattaattgctcttgctgaagaaattaaggcgaaaggagaaacaccatttattttaccaaataaggactcttggacggtttctaatttgtggtctaatattgaagcaagagatttaggaagccatgaagacgaatttgaaaagatgaaagcaggagaagagtcttttgagacaattccagaatataaaagcagtgtagaaaaaatgattcaattgttggattatgctaatgaagattcacttgcacttggttatgaccaggcgattaatgactttgcaaacggagaaggctggatgtttcttcaaggaagttggacattaccatcatttttgagtgcaaatccagactttaatgtagaatttactattcttccgaatgataatggaaaaccgattgcaacacaggctgtagatacaggtttttgtgtaaatgcaaaggtagcagatgaaccggaaaaaatggaagccattgataaatttttatcttttgcactttctgcagaaggggctcagatttatacagataatgacaagagcccatcttgtgtaacaggagtaaaagcggaagttcctcagttccagccattttttgactatgtagaagcaaatggatttgaagcagatggagcatatcctccaacaggatttgaagatacaaaaagaggaaaaatccagaatgtattattggataaggatgtagatgcattcttaaaagaaatgacaaatgactggaatcaagcagtagaagattctaagtgattgttaagaaggtgttgtgaatgaagaggataagtaaaactgaaataaaagaaatgcgctcacaatcaaagaagaatagtattatgtttgcttttacattgccaactgtaattttatatacaatattctttttagtaacaatgttaattggagtgtattatagctttacagattggaatggtatttctaaagattatacgtttgttggcctgaagaattatgtaaaagtattgactgacgaaagatttagggaagccctatggtttaatattgggtatacgatagcattagtggtacttcttatagttattcctcttacgatagcattggcgttaaacagaattaggagattatctactctttttcgctctatttattttattccagcagtcataagcatggtcactgttggattgatttggaatgagttattttatagagcagttccagctataggcgaaatgttgaatatagaggcgttgtctacaagccctcttggaaatcctaaactggcggctattgctattatggtggtaaatatttggcagggctgtgcgattcctacagtgctttttatagcaggattgcagagtgtaccgaaggatcttttggaagcagcaacgattgatggagctggaaattgggcaagattttggaatgtgattataccgtacttaattccagtattaaatatggtaattatcacacaagcaaaagccggcttgacggtatttgactatattaaagttatgactaatggagggcctgcacagtcaacagaggcagtagggttattgatatatcgccatgcgatcaatgaaggaaaatttagcacttcagtggcggaatctatgattttatttgtaatcgtgggggttgtatcggcattttcactgagattgacaagtaataaacaggtaggtgagtaagatgaaaagaagtaaaagcagcagaatattaaagatattgtcctatgttttattgattacaggaatgatagttattctctatcctttttatcttactatcattaccgctttaaagacaccacaggaatcttctcaaagctttttttcctttccgcagagtttttatttaggaaattttgtaaatgttcttcaaaaagcaaattattttgtgttttttaggaactcagcagtggtgaccttggtatctgtatttcttattatggttttgattccaatgtgttcttatgcaatagcacgaaatatggaaaaaaggtattataagactatgtatttttatcttttggctggtatttttgtaccatttcaagttattatggtaccattagtaaaatatcttgcaaaattaaaattatgtaatatacctggcttgatcattatgtgtgttacattggcatcttctcaaggggtatttttacttgtgaattatatcaggtctgtacctagagatttggaagaagctgcttatattgatggatgtggtacggtaaaggcttatgtgaaaatagtgcttcctatgattaaacccattctagcaactatttttgtgttaaatgcactatgggtatggaatgattttcaaatgcctttattaatattaaatcagtcacaggatatgtggacattgccattatttcaatataattttaaatcacaatattcgtttgattataacttagcatttgcttcttaccttattgctatgattccagtgttgatagcatatgcttgtgcgcagaagcatattgtttcgggtttgacacaaggagctgtaaagtcttaatatttaggaagggatgtcagaaattactgacacccttcctgtttttgctttacaaagaagataaaaaattgatagaaaggtagtaacaaatgaaaaagcgttcttttagaagcacttttgtaagtgtgattttggtgataaccgttgcaatttctatagtaaatcttgctgtgtatggaattaatataaaaaaaattagacaagttgaagttttgaaaatgaagaccgctggggagcggatagacgatatgattactatatctttaaataatataaaaggactaaaacaaatttgttgtgcggataactatgctagaaatattttgctgaaaaataatgaaaaaaatgatatcggtacaaaattcgaaaatcagaattacatggacaatgcattaaaacatattgcttctatggacacacttattttgagagctaccatagtaaataaatatggaaacatttattgtacggatacatctataccagaagaatatgtcaaaaccattagaaacatgacaaaagagtggatgctgtttgaaggaaaagaggatgaatattattatgggggcttacagggggataacgcgaatattttaacttttttatatcctttacacacgtatggaaatacgcctattgctcttttagcagttgatattaactataaaacatttcaaagtattttagaaaatgctttttatgaagatagcggtgagtgttttattttgacgggggaacaggaactgtttcatatcggagaagatttatatcagaaagaagaaaaaggatatatttttgataaaagtcaaaaaatgatgaaagaaaatctaatagtagatacatttcagagtaaaggaaaaaatttttatataagttccagacagaacatgctttccggatggaaaattattcaagtaataccagaagaaaggctgtttgaggaggttgatcaaaagataaagtggaatagtatatttctcttaggagcattgatattagtggtttctttttctatttattatacaaaaaaaattattgaaccattagaagaattttgtaaaaaaataagccatactaaaggagatcaacttcaaattataaatttagaacatatgaaattaacaagagaaattgccaatgtgatagaaaactacaatgaaatggcaaataaaatgaatgaatatctggtaagagaaattatttatgataaaaatcaaagaaaaattcagtctaaaatgctgcgatatcaaattaatccgcactttttatataatacattaaatttaattgcttctatgggggaacttagcgattttccagagattgtggaaattacaaaaaatctttcttgtattatgcaatacaatgtaaaaggtagtcgttttgtttccttaaagacggaagtggaaatggtaaaggcatatctagaaattcagagaatacgttttcatgattgttttagcgtagaatatgagatagaaagacagattgagcaagtaagaattgtgaaatttattttacagcctattgttgagaatatttttgaacatggatttacgatggatgaaaatgacaataaaatttggattaaggcgttcaaatgtgaaaatgatattgtaatactcgtaaaagataatggctgtgggattgatagtgaaaaaagagaagaattaaatagaattctttgcgagagaacaagaagaatttcttatattgatgaggaagaaaaaagtattggaataaataatgtaaatactagaattaaaaattactatggagaaaaatatggagtgaaagttaataaggcagataaaggaacggagatacaactattacttggaattgaaaatctggaagaggagaataaagataaatgaaaaaaatattagtagtagaagatgagtattatgcaagaaaaagtattgtcaaaatcttacaagaaagcgatttggacattcaggtttgtggagaagcagaaaatggaatgaaggccatagaattactagaagaatataaagatattgcattggttataacagatatacaaatgcaaaaaatgggaggattggaactggcctcatatttacataaacatatacctgaaatagatgttcttattctgactgcctttgaaaattttgattatgcaagagaggcacttcgctataatgtaaaagattatatcgtaaaaccaatttataaagaaaatcttttgccaccagtaaaaaaggttttagagaaacaggaagagaagagtcgaaatcaagaaaaaattaagaattattatcaatgggaggcagccaaaaattatttccctgtgaagacaatcgtggctcacgaagaattgtataaagaattttttagttataatgcaatacatcaagaagaaaaattctgtatagttgtgatgcaagaagaagaactggtgacagatgtagaattagtgaatagaatcattcaggaaaaatatagagggttcataaaggatttctttttttctaaaattaatgaggaatatgtaatgcttttgagtggaatagaatgtatggataatgaactgattgttcaggagaaagtagaaagtatgttatcgtatttttgtacatgtaaacatatgaatatcactatgggtgtaggactagtatattcatctaaagagaagatatatcagtcttataatgaggcgttatatgctttaaatcagagattgatacaaggatggaatagagcatatttttataaaaatatggacggatataaagcaagaattggaaaagaagcagaaattaagctagaatctatagtaagaactagaaaagaaaaagaaattaatcaagtaattcacagtattttagaggatataatcattaaagaagaaagtgcacagaaactgtacatggcagttgtagaaatattgaaaattctagggaattattatgcagaattatatcaagatgaggatattgaagaattaaaagatataaaagttatgttttccagacgttatgatttgtacaaatttaaacatattgaggagctggaaaactatctgaaagaaatggtaatagtgatatgtagcggaaaagaaaatacaaagaaaaaaagtaaaattgttgaagaaattgttcattatgtagaaaataattattataaaaatatttctttaagagagttagctgaaaataaatattttgtgaattattcttattgtagtagattgtttagccaagaaacaggaatgaatttttcgaaatatttaattcaatatcgtttaaaaaaggcaaaaacattgttagaaaataaagatatgaagattagttttatagcatttgaagtgggatataatgacgtttctcatttcattcaatcattcaaaaaaagttatggattaacgccagaagagtatcgagcgaggaaaaaaatcgagtaaaaataaggaaaaaaagttatattttgcaagtaaaaatattcataaagttgcgtcctttattatgctaaaatcaaattcaagaaagtcaagaaaggtaattaggaggtaacatatgggtaaaaaagtagaagtaagctataatccacagttggggtatttacaaacaatattccatcacaattttgattttttaacaggtataaaaagttatacagagagaacagatggagtagaatttgtagtagatacttacaaagagaacacagtaaaagtgttcattcaatgtgttggggaagccgcatttcgttttcgtatgtatacgcctggaaatgagcatccttttgataatagtatatatcagttagaaggacagaatggtgtaaatataacggaaaacgaagaatttatttctatatctaaagggaagatagaagctagggttaggaaatatccgtgggaagttagctattatcttgatggaaagttaaaaacaaaagagcagattaaagattccaatgtggataatatgtgtaaaaatttgcctgtaggattcacttatgatgaaaataaagagattattggcgttaatgaaacaatgtatttatatgcagatgaagaattctacggtttcggagaaaaatttacggattttggtaagagaggacagactattaattgttggcaaacggatgctctaagcacgaatacggaaaaatcttataaaaatcatcctttcttcatgagtagtaggggatatgctattctgttaaatacttatacaaggtcgaaatttgagatgggtagtttttcaaatgtggcatataacatgagcgtagaagataaagtcttagactatgtcatttggatgggaaatgattataaggcactcttaaagtcttatataaatcaaactggaaaaattcctatgattcccaagtgggctctgggactttggatgtcaaaatgttcatatcaaactcaagatgaaatttatgaagtagtaaagatttctaaagagagggatattaagattgatgtaatacatatcgatggatggcagaaagaaggtgacgcaggcgcttgggtctgggactatgaaagatttcctaatccagaagaaatgatttacaagttaaaaaaggagggaatccacctttgtctttggattttcccctatattgatgagaattcaaaatattttaaagaagcagaagaaaagggatttttggtaaaaaatacaaaaggtgttacaagcagattttattctacggcaacaagtacctcaaaggtaggatgctttgactttacaaacccacattttatagagtggtacaagcctaaagtaaggtcagttgttagtatgggcattggagcagtaaaaactgatttttcagaagctgttccagaagatgcggtttattttgatggttctacaggaattcagggacataataaactaacatttttatatgccaaaacaatttatgatattatggcagaggtgaaaatccctttaggagaacttccaatgctttggggaagaagtggatatgcaggctctcatactattccagcagcgtgggcaggagattcatctacccatttaaataatcatgcatgtattcttagaggaggcttaagtgcttctatgagtggaattcctttttggggatttgatatggggggattctataatacagatcatgaagggtatgaatgtgttcctacagatgaggagtatattagaagttgtcagtttggattttttaattcacttagccgatgtcatgggaaaacaccaagagaaccctggaattttggagaaaaagcagaaaagatttttaagaaatttaatgatataagacatttattattaccgtatctgtacagtacaacttataaaacacacctctcagatattcctgtaattaggccagtagtaatggaatatccagaggatagaagtgcccgtaatgtagagttggaatatttcctaggagattctcttttggttgtaccagtatttgatcaggaggatgaaatagatgtatatttgccaaatggacaatggattgatttgtttacgcatgaaagaataaaaggcggtagatgggttaagagaaaaatcgaactagataagattccagtgtttattcgtcaaaataaaatgattccaatgttaaccaagattccagagaatattgaagaaaagtacgaaaatttagatgtcatattattttgtgaagatgaaattagagacacgtatattgatgatggtaacgtacagaatttgaaagcaaagatagaagagggaaccttgtttataaacacggatatggatgccagctattttactgtatacgcagaaaaatgtttggacaacgctgtggtaaatggacagaactgggagatcaaaaaggaaaaagaaggatactataagattgctttagaaaaataaaaaggagttaaggcaaaatttgaataaagagagaactattttatatctgttcagcataaatgcaattatttatattgccagcggtttttataccccttttttatctgcttattatgcacagaaaggaattgatgctgagaagatagggattcttttgatgattggtccgtgtgttgttttgctaacacagaggttttgggcaaaaattagtgataggacgggtaaaagaaaagaggttcttctggttacaatagtgggaagtggatttagcatgcttttatactatctgggaaatagttttctttgtatgttttttgcaacggttgtggtaacttcctttaccacagccgtaattcccttaagtgacgcaattttgattgctcgctctttaaaagaaggatattcctattcaattattcgtcttggaggaactctaggatatgcggttatgacaatttgtgcaggaatgtacttaaagacaagacctcagatgcaatttgtatttgcatttttcgcctatatgattttgttttgtttttgtataggattaaaagaagaaagaaatgggcagatagtaataaatgaagttgttcaagaaaatgagcaaaacaggatatttaaaaatcgagatgtgtatatagttttgggattagcgtttgtaagtcagatgggtttgagtgtatattacggttagatagtgcaaccttttcg

SEQ ID NO: 2466 - DNA, 1580 bp, Unknown
  gut microbiota DNA sequence
gccgggaacgattctgtatgtcagcaaaaatatggaagtggtcaatgaaagtcaggcaagactttcagccgatgagggtaccgacagtgaaagtcaggtgaccacgcaggcgtatggctatgtgatatacgcgagcgataaataatacgttaataccagacatatatttatgtctcagggaatataaaggagattaattatggaaaaaacaatggaaaaaatcgttgcacttgccaaatccagaggattcgtatatccgggttccgaaatctacggcggcctggcaaatacctgggattatggtaatcttggtgtggaactgaaaaacaatgtaaaaagagcatggtggaaaaagttcatccaggaaaatccttacaacgtaggtgtggactgtgcaatcttgatgaatccgcagacatgggtagcttccggtcatctgggtggattctctgatccgttgatggactgtaaagaatgtcacgaacgtttccgtgcagataagatcattgaagatttctgtgcagaaaaaggaatcgctctggaagagagcgtagacgcatggagccaggaaaagatgactgctttcatcgaagagcatcaggtaccatgtccgacctgtggaaaacataactttaccgatatccgtcagttcaacctgatgttcaagacattccagggtgttactgaggatgcaaaaaataccgtatatctgagaccggaaaccgcacagggtatctttgtaaacttcaaaaatgtacagagaacttccagaaagaaactgcctttcggtatcggacagatcggtaaatctttccgtaacgagatcacacctggtaactttacattccgtaccagagagttcgaacagatggaactggagttcttctgcaaaccggacactgacctggaatggttcaactactggaaatctttctgcctgaactggctgcatgaactgggactgaaggacgaagaagttcgttaccgtgaccatgaaaaagaagaactgagcttctacagcaaagcaacaacagacgtggaattcctgttcccgttcggatggggcgaactgtggggtatcgcagaccgtacggattatgacctgacacagcatcagaacgtatccggacaggatctgacttattttgatgatgaagaaggaagaaaatatattccgtatgttatcgagccgtctctgggtgcagaccgtatggtactggcattcctgtgcagtgcatacgacgaagaagttctggacgctgagaaaaatgatgtacgtaccgtactgcatttccatccggcactggcaccggtaaaagttggtgttctgccgctgtccaagaagctgaatgagggcgctgaaaaagtatatgcaatgctggcaaaagaatggaactgtgagtttgatgacagaggaaatatcggtaagagataccgtcgtcaggatgagatcggtactccgttctgtgtaacttatgacttcgattctgaaacagatggagcggtaacagtcagagatcgttacactatggaacaggaaagagtgaagatcgaagatctgagagcttatcttgctaaga

SEQ ID NO: 2467 - DNA, 5093 bp, Unknown
  gut microbiota DNA sequence
agactcacagctcacgaaaagcctttttcagacacgctctagcagacttcggtgacgtggcggatcagcatattctgtactgccggatactcgccgagccctttcaggcaacattccacttcatatcctgctgcctggaattgatttttccaggaatcttcgtcttcaccggacatatcgtttcgcgcatgatcgcccgctacgatcataaacggtgtgaggatcactttttttgctccctgttctttgaccagacggatgacattttccagcgtcgggtaaccttctacggtagccagatggatgttgtcatgtcccaggtctttgaaacggtaatccagtgccgcgtagacatcattagcataatggctggttccgtgtcccataaggatcagggcacagtctgacgggaggtcggagaactcctggcagatggcattgacgatctctacatgatcctgctgtgtggtgagaagcggatcgccaaaggtaatgcgctcaaaatgatttttgaaggcaagagcatcttctttcatcagatcattttcgataccgttgatcacatgggtaggctgtacgatcacttctgtgatgccgtctgcgatcatctgctccatggcttcggttacattgttgattttgatattgtctcgtgccagaagttttgccatgatcattttactggtccaggcacgataaatcttataatcggagaaatgttcaccgatacgctgttcaatcacatcgatggtctttttgcaggtatccggaaaactggtaccgaaactgaccaccagaatggctttttttgttgtagacataacgttttgttcctttcatcaatagtaataattcctctgtgtgtagtgtacccttattgattactttttgtcaattgtctgtacaaaaattcgtgtgactgttttccaaaagcgaaatatgtggtatgataactcgtaatgcatttttataaaactgtaaaatgctgtcagggaggaacaaaagatatgagtatatcgatgatcggaattgattataataaagcaaatgtagatatccgcgccatgttttcctttacaaagaaaaatgcgacagcggcgatggaacgactgaagaaaatcccggggatccagggttgtgtcatcctgtccacctgcaaccgtatggaactgtgggcgagcacgaaagcggactgggacggaactttgttagaagagctttgtaagatcaaagaagtggatcctacccagtacggagagtattttgtggagcgaaaggaagaagaggcagtggatcatctgtttcatctgaccagtgggttaaaatccatgatcctggcggaagaccagatcatcacacaggtcaaagatgcgctgacactggcgagagatgcttttgtgacagataatgtactggaagtcctgtttcgaaaagcggtgacggcgggaaagaaagtaaagacgaacgttattttctccagagccaatcagaccgcgatggatcaggcgattgaaatgttaaaagaacggaattttccgtttgcagaggcacgctgcatggttatcggaaacggagagatgggtaaactggccgcacagtccttgagacggaccggagcggatgtgacagtcacggtccgtcagtatcgaagtggtgtggtgacgatcccgatgggatgctccagaatcaattacggagaacgtctggattttcttccgggctgtgatctggttgtcagtgcgacggcaagtccgaactgtacactgacgaaagagcagatagaaggactggatctgaaaaaacagattatttttatcgatcttgctgttccgagggatatggagccgggaatcggtgagatcgaaggagcagagctgtatacgatcgatgatttcaaactgagcggaccgagtgcggcaaccctgcagtcaatggaacaggcggaagcaatcattcaggaagaaatcgatgatttttatgtctggtatcagggacgggcactgattccgcggatccaggagatcaaagaggatgcggtgacggatctgaacctccggttacataagattcttggaaaactgcctcttagcgaacaggagcgaaaagacctggaagcatcgatcgatacggcggcgggaaaagtagtgacgaagatgatttttggactgcgggataccctggagaccgatgcatttatagattgtgtggaaggactggaaaaagtatatgaagaataacgctttttttcctttatttgtggatatcagtgagaaaaagatcgtggtgatcggtggaggagctatcgccacaagacgggtaaagaccttacttccgtttgcaccacagattgtcgtggtagcgccggaagtgaccggagagttggaagaactggaaaatgagaagaaacttacgattttccacagggagtaccagagagaggatatttacgatgcctggatggtactggtggctacgaatgatccgaaattaaatgacgggatctacagtgtggcaaaatgtctgggcgcgcttgtcaatgtggcaagtaaccaggaaaaatgtgattttcatttcccgggagtgatccgcaaagacccgtatgtgatcggcatcaatggttcgggaaaagaccataaaggaactgccgaacttcgaaaacagatcgaggcagtggtaaatcatacgatctgtatcggaagccgggagagccgtctggcggtgatccagagcgagatggtgatggattacctgaaaaaagaatgtccccaaaaagagatccgtctgctgacgatgaagacaaccggtgataagatcctggatcggacactggataaagtgggcggcaaaggactgtttgtaaaagaactggataaggcactgatagacaggcgaagtgatctgtctgtgcatagcttaaaagatatgccgatggaagttccggaagaactgccgatcgtggcattttcaaaaagagaggatccgagagatgtgctggtacttccggaaggggcagatacactggatcttacaaaaccaatcggatgctccagtcagagacgaattctgcagttacagaagatgtatccggaagcgatgtttcagagtgtccgtggaaatgtcctgacaagactgaaaaaactggatgacggagagtacggcggattgatccttgcggcggcaggattaaagagactgggactgaaaaaccggatctccaggtattatgagccggacgaagtgatcccggcagcaggacaggggattcttgcagttcagggacggcagggagaagactattcgtatctggagcatttttcagaccgggaaggaactattgcggcactctgtgaacgtgcctttgtccgctatcttgacggcggctgttcttcgccggtggcggcgcatgcggtgatcgagggagatgagatcttcctgcgcggtctgtattatcaggagagtaccggaaagcatacgatcggaacgatgcgcggatccttagaagacccggagacacttggcgtggctctggcaaagaaactgatcagggaggcagaaggatgagtacacagggaaaagtctggctggtaggtgctggtccgggagatgtaggactttttacaataaagggaagagaaatcctcgcaaaagccgaggttgtggtatatgacagtctggtaggcgacggcgtgctggcgattgtgccggcgtccgcagagaagatcaatgtgggcaaacgcgccggacaccacacgatgaaacaggaaaatattaatcaggttcttctggagaaagcccaggagggaaaacgtgtcgtgcgcttaaagggcggtgatccgttcctttttggacgcggcggcgaggaactggaacttctgtgtgaacatgatatcccatatgaggtcgtgccgggtgtgacttcctgcatcgcggttccggcatataacggaatcccggtcacacacagagatttttgttcttctgtccatgtgattaccggtcacaaacgggcaggggaaaactataatattgattttgaagcgctcgtaagaacccggggaacactggtatttctgatgggaatcactgcaatggaagacatctgcaaagggcttctggaagccggtatggatccggaaactccggcggcagtgctgcagcagggaaccaccgcgggacaaaaacgggtggtggcaacggtagccaccttaaaacaggcatccgatgcggcgaagattcagacaccggcgatcatcgtggtcggacaggtctgccaggtggcagacacgttcggctggtatgaaaaactgccgcttgccggttacaaagtgttggtaacccggccgaaggaactggtttccggcatggcaaagaaactccgggaacagggagcggaagtgctggaacttccggcaatcggtgtaaaaccggtggaagacagaacaaacatttacaaggcatttgaaaaacttgacacctatcagtggcttgcatttaccagtccgagcggtgtgagaattttctttgaactgctgatggatgccggaaaagatatccgtgcactgggatcggtaaagatcgctgtcatcggaagaggaaccgcaaaagcgttaaaagaacatcatctgtatccggatctgatgccggaagtctttgacggggcatcgcttggagcgaaaatggcgaaagagtgtgagccgggagcgaagattttactggcgagagcggcgattggaaataaagaagtgaccgaagaactggcaaagagagaagatcttacggtagacgatgtggcaatctatgataccttttatgagagtcaggaactgatcgatgaaaaaggacagtttgagagcggaaagatcgactgtgcggtatttaccagtgcatcgacggtaaaaggctttgtggcagctacaccgggactggatgatacgaaagttctggcagcctgtatcggaaaacagacagaggcggaggcactgcgctatgggatgaaaacggcagttgcaaaggaagcgtctattgacagtctggtggatctggtaatagaattaaaaatgcagaaataaaaaacaacaaaaacaaaccgacag

SEQ ID NO: 2468 - DNA, 38920 bp, Unknown
  gut microbiota DNA sequence
caaaatttcatcgaatactatcgcaagcgtttcttcggttctagcataaaaaagtaccactaatttcccgttcccgtatatctttttattcctttcgtccagacaactgccgctattgccaacatgacaatcgcaacgaaaggcgcaaaatattgccacatcttaatcccccctgccgccttacctaacagcacaacactgggataataattaataaaagccactggcaaaaaacaagtaacaaatatctgaaaatattttccaaaaatattcaccggatactgctgcatcaacactgtaaatctttccgctatattcatggctgcattagaacgtgttgtccaaaaacaaagactggcgccaatcaggttgatagccacctgtatcaaagctcctgacagcacgcaaatcaaaaaatatgcccactgccccatattccagtgtattccgatttgagcagcggcaaggatgaaccctaatacccctaccagaaaatctcctacgcctgtataactgatatctttaccgataaattgcagaaatgggctgacaggacggatcaaataggcatcaaacgtaccgcctacgatcatttcctccagatcagataaatgccagaaaaacacgccgtatatcccacggctcaacatccagaaactatacaggaacagtaagtcccatatgttccaatttcccagagtattaaaattatataccagaatacctatgagagagagatttacagcattcagaatcaaaacgcttattatccccacaaaaaaatcagccttatattgtgcttttcccagaatagccacacgcaaaaaatgaccatataatcgaatgttccgcattttctcaacctccctgtatcattactctggcaaagacccgtttcatcaacagacgtgataataacccgagtacaagtatccatgtaaactgcacacctaattctctcaacatatccattcccgcataatttccaatatagatggacatgggaatggcataaatgcaacggaatggcaaaaaatcactgataacgccaagcgcactgggaaaaatccacaatggcaccatctgtccggaaaagaaacgaagcaacgcattgtacccccaattgatgttgcggatattcatggtgatcatactcagaagccccagaataaagttcaggaaaaaactcacgataattgagaaaaccaagctgcaaagaaagccaaaaagcgcagacaaatccggcaattttaatgaaaacaggaaaaatgccacaatcaatgaaggtaaaaccaagaaccaaaaacgcaccgcaatacttcccatattctttgcaaacatataaaactgaaaatcaatgggtttcataatatccatttcaatggtacctttgcggacttgctccataatatagatctgcggaccgttccgtggatgcaagattgcctccagggcaacacccagtacagcataggagatcatctggggaagcggtacaccactaacgttggggtttgcggcatacaacgcgcgccacacataacctacactgtacatcataaggaatgtgtaaaacaagttaatccaaaaggacacacgatatatgctcatattgtaaaattcattacgcaaaaaagccatgcccgtgtgtatactgattcccctacttgctctcataaagtttcctcacaatctcctcaatatcaggctcaatgatttcaatgtcgtgaacaggatatttatcaccgatagaacgtatcagctccattggggtggcctctgaccgatgaaacgagaaccatttacggttcccctcactcctggtcagcttcgcattctctacctgaaagtccccaacaggctcatcaaactctatcatcagtgaacggataacgccaaacttctgcaccatactctctaaatctccatcatacatcagatgaccggaatcaatcaccaccacacgggaacagagtttttctatgtcccccatgtcatgagtggtaagcaaaaccgtagtacctttttcacgattaatctcagaaataaaatcatgaagatatttcttagaaacaacatcaacaccaatcgtaggctcatccaaaaaaaggattttaggatcatgtaacagcgccgcacagatatccgcctttacccgctgtcccaggctcatctgccgcacgggtttattgataacctcctcaagatccaacatgggaatatagcgatcaagattcttcctgtaagtaccatcctcaattttgtaaatttccttcagcagacgataactttcaatcaaaggaacatcccaccaaagttgtgttttttgaccaaatacgacaccaatctgcttagcattctccattcgctgttcaaaaggcttgataccgtcaactgtgacgtttcctgaggtaggctgcaaaataccggaaagcattttaatcgtggtggattttccagcgccatttttcccgataaaacccactatttctccatcgtcaactgaaaatgtaatatcgtcaaccgcacgtttgatagtgtgttcactggagaacagatttctcacagcggcaaacctgccctttttctgcacaggtatcttgaactcttttactaaatgacttacttctatcataattattcctcatcaaatctgtcttctgcagaaatatctataactttaaaatagctaccagagaacaacactttgttaatataatcattataaaaagaaagtaacgcttcattctttctatcatcatcaaaaactctttccatgaagtcagttgtccatttccctaccgggataagagtattccgtgtaaaccatctgtcataaattgtattgctaatttcctttaccttttgcatatcccatgttacatatatatcattcggaataatatttccaaatataagctggcaatgatacaaagtatagtataatgcattatctaattcgctttctctagcatattcaaataacttttcccaattaattttgtttttcgaaacaaaaagtgcaatatccaaatatgataacaggcgtatatctcgtccagaaattatatctcgtaaggagagggtgtgccaatataaatgagatgacagatgaagtaaaaagtcctcattacttaatcgccaaaaatttatcccctgaatattctccttttttgcccgttgaaaaagtaaattagaatcataataaaaactgtcaaaaattgtactaagcctgtggtgcacgtcaacagaataaataggaaaaaaatcagaaccacttaacttaacaaattcaccatagtgctgaagttcagattcatatccgtttaatctgttattatcaaatttatctatggtgtgtgtgtttctgttatattttccctgaacataaccaagactcttcataactcgaaacacatcctcagtttcatttttctgaataaggatatccatatccagatacggacgttctaaaggatcgttataacatttttctgccaagtacacccctttgagtaaaattattttcaagccagccttatccaattcgttcaaaaggtgtaaaaattcatctctttgtttagaatatatatgtttccttattttgtactcattatcaagaatttgcacaatatactggggtatctgtaatgcattcctgattctgttataaagtacaggtaataacttgtgttgtgtgcagtgatggataatgtaatcccaatccaaagtgttatttaatttttcattactgctccaatcagtgtttggcataagcaattcaattataaacttatcctcttgtctcatgctactttcctccttgtataatatattaacatccttaaaataaaactttctgtttccaatctacatttatcatatttataacggtattttgtattattttcatatatatttatgtgtttttccaattataaactttgtattatgctattgtctaccctctatcattcgctttcttcactctttgggtctatttttcaaatcgttttaatactcatcccagcatatctgatatacatattatatcgtaagatcaaaactttttcgttatacctgtctaaaattgcttttcattgcaatatctaaatatcttctattacttaatctactgaacctccatacaaattcactattttagctcgttcttcatagctaagctgcatgaaaactgctgttctctcaatatctctgcatttaaggtaactcatctctccaattatcttattcttgtttcttttccaaatccataaaaatcttctctctctgttctggcgtgattttatcataatttcttcccagccactcaaaaatattacccggtaaatctcttacttcacccacttcttcatatttcttttgttctgacatctgattcagcaaatccacatcgatccctgaaacagagtccgtaaattccattcgcataaagttttcttctgataaatcaatcactcgaacatcctcacctttttttacctgttccttaaaatacgctacttccgcatcatttagcggaatcaacttaccctctgatttcacagtgacatatcctccaccttcagtttttttaacacaaatatccgaaacataaggacccaagttttttgcttctttaaactctttcatatcctgtgtattgtactttttatcatatatcggtttttcacctgaaatgaaaatgatacagtcctcatccggcattctggaaatctcttcgctggtcaataattctctgctctgccgatcaaagtttatactggtgcttccactcgttcctttacttaaaccatcattctttttatcaatcgttgctgttcccaataaatcagcaatgtatttgtgagtggaataggctccccagcctcagcccaaatagagaaacgttgagcaggcatccatcaggatttcccatgtatcgtttttataaatctgttttagctggctgactgactgtaaaaacataatcacagatatatttctgcttcgaagtgtagtaatcagtttttcaaaactttccggtctggagccgttggcaaattcatccatccagacttctactggaatcggtaacgcaccaccattttttcttgcacactcaattaatacttgaaatagtgaggtatacagcattccaacaataaaatcaaatgacctgtcatcatcctggacacacaaaaaaagggctgtcttcgtggttttatccccgttgacacccattccaagctcatacaaattcatctcatcttccgaaaataatctttttgctgcagctacacccataaatttaaacttcgaattacacataataatgatagatcttactgtatctggcgcaccttcctttaaccttctataattactaactgccggatgctcatttcccataggcgagcgtaccgcaagtgtattcatacgtttttccaattccgtttcccctgtctcttcatccaatatccagctttcttcattcatcaataattgaactttcggcaaggttggttcctccatttccaaccatacataatagaaacatgccaaaagatacatcgttaccccatcctcccaaaatggttctcctttggatgtatcctgcggtgtcagagatgtctgtatattgcttaccagacgaatcatatctacttctgtttttacatatacaaagggattatacatatgacttttcccaaagtcagagctgattacatccagacattttatttgatatccattcttttccatggcttttccataatttcgtaaaagatcccctttaacatccaacacaacaactgaagcatcattccgcagcaaattaaattaggtgcaacaatccgaaaggatttcccagttcccggagcacctactacaatcatattattgtttgcaatttttttcccacttttacttaaagtgatatgttgggaaagaatccttccctgtttgtctcccttcgatgccatcacctgttacgggtcagcccattctgctgacccatgctctctccccaatacaaaatttcgattatagtattgataatccataaccagacacatccatgccaaagatgaaaaaatttttctctatcagataagcctaggctctccttccatccttgttttccattatattttaaaataattaatacaatagtaaaagcagcgcctatcacaccgtattcttgtaaattagttagtatatccatttaatatcctttctgtttatagtttgttttgtcatgttattttacagattaccataatttttcttttacttatttcatgctcaggatatccctcatacgttttaaaattagtagtacctgaccagcagcaaatctttgtttaaaggatccacatgaaaaatgatcctctctcaacaccatagtcaacaatgctgcacataaatcataatcagcattaaaaacccgttttaattcttcagaacaattgattggctctgtaatcatatagtctctgtaattaagtttcatatctcccatagaaagtaatagctctgcgtacagacctatgtatggatcttttttctcaattatttcctgaatcatttcaattttctcttctcttttcattgtcgtccaccaccttgaaaatgtatctttatatatcgaatatttgttcctttattttatcatattgcgaacatacattctagtattaaaaatacgaatttccaatatctctccttaacgattttaaccgatctttagaaatttctctttatacgaaaacaaagctatctattactagatagctttgttctgttcctaggctctgttttattttctttccatctttttctcgattactcatggaatattctgtacacactttgtattttccgtacacaatttttactcaattttaatgaaattttatgaaaaaatacatcattttatggtactttcagtccctgaatttgtacacactttttcctgtttttttctcgaaaaagcctataaataaagggttttttctatcgattgttgatagcggtgactaaggcatcgatagatgcacggataatgtcgctgtcgacgcctgcaccccaggaaagggatccatccggtttctggatacccacgtatgcaattgcctttgaacttgtactcatttccagtgcatgctcggtgtaggaaaccagtgtgtattgcatgtcatatgcttttttcagtgcattacttaccgcatccagacgtccgttaccatctgcctcggtagtgatcacacggccttcaaaggaagacgtaacctgtgtggtgatgtgtccgttctgctggaaatgtactttctgaatatccagcggtttcttgacattttcgaaagtttctttgaacagttcaaaaatttcatcaggatgaagttctttatgagtatgatctgatactgctttcgctgcgtaacccatagcttcacgcatctttggtggcagattcagaccatattttgtttccagaatataacctacgccacctttaccggactggctgttgatacgaataacattggcatcatagcttcttcccacatctctcgggtcgatcggcagatacggaaccgtccagtgatccggatctttttcttcgatccagtgcattccttttgcgatcgcatcctgatgggaaccggaaaatgcagcaaataccagagatccgctgtacggacttctcggatctacgttcataccggtgaatttttcgtatttttcacagatgcctggcatatcagagaaatcaagttccggatctacaccctgtgcatacatattcatcgccagcgtaatgatatctacattaccggtacgctcaccatttccgaacagagttccttcgatacggtctgcacctgccagaagtcccagctcagaatctgcaacaccacatcccctgtcgttatgcgggtgaagagatacaataacattttctctgtaattcaggttatcacacatatactcaacctggcttgcatatacgtgcggcatggaatgttctactgttaccggcaagttaatgattgccttctgatccggtgttggtttccatacatccagaaccgcattacacacctccagtgcatattccggctctgttccggtaaagctttccgggctatactcaaacaggaagtttccgtctgtctcgtctgccagtttctttaacagggcagctccatctacagcgatctttctaatctcttcttttgatttacggaacacctgctctctctggctcagggatgtagaattatatacatggatgatggctctcggtgcaccttttaccgcctcaaaggtcttgcggataatatgttctcttgcctgtgtcagtacctgaatagttacatcttccggaatcaggttctgttcgatcaaggctcttaagaattcatattctgtttcagatgctgccgggaaacctacctcgatttccttgaatccgatttttaccaaaagtttgaagaactcaattttctgttccagactcatcgggatcacaagtgcctggttaccgtctcgcagatccacactgcaccagatcggggctttctctacatactctttttctgcccatttcatacattttaccggtggcataaaatactgtctcacatactttttgtaattcatcatgtttcttgtcctcctaaatttgattccctgcacatctctggcatctatcttctttatggatatgtaaaaatgcgtaaaaaaaactccgtctctcttctcaagagacgaaggattatctcctacgcggtaccactctttttcatgaataacttcatgcactctgccagatacgggtctacaccttatatcctcccccatgataacggtggggtactccgtctgttcctactggaaatatatttcgttcagacagcagctccaagggcagttccaaattcttcattcactgtttcgcaccatccaacagttctctgaaagccgaatcctctgtactcttcctcttctacgccatttacaagttaaattttaccatagaagcagacagattgtcaacgggtttctatgataaagttttatcagaatgaattttatcgatttttaaagcaattttaaaaatcaaataattattgacaaaagccattataatgcatataatagtttctatcttgtataaatcagttttgtcggggtatggcgtagcttggtagcgcgcacggctgggggccgtgaggtcgcaggttcaaatcctgttgccccgatacttttcttttccaggcagtttctgccgtttttccggaacacgataatttataacagaataatttcgattgctatctttttgcaaaagcgagataaaatacgctttgtgatttttactcgttgcattgcatatcaataatcgttccagtggatcaattttgattatcgcgacagtcgccagcgtctcatgtaagcatgtactttgactcgttgttcgcataaataatacaggcagtccgaaactctgcgactgcctgtactatttctatttattttctttttattttcttttattttgtcgtattggcgttaatataatttaccaaaccctcggctttgataatcttctgcatgaactccggaaacgcctgtcccttgaactcagttccttttgttttattgtagatcataccactgtcaaagtccacttccacatcatcacctgcatcgattccttttgccgcttccgggcactcgataatcggaagaccgatattgatagaatttctgtaaaagatacgtgcgaacgtttctgcgatcacacaacttacgcctgctgccttgatcgcaatcggtgcatgttctctggaagaaccacatccaaagttcttattggcaacgatgatgtcacctttctgtactttatttacaaactctttgtcaatatcttccatacagtgagtagccagctctgccggatctgaagagttcagataacgtgcagggatgattacgtctgtatctacattgtcaccatatttaaatactcttccttctgctttcatccttctcttcctcctataaacctaattcttccggtgaagaaatcttaccggtaacagcacttgctgcagcaacagccgggcttgccagatagatttcagaatccacatgtcccatacgacctacaaagttacggttggttgtggacacacagcgctcattttctgccagaatgcccatataaccacccagacacggtccacaggtcggtgtgcttactacagctcctgcctcgataaagatctttaacagaccttcttccattgcctgcagatatatcttctgtgttgccggaatcacgatacagcggataccctttttcactttgttgtctgccaggatctctgccgcaatacgcaggtcatcgatacgtccgttggtacaggaaccgataactacctgatcgatcttcacattttctgtgatctcatcgatggtttttgtgttttccggcagatgtggaaacgcgatggtcggacgcagtgtgctaagatcaatggtgtattcctcatcgtaaactgcatcctcgtcagcttcaaatactttccattcccgcttggaatgttctttcatgtatgtcatagctacatcatcaaccgggaagataccgttctttccaccggcttcaattgccatgttggcaatggtaaaacgatcatccatggacagatttttaatgccttcgcctgtgaattccatagacttatacagagccccatccacaccgatcatgccgatgatgtgcaggatcacatctttaccgctcacccatttggcaggttttccgacaatattaaatttgatagcagatggaactttaaaccatgctttaccggttgccataccggctgccatatccgtacttcccacaccggtagagaatgcacccagggcaccatatgtacaggtatgagaatctgctccgataatcacatcgcctgctactgtcagacctttttccgggagaagtgcatgctcgatacccatttctccgacatcaaaataattagtgatatcatgtttacaggcaaattctcttacacacttgcagtgctgtgcagacttgatatctttgttcgggataaagtgatccatgaccagtgccactttatctttatcaaataccgtatctactgtcatcttatccatctcatgaattgctaccggtgaggtgatatcatttcccagtaccagatccagttctgcttcgatcagctgtcctgcttctaccttctcaagacccgctgccgctgccagaattttctgtgtcatcgtcattcccatgtttctgttcctcctatgtatataatgttgagggcaaacctgttttacccctggtatcatgaaattgagattttttttcatttactgtttgctattgtaacatatcttgcgatataataacaatacatataaaatatattctctataactacaggttatattgtttcatttgtcactgatattctatacacggaggttttacatggaacagaatctttctctttattatgtatttcacacggtcgcaaaaaagggcagtatttctcacgcagccaaagaactatatatcagccagcccgctatcagcaaatccattcaaaaactggaagacaatctgaacacaaccctgttcaaacgaagttcccggggtgttactcttaccgcagatggggagatccttttccagcataccagagatgcttttgatactcttgaagaaggagaagagattctggcacgccatcatgctcttggagtagaccagcttcgtataggtgtcagcactactctttgcaaatatatccttctgcctcatctgcaacgctttataaaggcgtacccacatgtaaaaatatccatcagctgtcagtccacttaccagactctgacattactggaagaaaataaaatagatattggtcttgtcggcgaaccggcgatacagaaaggtttttattttcatccactgcaaaagattcaggatatttttgtaacaacaactgcctacctggaacatctggaactgcgatcaggtaacgacgatctttttcagaccgctacatttatgatgctcgatgaagaaaatattaccaggcaatatatcaatcgtgtgtttctggaacatggtgtggagttttccaatattctggaagtctcaacaatggatcttctgatcgaatttgcaaagattggaatgggtgccgcctgtgtgattcaggaatttgttcaggaagagttggatcgcggggatctgattactcttccactgggacttacattttctccaagacaaataggattcgcctgccgtaaacacgaacaggcgaatcccgttattcaacactttctggatttacgaggaaacattctcccgtaaatttcaaagtactattttatcttgcttcctgcaggatcagtacatcccattttttcagtaccgttcctgccggaatgactgctccgctgatcaaatctgtttttccgctaaggctatccggaagaacctgatcctcatctttgaagttcatgacataataatatctggtatcgtcagaagttctgcaggtcacttccagcccggttacttccgaaatcacagctcttacattcacttcatttaccgcctgatccagaatctttgcgagtcccgcatcatccatctgcgttcctacataatacgttgcacctttgccaaaggtatttcttgtgactgcaggcatatctgcataaaaatctttctggtacgttgccagtgcttctgcaccttccagatgcagcagatcacataacaggttacaggatgctgtagttccgtccgtaaatttcacttcattgacctgttccggtgccagcgcatcaatttcttccacccatacacccgccatgtcacgcagcggtcccggatagcctccaagatgcacattgtcagactggtctacgataccgctcatatatgtggtaatcagaataccgccattctttacaaaagattccaaagcttctttcattccttcttttaccatgtaaagaaccggtgcaaccaccatcttgtactgtgagaaatctgcatctaccggaatcatatcaacactgatatttctttcatagaaataattataatacttatgaatctgctctacatatttcagatcttcggaaggtccgctagtgtattccagtgcccagtaattttcccagtcaaaaatcaggccgacatctgaaagattttcgcttcccagtgtctttgttccaaaactttccagttctttaccaagctgagccacctcccggaacactctggtgttttccgttcctgcatgagcaataacagctccatgaaatttctcgcaagctcccacacttcttctcagctggaagaactgaatcgtatctgcaccgtgagccatcgtctgatagctctgcgcacgcatctgtcccggacgtttcagagagttgtatttctgccagttctgctggctcggtgtctgttccatcagcataaacggttcatgtttcaggcctctcatcagatcatgtttcatggcaatcatgctccatggagtatcgtatgccggatagttatcccaggataccacatccatttctttcgcccatttgaaataatccagatctttaaacgttcccatcaggtttgttgtaatgactacttcttggttatatttacgaactgcatctctctccatcttgtagcattccagaacactgtcagaattaaatcttcgataatctatggaaatacccgcaaatgcggttttctctgttcctatgccttcactcaatgcattcggaaccaccacatcatcccagtcatatacgttatgtccccagaattccatgttccatgctttgttcagtgcttctattgttttgtatttgtcttttaaccatacacggaaagcattctgacagttgtcgcagaagcaggtcactccgtattcgttattgatatgccagcaggtcacatgcgggttggaggcatagcgttccgcgagcttatcggccattgcagaagcatatttgcgatataccagagaattcggacaggcattatgacgctgaccaaaacgatgctgtctgccttcataatcggtactcattacttccggatattttctgaccatccatccaggaagtgctgctgtggaagtggcaaatacaatatcataattttcttccgaaagcatctctacgatcttatccagttccgcaaaattgtattcatgctctgaaggctgaatctttgcccaggagaatacattgatcgtagcgctgttgatccgcgcatctttgaagattctcatatcttctttccatacttcctccggccactgatttggattataatctcctccataaagaattcttttgaattttggctgcataaaactgctcctttcgctttgtccatttctataattatccgaatctattttgtttgtttctgataaccatttgttatctgtattatacctctcattttttcagatttgtataacaagacatacttctttctataacatttcgaaacaaattgacagatgttttttctgtgtgttaccatgaatctgaaaatgcatcagtctgtgcgaaacttcattttcgtaccattcaataataattcttacggaggttcttcctatgcctatctattttaattcagctcccacagactttccctttcagtttgattccatcggtaacaactggaatcaggagcccacactacgtccggatggttttccggtttatcattatctgcagacccaagaaggaagcggcatcctctctattgatgaaaaaaaatatacccttggagaaaaccagggagtacttcttgccccggggataccacatgtttaccattctgcttcaggtcagtggattactttgtttgccactttcagtggttccatgagcccttatttttctgccttatttggttcttctcatttacttttttttgaaaacgaaaaagctgcctctatccggaagctgattgatcaggccgttcttcatcatcaggaaacaccgacagatcctcaacttttgtctctggaatgttatcaggtgcttttgcagtttatcggaggacttcagtctaatccttctcaacagccagcctgggaaaaatatgttcggccggttcttaccattatccataccagatatatggaagatcttaccgctgacgcactcagtcagaaagtcttcgtcacaccacaatatctgtcccggcttttttccaggtatcttggatgttcggtctacgaatatctgaccaaattccgaatcagcaaagccaaggaacttctggtcagtcacagaaccaggaaaatacaggatatctcccaggatgtgggctataccgatgccagtcattttgttctgatgtttcgaaaaacaaccggaatgacaccttcagaatttcggaaaatcaattaaaccgagtttaaattccgcatcgtaactgttcagtaccttcacagttacgagcaaaaatgcatttaaaatcaccttcggtgatggcatttttgcttgtatgtctcgggattttggcatatttatgccaaaacacctcgcgggataatggctactgaatagttactccgcatcacaatattttgttattttccgtcaagaacacttgttcttttctctattctatggtatcctgagattataatgttaaggataaaacacttttgaatctcacatcatattatattacaggagataataacacatggatgggtatcaatttgaatatcagtgtgcagaaattttaaaaaggaatggattctccagagttcaggttacccagagttccggagatcagggcgtagatattattgcccgtaaacatcggaaaaaatatggaatccagtgcaaatattattcatatccggtaggaaacaaagctgtacaggaagcctatgccggtgcaaacttttatgactgtgataaggccatggtaatgaccaatctcaccttcacccgggcagccacagaactggcagaaaaactggaagtcgagctttgggatcactgccccaccacacgatactacagtctgctgtttaaacttatgagcctgatgaatattgtattttttttatatggaattctgttgttattttttatacaaaacaaagataccttttcttttcatctgcccggtggagttcttcttggtgtccttctggtagctgcttcagtcttcggttttcttggatggcgatttgttctctgcaatctggcagcaggtagtatctatctgtacctgtctctccatacagttttgctgccggcaatcaccagtgcggcttattcagatatccagctgcttgttctgattccgacagctgtttatttattgcatgcctgctggctggtggggcacaaacggcattgacacgatctccgtgttgcctgcttgttgcctatgcctcttttccgcccgttctttcgtcatattgcacaacgcaaaaaagccccggaattaagctttccggggctttctgtgtttatctcgtgcttacatatagtgctttggattagttgttgatcagtttgtcatcttcgttgttccagctgtacagcttacggatctctttaccaactttctctgacggatgctcagaagccagtttacgcatagctttgaagtgaacctgacgacctgcaggagacatgtcaagcaggaattcttttgcaaaagaaccatcctggatatctgtcagaatctgtttcatagctttctttgtttctgctgtaacgatcttcggtcctgtgatgtagtcaccgtattctgctgtattggagatagaatatctcattccttcgaaacctgactggtagatcagatctacgatcagtttcatctcatggatacattcgaagtatgcatttcttggatcgtaacctgcttcacacagagtttcgaaacctgcctgcatcagggcacaaacaccaccacacagaactgcctgctcaccgaacaggtctgtttctgtttctgttctgaaagttgtctccagaagaccagctcttgctccaccgattgccagaccataagccagtgctctttccagagcttttcctgtagcatcctgttctacagctaccagacaaggagtacctttaccagcctgatattcacttcttacagtatgtccaggtgcttttggtgcgatcatggttacatcaacgttcttcggaggtttgatgcatccgaaatgaatgttgaaaccatgtgcgaacatcagcatgttaccttcttccaggtttggctcaatatcttttttgtacatatcagcctgcagttcatcgttgatcaggatcatgataatgtcagctcttttagctgcttctgcagctgtatatacttcaaatccctgtgcttctgcttttgcccaggatttgcttccttcatacagaccaataataacattacatccagactcttttgcgttcagagcatgtgcatgtccctggctaccgtaaccgataacggcaattgtctgtccttccagcatagataagttacaatcttcctggtaataaattttgtttgccattttttgttcctcctaaaatggatatttttctattgttagggggtttcccctctagcacactatgtaattgacagcttttcgctgtatcttctgaccgggcttttcatccggtttcacgtttttataaaactaatacgtaatcagatccacgtgacagtccggatactccggttcttgccaattccagaatctcattaccatctgccagaagctggagaaatgcctccagttttgattttgaacctgtcagttccaataccatggaatcgacggacacatctacaaccttcgcacggaaaatctctgcgatagatgtgacattctgtctgtttgcctgagatactctcacttttacaagaatcaactctctgataacactggcatccggttcaagaatcttgatatctctaacatccaccagtttgttcagctgctttgtaatctgctcgaggacatcatcatctccgctgcagacaaccgtcatacgggaatatctcgggtctgcggttacacctactgtaaggctgtctatattgtagcctctccggctgaacataccggcgattcttcctaaaacaccggctgtgttatctactaaaatagataaaattctctgtttcatattctttcccactttctcttggtaatgtgtaaaacagctttgtttttcattctaccaactctgtccttctttgtcaatgcataattaactaaaaaacaacaccctttttgtgtttttttatgctataattatagaatagtgtagtagtcagaaaatattgatccgtacttcatactttcccaatcccggtaccattgagacgtccgaagtatgtatgcatttgcggttttaacgaaaggaggcgtatcattatgttttgttcaaattgtggtgctgaactaaaagaaagtgatgtcacctgcccctactgcggtatgcttcagccttccgctgctgaatctgaatacatgcaaaaactcgaacatctgaaacaggatgtacaaaatctgaaagctgttcccacaaaggaatacaccagagaactgtgccaccaggggatttttactgctaagattgttcttattattttctgtatctttcttctgctcttcgtaacaggggtatctgtcttttacggaagaagctatctggaaaagaaagaactccgaaaagaaaatgcatttgcaaaagagtattttccaaaattaaatgatttatatgcttccgggaatgatgaagaagtgtatacatatatcaacagtttgtataacctggatggaagcactgctttatatcgttggaaacatatggattactacaattattacactttatatatggatgtaaagtttttaaacgatgccatcgctgacaacagttacaatgaatacgatatcagtacaggattctattctgccatggttcttaccagagaagaattttcttcgtatcccaaaaacaaactgacggatgcagagcttgccaaattggacacatttattcaggagtcagactctctgttgctggaacattttcatctgacttctgatgaggctgatcaggtgtatcaggactgtctggatgacgggtatctgagttataaaaaatgtatggattatacagccagccataaaaatcaattttcataaggaggaataacagatgaaatgccctcattgcggcgcacagatcggtctggaggagaaatattgtcctttctgtggccttccaaacgaatttgccagaaaacatcaggaagatatggatcgatacgagcaggaatttcagcagactcagtctgaagtttatcagaagaccagacattttaccagtctgactgtacctttgactgtcattttcgttctgattttattaaatattgtttcttttgtttttgtagccaaaagctgggatatcggctccagtcttcaaaagcaacagattcacagccatctcagcaaacaccaggaaaatatagatacttatatccaaaatggtgatttctgtggactttcttattattacagccagaattctctgtattatgaagatgcatttgacaaatacaacgccctgatcagcgcctctgattcctatcgtaatatttatcgaattcttgtggataccagcagttcctgtaataattattatttcgatacagatgagatttctcataccatcacaacacttgcgcgtgatgtccatgatatttataatctcgaagataattactcttataacgcagatgaatattttacagacgaaaccaatgctgctctgacagatctgcgtacccagacaaaggctattctggtggcttatgccggtcttactcctgaagaagcggaagcacttccggatctctcatccagaaagcaaaaagaatacctggaaagggggcttgaaaaacgatgaaacgattttcacctggaaaactgatctgtggtattatcactattatcctgaccctctcctgtcttctgatgattgccatcggaatctcagagatcagagattccgcttctgttccttcttattatcttgatgaagaagattatatttccaccctgcaacaggaagattacatgaatctatatgatatgacctgcagggactgcatccctgataagaaattgagttccaatattaaagcctgtcaggcagtagccagatattatcaggcagctactctgtataaagcttacgtactggcaggtgacaatcttgctatcacccgtcaggtacagcagatggaacaatatgcggcacaaaccggtaattacagtgactacgtcgagaagatcaatcagttactggaactggattctcttcacacgggggaaactgccaccaattaaatcggaggaaagaactggaaaattttcctgttgctgtcattcgtcggaagttccgcttcgatcgggagccgtggtatacggaaaggtttgatgagacatatgccgatgtggaacgcggatgtgacgggctgctgtattatctgctgcatggggataaatagggttttatttgttctcgccggaatgaaaattcgaattgtatttttttcatttgtcaattcaattatatcatttccgtagaaatgatataattgaatgtataaagtttaacactatatgtaaatcaaatttgtttcactgagtcaatataagatattggctaaaaatcataccgaacaaccgcgcagtttttcacaccccatgcagcatattcttcattcgtcatatcggtaaaataagactgcacaactctggcgattccgttatgggcaaccagaatgtaagttttttctttcgattctttcctgatatcatcgagaagattatagattctctgtgccagacgaagtgtcgattctcctccctcatggctgcaggcaaagaattctttcgcctttttaaagtcctctccatcccgcggcgtagattcccattttccgaaattttgctcgatcagtctcggttctacccgacatgggattcctgtcatctcagaaatcaactgtgccgtatcttttgcccggctgagcggtgaacacaggatctcatctgcctggattccttctgcaagaatctttcttcctgtttctctcgcctgttcccgtccgtattcggtcagtgggctgtcggtgcagccgcagatcttattttccacattccacacggtctgtccgtgacggacaaagtaaaagtgtcccatttattattcctcctagtttctttcgcaatacttcttcaattcttctttcaacttctcgtaccgcattcgcttctcttccttcgcaaaatgcacttcccgaaactgttcaggattctcctcatagtccagtacttcatcgccgaactgctcactggtaagatcaaacttacagtctctgatcacattataacagtgataatttccacccggtctgagaattccgtacactctaccgccgaagatatcctgagcaagaaaagcggtgatcgaacactgtccaagtgtcatattttcttttgtccagttctgcctcatccgcggcgcacaggtatccgcacaccagacatgtgataatgcatcgtataaatcaacaggtgtctcgatccctttatattcggctgtaatcgcttttgcatctgcgtgttcccagccccaaaatctgtatttcataatactatattctcctccaaacattttttcaatcttttcaatttattttctgttatgctttcacaatagtgaaggccttcatgagttgaatgaagtacaggatactgcccttttgtctttaatatgtaatgttcttttatcagccattctataacagtatgaatcgtttctttagacatgttcctataacttccaaaacacgacagtctgtctaatctattatcgaaaatcttcttgttttctatgccatgaagtacatcaacaagcatccatattccataatagcgtactttacttacctcttggagtccacacaaaatatcatatacgaccgtattcaattcccatccctcatagtagcacccggatgataattttgctttttcaattttcacataatcattcggttgttgctggttttcggagtttttttcttctgacagatatccgttattctttatatcactctttttcaacgtagtatttggttgatttcgcacctccgataattcctttttttctgtatctgccgaatatcccatcctcgtataatactgttttttactaactgcattattacatccagttccatccggtttataattcgtacatcccagaaaaaatccattcgatttattaggctttataattaaataaccatctttgcatctatcacacttttgaattgcaagttttcccccacggcaatcattcgtcataaaaccacatatttctggttcatttgtacatatatacaaacgaagtccatatgcttttttatattttaattgcattggatagccacataacggacatacttttgtttgatactgctgcggttcttcttcgttccattctccgtgtaatataacatttttatagtcacgctttatttcaagtaaaaattccgatggattctgttctggagctatgcaaaacacacgattttttgttcttgtcatcgctacataaaacaaacgacgttcttctgcatattcgatagacttgtctcctctgattacaaatgcaagtaccggatcatcttctattttggaaggaaatccatatgtttcattttttccatttataataataacatcatcatacccaagtcctttggaagaatgtactgtcataaatgtaatgttcaaatatggatatttcacgcttttaatcttgtttcctctgttaacatattcaaataatccagatctttcaagtctatcaccatcaaatgcatatcgaccaagcagcaaaatttctcccggcacttttccctcttttttcttatacacaagtaactcttccaggactttttcaactgcatatgccattgcataattagcaccgcttcttcgatttccattgcgtcccttatatgtgctatcataagtatatataacaacgggatctgtaatatttttaggggacaataggcgtttttcaatctgctctttatttttctgaataaaatttcctgcaatatcgataacttcctgcgaattacgatatgttttgactattttaagtaatttagcataccccattttttcagcaaatttagtaaataatgtaatatccgatccgctaaaagcatatattgactgccagtcatctcccactgcaataattttcgcatttgttacctctgccagagcttttgtcaaatcgaatctttgcttggaaatatcctgatactcgtccacaataacatacttaaaatcaagtttttgtttcatttcttttacttctctgagaattcttgaagattcattaatcatatcttcaaaatcaaccacttgattttctttcaaccatctgttatattccaaataacactcatggcaaatttccagaaacaaccgacttcttacattttgtgttgaataatacattctttcaaattcttctgcgctatatccattcactttaaaattagaaataaatctgcaaataagattaagtaattttcttatatatctgttttcttctcctgcaacaagtaattccataacttctttatcagacttcggtttaagttcaaaattctttgcttccaattcttcttttaaatgtacagctaaagggcgcccgtccttataagctgaaaaagtataaatcaaagttgtaccatgacgtctatgcaacatgattttatctcttacagccttcttatacttttcaatttcatcctgattatatctgtcgttttttccttcttccgtaattccaaaatgttcaagatatgcttttttatccccctgaaatataacaaaatctggagtatataatttatttgaatttggtatgtaaaatggataagccggttcatattcatattcaatattattcaaatataataagtttgcaatttctacctcctgctgtgagcgtaaaacttcgttctgtattgttacagattttttggttcgagcgtctataacctctctcctgaagtcttccaaatcacttctcattgtagcataatttgcctttgcaatattattaaaaaagccattcagatcatcaccctcataaggagcatcaaagtaagacgcaaaaaacataatcaacttattaacaagactctcgtttttcataatcgagcctcgaaaatagtctcttatcacgtaatacatttttgaattatctacaatattaaatttttcctctggcagatttttatgaataattgcattccctgtggaatgaaatgttgcgatcggacattcaattcctaacgcaccctgtatcttttctttaagttcagaaactgctttattcgtaaaagaaacaaccaatatttgtttcggatctatattcttcttttcaacaagatattttaccttagctgctactgtagttgtctttcctgctccggctcccgcaataacgagcgcatagtcctcatccgtaagaataacttttcgttgatcttcatccaacacaatcgccggatctacgtcttttaaaatattatccagatattccttttcttttttcagtgcttcggaaatatatatatcattatgtttctcgatttcactctcaacatttttataaaatgctaatatttcatctactttctcctgacttgtatgattttttgcacaaaaatcggaaagcattccactgtcttctaatacctgaaaatatttttctgtttcttcaaattttttttgcaaaccgatatattcactttttgcaatatatctatattcctgcagtaaatcattaatagctactgaaaatttcattagcttttcaagattttcattcctgataaattccgtattttcctgttccctttttaaaaagattttcttgaattcatgtattcgatcaaaaagcctcatattatgaaccaccctaatagcgtatacttatttatctctactataccattacctcgaaaagctttcaatttgattttatatttacaaataatactcggaattgattcacttgatcaacgtaatatcacggcctaaaacaaagacaaagctatacaatgaattgtatagctttgtctgttacttatcttatgttattatttcacttccaccagttcaatctcaaagttcagttcttttccagccatctcatggtttgcgtcaaatgtaatagttttttcatctttcgcgtttacctttaccgggaatggctgaccgtactggttggaaagatacacctgctgacctacagtaaggtcttcagaacctggaagctgggcgatctccacagtaaagatcgcatttggatccgccataccataagcttcttccggcatcagatgaacagtaaccttctcacccactttcatggttgctaccgctttatcaaaaccaaggatcatctgtccggcaccgcaggtaaattccagtggttcgccacggtcataggaactgtcgaactgagaaccatcgttaaatgttcctctgtaatgtgtccggcagatttttcctacatttggtccttcaaatgacggctgatgacttccgcaaccaccaccgcagccgctgcagccgccatcgccacagttcgatccgcaggaatgtccttcctcttcttcatgatgatgatcacaatttacgccggtagatatcagttctcctttcaggtatgcttccactgcctggtcagcatcaccttctgctccggaacatacttcgattcccgcctctgccagtgctgcctgtgcgccaccaccaagacctccgcagatcagtacatcaactccctgaccttctaacactccggcaagagctccgtgaccttctccgttggaaccgatcacttcactggaaattacttttccctcttccacttcatataccttaaatgtttctgtctttccaaagtgctgaaatacctttccattttcatatgttaccgctattttcatttgtaaaaatcctcctacgtatttttcttttacagcgctttgttaagtataacacatttgtcactgaaatgacaaagaaataaataacttttgttactacgcctgtcttaaaaacacgttttcgagtttttattcctgatttcctgacaatgtagtatccagtgtaaaccagaattccactccattatcataatttttcacaccacactgctgattcatagactccatgatcgcttttacgatggacagaccgataccgcttccgccgtactctctcgtccttgctttgtctactttataaaatttgatccagatcttatccagttcttcttccggaatcgcatctccggtattgaaaaccgaggtgcggatcacaccattctcctgggtacatcggatatctattttcttttcatttttagcataatgaatcgcattggtgacatagtttgtgatgacctcttccaccttgaattcatctccccacacatgcagaggttctgtctggtggaacataatctcaacttcagcctgctgtgccagaatctgggaagactggatcactccctgtatcagagatgtcagatcaaaacgttccatattcacctgatcattaccaaattccagctgattcagtgtcagcagtttcttcaccatctggttcatctttcccgcttcatctataatcacatcacaatagaactgacggctttcttcatcatcgttaatattatcctggagaccttctgcatacccctgaatcagtgcgatcggcgttttcagctcatgggaaacattcgacagaaattcttttcgcatctcatcaatttcttcttttttttcaatgtctttctgcagttcattatttgccgtcttcagttccgaaatcgtctgttccagggtttctgacatctgattaaaattatgtcccagcacaccgatttcatcttctccgccactggtgtattttacatcaaagtccagattcgccattcgtctggagatctctgtaagttccgtcagcggttttgtcagacgttttgccagaaaagcgataaatgcagcaccgatcacacacacacctaacgccaccatcagataaaatcgattggataatgcaatacttttctgaatgctttctatcggtgatcgtacaataaaattcacaccgtcatccagcgtgccccagatttccagaaattccatgttcaaactggtatctttgttaaactgaatcgtataattatttgttttctcaatgatcttatcgcccttgggctcaaaattataaatatatccgaataattttgctgcaagtttttttgattcactgtcccgcagattgctgtaaccttccggttcagatccattccagtcaatgataacaaacgacaggttattggtagatgcaaactttaatgtgtctgtcttatccaccgcgtcgtattctttggctatcgtttcataactggttttcaatatttcttttttattctccagataatattgctccatgaatgtcatattcaaaaaaatgatcaatcccagagcgagtaccagaaagccaagaaatgctcctgttatctgccagcgtatggattttgattttttcattggtctacctcgaacttatatcccatgccccagattgttttgatataatctcctttatctcccattttgcttcgcagtttttttacatgggtatcaatcgttcgggcatctccaaaataatcataattccatacatgattcaagattttttctctggataatgcaattccctgattttccataaagtaggtcagcagttcaaattccttgaaactcagttcgatattttttccgtccacgctgaccatatgtgctgttttgttcagttcaataccgccgcatgtcagcacatcttcctgttctccgtgaccggatcttcgaaggattgcctctactctggcaaccagaatctttggactgaagggtttggaaatatactcatccactcccaggtcgaagcccatcagttcatcccgttcatcactttttgctgtcagcataatgatcggaaccctggagtgtgcgcgaatctcacgacatacctgccatccgtccatctttggcatcatgacatccagaataatcaaagcaatgtctttctcttcaaaaaatatatctaccgcctgttctccgtcaccggcttccagcacatcaaaatcttttttcatcaggaaatcttttaccagtttccgcattctgctctcgtcatccacaaccagaatcttcagttttcccattcctgttcctcctcataaccatgtaatctgctatcacgttttatgtgctcagtatatatgaaaaatatgtagcttttgtgttttttaatctctcttttacttatgtgtggtcataaactgaaaaagtactcccgccgggacacagacagccataataagcagcatcagaatccctgaatctttctgcaggatcccgcagacaccggttgctatgctcataccgccactgacagccatcaaccagataatacatgggcgggcatattttactaccaggatccccacaaggacaccaaaaagtgttcctgctgccaaaatcaatatttccattttgggttctatatccagctgacgaaccaccattaatattccataagttgtgagaacccatcccagaaaaaatgcacctataaggtacacctcatatcccagaaccgcagttatgccccctgctgccagtggcaaaatccattttacatttcctgacaactgcagaatatacacagcggtcatacctattccggttcccagaaaaaagccacagactgaaatccagaacttcaacatccgataccccataaaacaattcagagccccaaaagcaacacggacaatcaagagtaatacagataactgtgccgccacctgtgtaaattgattaattccggacaaataatccattcttctctccccttttgtttttattttcgtgtattatactctttttttcaaactcctgtcaaatatcaccagagcatgctcgatcagcagttctgtattaacaccaaacaatagaattcataattactcagtaccttcacagttacgaataaagaatttgcgagaaatacctcaacattccatcactctcccagcacagcatccctgcggcatctgccattttctgcgcattcacacagtatgccgacatacaggaattgtgtttatatggtcctgcagtcataatcaaaatatttgttataccctctgcttccatctttccggcaagcttttctgtcattatattatgtcgaagcttgtctttcttatattgagccggatcccggctatcttccaacgtggtctgcagtaccaaagtattcttataacggaatgcgcgctgtttcatttcttctgccgttccacaactcggtggacatgcaggatttaaattataacagccacacctgttttcttcacaaaagcttcgatattccggcacaaaaaccagtttctttgtatccataacggcagcatttgaaaatcccagatctattgctgctttcacaagattcatgttttgtatccctccataatctaaacgttatcctttgatctttcatttttaatatcaatcggtttataaatgtcatatatcaccaaagatagtatatcactatttcgtacccctagtacagcgtttcataaataactataccatacacgcaggatactgttatttacgaaacgatgtgccggcctgacatatcattatattcagaaagaaatatagtgaaaatttgtaactattcagtagccactgtcccgcgaggtgttttgacatgaatatgtcaaaatcccgagacatacaagccaaaatgccatcaccgaaggtgattttttatgcattttggctcgtaactgtgaaggtactgaacagttacgaaaattttaaataatgcatggaattgtagaactatttctggtaaaatattctattaagagaaagtgtgtgacaaatgaagcaacacgtaataacaccaatgcaatactacttgtaacagaaggaggttacttccaagatgggaaattattttgtatgcagtaaaacagatccaatagtggaaacaaaggctggaaagatccgcggtttccgcataaacaccacatatacattccacggaatccattacgctgaggctgaccgtttccagatgcctcaaccgataaaaccttggacaggaatcaaagacgcattggcttatggctatgtatgtccgttgttaaagcaggatgagcctaacatggaggttctggtgccccaccgttactggccccagaacgaacattgtcaaaatttgaacatctggaccccaagtcttgatccggatgcgaaaaagcctgtaatggtgtggcttcacggaggcggtttcagtgctgggtcatccattgaacaggtagcctatgagggcgatcacttaagtgagttcggtgatgtggttgtggtttccgtgaatcatcgtctgaatattctcggctatctggatctctctccattcagtgaaaaatataagaattctgccaatgccggaaacgctgacatggtggctgcattgcagtggatccatgacaatattgccaactttggcggagacccggaaaatgtcacgattttcggtcagtccggtggcggcatgaaggtggcaacccttatgaatactcctgcagcagatggtctgtttcagaagggtatctttgaaagcggcgtttatgaggcaagtatttatcagaaagaggacggggacggcaccgagatcgtgaaagcccttttaaaagagttgaagctggatgcatctgagatagaaaagctggagacgattccttattatgaactggcaaacgcctataataaagtggaaaagaaggtggctgcaaagggatgctatatcggacagggtcctctggaaaacgactggttcctcgggaatccaatcaaatgtggatttactgatcatgccaaaacgattccggtgattgtgggatctaatatcggtgagttcgattttggtcccgttgtgcccggaaagcatgatatgaaccgtgaggaactgatcacatttctgacgagaaaatatgccgatgcaactccggagttgatctctctgtttgagacggcatatccggacaaatcaattgccgatctgtggtcagtggacactttctttcgtccggcaaccatcgaattcattcgccagaaatcagagttttctgaagcacctacctattcctaccagtttacttatgagttcccgattgacgggggaaaagccgcatggcactgtgctgagattccattcgtattccacaacatcgaccgagtggctgtctgcaacgtcccaggtgaaaccgaccgtctccaggaacgcatgaccactgcctggatcaattttgcccgatatggcagtccggatactccatctctcccgaagtggccggtatctaccccgggtgacgaggcaaccatgattttcgacaagacctgcgaagttcgtcacaactttgatcacaagctggtaaagaaactttcggaaacggagttcaacccgatgactcctgttgtggaaaatgaggaaactgacgctttctttatccattgataagaagctgtaataaaaatacaatccacataactgttcagtatccactatccgttaagtgttttaagtcgtatgcatgaagataccaaacaattataaatccagaatgaaattcgaagtagtaacttctgatttcattctggattttttacgatatctacctctgctgaaacatataacccatagcaagatcaggtatgattttaatgacatgtcatttgcaatgatgctccttgaatctaatgcttgattgcttcgcaatacaattctgaccatgcaggaacaaatcctgctcccagggcaactctttgtgacgcgatgtgagacattgctgtaccataaaaaggcaatctttttttgtctaaaatctcgtttttaatggtagcaacaagcatcgtgcctattccaagtccttctgcctcaggcatgacattaatcccgatctgccacatcctgtcactgtcgctggttgccccagccattcctaaaagccttccgtccttatacgcaccaatgcctatttcatcttttggtaatccgtcaaaaataaaggcttctccaaaacgtttatcccctcgaaactgctccagttcatctccgatgaatatttttatatcataatcctttgtgtcaacatccgatttttccgtagcaatataaaagggatgcgcctgtccgattcggcattgaaatctcaggagaccttcttccaattcatgaagacatcccatatccataaaccatgcaccattttccgtcttgaacttttcccttgcccattgaataatatcttttcgcccggatgcaacaattttaccattcacagacgcagccttaaaataacattctccttctttgaagattctgcgaccctctagttgcttatattccatgaagacattctctttgctcaggattgaatttacatccgtgcaaaaatcaattgctaactgctttgccaatatttcgttcattttctattttccttattatacagtagataagtggtctgctgatattctaatcaactccttgcttacgttcttaataattatcattcgtaactgttcagtaacttcacagttacgagcaaaaatgcatttaaaatcaccttcggtgatggcatttttgcttgtatgtctctggattttggcatatttatgccaaaacacctcgcgggataatggctactgaatagttactatcattcttaatattcaaactgtcgataatatctccgaatagaaagcggatgtcttaaaaacagttccatgtatgcatccacacgattgtttatgccgtgcatcacaagatgagagatggttcctctgtattccgggctgattccctttaattcgaattcttttgtatcaatgatcgtataatttccatttacgcgaggcaggaatcttgctacgcgttctgcaaggggtctctgctcatcttctcccataaataaggtgaccggtgtatcatccacaataatctcctgcattccatggaaaaattcctggcagctgatggatttggtgcggatccacatctgttcttcccaatagcacattgcataagaataagttgcgccatactggttgccggaaccgataaagtaatgtggaaggtctttatgctccttcagaaatgccaccttattctttgcatattcataagcccattcatccgaatccttttcaacctgaaccaatgcatctgcaaggtaagtttccatttctttattgtagcgatcgtattcgtcaaactccccatttttatacatcagatagtttgctgtcatatagaattttaactgttcgttcataggatagaggatcagataatcctgtttgtccggctgtgtaagaatactatccggtgtgtcaataaatgcgaatactctcgcaccaatctcgtgaacccggtcaaccagctgaaccatttccttagtatttcctgaaacagaagaatagataactacagacttttccgtaaatcttttatttccggttgtgagaaattctgctgcattttcaacgtatatcggaagttttgatcgtcctctcatgtaaacttctacctgcatgctggatgcgtaagttcctccaataccaataaaataaataccatcaaatccttcttcccagatctggtcaatgattgtttcaatctgcggtcttaaagccaatgccccattgacactgtcaacctgtgcctgttcgttaaagttgcgaagactggcgccctctgtttctttccatgcttttgctgcatacttcatgtttttatcccccttgtccatatcttttaatttataattatcgtaattgttcagtaccttcacagttacggataatattctattctgtttttctttgaaaatcaccaggcgccaaagtattttaatgtttctgtggcattcgttgcacccagtttcatagcctcttcaatggtttttccctctatcattccctttaaaaagcctgcaatatagctgtctcctgctcccatgctgtcaacaacttcttcacatggaatgattccaaatctgtgaaaatcttttccgtcatagcacatacttccggcagttcccatcatgcagatcacatatttcggccctttttcatgaattttcttcatttgttctctcaattgtgaactgtcattttcatctgttgagtagaataaaaaatctgtgtaaggaatggcttgctcgcttgcattgctctccagataagtggcacagtcaaaagcagtagtaattccccgctctttcagttccttgaactgtccttccacctttccccaaacgtcacagatgaccacatcaaaattttggataaaatccatatcttcatcactgagtacgtaagtttccagcactccttcctcataatctccaagaattctttcaccatccaccagttcaacctgtgagatagcggtctttccctcttccactcttaagtgagaaatattcacacctttctttttcatggcctccagcataatctcaccgtacgaatcattgccaaccgggccaatatatgcggcctcacctccaaggcgaaccgtatatacagccatgttcaccgggccacctcctggaaatgctttacctccatccaggttattataatagtcaatacaattacttccgactgctgctaatttcattatctttatcctcccattgataaaccgctttcctacatccctggtacagcgttttcaatctatctcctttaatgtgctgtcagataccaaacatctccctgcaaatcttcttcccgcatgacgttttgaaaatattctgataagcttttatagctgcctctttcgatgacccttcctccataatattaaccagaaaatcagcctctaccaatatctggtaatccatttcgttaatattgccatacgtatgatgatgggcaatcaaatactgaacccgttcggatacattgtaatcaaagcccaattctccaagcagcttttctgcaattgccggaccttctttttcttgtaattttccattgcagcttccatatttttcttcacagatatgaatcccaatatcatgtgtcaaagctgctgcttctatgataaactggcaattcttgtctacattctccgtttctgctatcaacttcgcatagctgtatactttacagaaatgttgtatccgctttgcgtctcccttatataattcaatcatggccaaatgtaattgattaatcatctcatatttcctcctcttgcacatgtaattaatcataagtcaaatatacagcttttataaagctgtcacaaacgacatcgcataatatattcttcttgctaattgagatttatcgtttatttataacattataacataaaacatggtcaacaggtgaactgattctgttattattaccaaaaaaattaccgttttattcttacattccggtttataattctgtgttttaatgatatagtaaaggtgataattattctttctgtactttcggagttctcccacgcttgctttgcagcaaactccgcgaatacagattcattgcaaaggagaaatttctattatgaatgaaacgattttaggcaaccagctgcgaaaggttccttctattgcagtcggatgtatgcggctttccgaaaagtcaaaagaagagatgaaccattttatccactccgcgctggagcagggagcatatttctttgaccacgcggatatctatggcggcggcatgagcgagactgtgttcggtgatgcattttcccacgatccgtccctgaaaagggaggatgtttttctccagtcaaaatgtggcatccgccagggctgctatgatctatcaaaggaatacattctggaagctgtcgatggtattttaaagcgtctccggacggattacctcgatcttctgctgctccaccgtccggatgcactcgttgaaccggaagaggtggctgccgcatttgatgtcttgtttgacagcggaaaggtccgccattttggtgtttccaaccataaaccaatgcagatcgcactcctgcagaagtatgtccgccagccactgtttgccaatcaggtacagttcagcattccggtttccaacctggttgcaaatgggatggaagtcaatatggaaacaccgggttctatcgaccacgacggaagtctgcttgactactgccgtctccacgacattacccttcaggcatggtctcccttccagatgcctgcatggaagggctgcttcctcggaagtgacgagtacccggaactgaatcagaaacttcgtgagctggccgagaaatatcatgtcagtgatactacaattgcagcagcatggatcttacgccatccggcgaatatgcagcttatcacaggaactgcaagcgaaagccgtctgagagaaattattgcagcatgtgatattgcactgacacgtaaggaatggtatgagctgtatctggcagcaggacatccgcttccgtaaagattttggcacgccccagagcgtgtctgaaatatagatttcatgctcttttcgatatttccgtaccaatcaaaattaatcaacggatcaattattgatatgcaacgcaaaaaagcatttctgtcacgtttttttccgccagaaatgctttttgttgctttctctgtttgtacggttccaataaacctcttttacttataatcgtttatccgaatgagggcggcgtagcgggctacggcaaccgaacgaaggtaaaatataccgcaaagtggggcttgcagattgtgaaaatgatttttcagacacgctctagcaatcttaaagcaccgaaaagcatgatcttttgccccccccttgtatccttatattgcatatggattgtacaggaaaaatgttccaagaaatgccagcgccacatagatagccggctcccattttctttcagccattttacatttctccccacaattctttcctgcaattttcctggttgtaaaccatatcacatatccaagacatgcacctgaagtatttgcaatcaggtcatcaatatctgttgcacgtccgttgagaatctgagaacattcgatcaacaaggatacggcaaatcccaacatcaccgtatacctggcactttcacattttttccagatgcatggtgtcacaattccaagtggcaaaaacattacaatatttaaccagaaccctgtgcccaggtcggcaaaaggtcttaaattaactccacctcggatccccggtcttataatatccgccagcagaccaattcctgttactttgaagactgcccacaagtacaccagaaaagcatatacaccaacataatactttgccggcatttttttcatgttactctttgcttttatcttcataactccctgatatatgagacacggcagcaatacagtgataagcaggtatatattatataccccatcgtcgatcagataactacacaataacttcatcgtttttctctctttcttttatgatttgagaggagtttatcagatacgtcttaatatcctgtggaggatattcttaagtttttttgaatctgttgttatcgtggatttttatcagattttaatgcagcgcctttttagggcaggccttcgtgcattcgtagcagagaatgcattctgtcccatttttacgtttgcgggtttctttgttgacctccacgttcataggacatacctgcaggcatttaccgcagtggacgcatttcctctcgtcgcagtgaacgcgcagcagggaaaaatagctcataggcttgagaaatactgtgacaggacacaggtatttgcagaacgcacggttatccttgaaaattaaggcaagcgtaattccggaaaggtaataaaacgcatttccgacaaggaacatccaaaacatgattttctccaaatgcgtgacctgcatcagaaacagagctgaaaccaatgccagcgacaataaaaacatcacataacgcagaatccccagcttttcctttcgtggcttctgcggctgcttgtatggcagaaaatccagcaccatggctgtccagcaggcgtaaccgcaccagccccgtccgaacagcaacggaccaaagatcttcgccactgcataatggatagtcgccgcttcaaaagtaccgagaaacagataataccagaacccctcaatctgcatattctcccgggaaaacacgccgaggtaaagcagcatatagcacccaaccgccagctgcacaaaatgccgggcatagcgtttcccggcagtaaagagtgttgtccccaatgagaggcagcagcctatataactgaagttcagcagataaaacaggttgttctttgtgagccatagtgtgatcgctactgcttcaaacagcaaaaacagcagaatcgacacaacatattttgaaaatccacttctatttttcctcgttgtttttttctccatcgcttgttttcttctttctttttaatattacggcagccgaaccgccgcataggcctacag

SEQ ID NO: 2469 - DNA, 5169 bp, Unknown
  gut microbiota DNA sequence
agcgtcatccgtttcctgcagcaggacaaccgcctgcgtgccgtccagctcgtccagaaaaatcccgtcctcccggtcgttctgccgcagcttttccgtcagataggaaagagcagtaccggaggtataatttctctgggaatcatccgtcgtcgactgatagattcgcgctgccaaaaggatcacggtcagagccgagatggtaaatacaaaaaataccgtgaccggaaacagaaaatcaatggcatggcgcttctgggaaaataatttcatcgtttaccgtcccctttctatgatcgtaacttccggataaatattagagccctgtgtccggtagtctacaaaaaagagggaatcgtcatagatcagcctgtagtcttttttgatggcttccagactttccggatactgtccggttgttgcataacagtaggtgatatcccggttcagtgcctgggtcagactgtccttttgtctgcggactgtattttctgaaagggaagaggttcccagagaaaacagcagaatcaacagaatgaataaaaacagagaaaaccacagtttttttccggatttccgttgtggtgtgatctgaaatcgatacataggcagtccctcctgttaaataccggacataatgcccatcagtggaagcatgaccgataacagaatgataccgacgatcagagagagtccgatgatcagggacggttccagaaccgccagtgtgttgctgatccgggtatcgatctcttcctggtacatatcggaaacctgtttcatcacctgatccatggagccggtcttctgtccgatcgaagccaggcgcgcataagtaccggtaaggatcccggaggtaaataaagcatgagaaagatcttcgccttcgtttacctgcttctgacaagcgtccagttttacctgaaaatcaggatcctgattcagcatggcggcaagttcaagcccgcgttcgggggttagaccgcttcggagagccagattcatcacatcggcaaaccgacagcccgcctgttgctgtgccatagacgaaaagaaacgaaaatgcttcgcaaattttgcaagcactgcctttcctttttccgtacgacttccaaaaaacagtgcagcggcggtggcggcaagaagaactaccaggactacagaatagcggctgatggcgttaccgatctgcatcagtgcaccggaaaagccaatcatctccgtccccaactggacaaatacctggttgaagatcggcatgacttttacgagaagcaccagaatgaccaccagcatcataccgatcatgatcatcgggtaagtcactgcgttgcggatacttttggcgatactgtcctcgcgttcatagtgttcaccgagtgcggacattacttcgtcgagagtaccggtctcctcaccgatctgtaccatatgaacgagataggacggaaataagccggtttctttcagagaaagagaaaagtcggcagtttccatcagggtatccaggattctctggagaatttctttttcctgttcggatgtggaatcttccagcataatagtgattccttccagtggtgagataccggaatgaaggatcatcgccatctgggaacaaaaaccggaaagttccgggttaaaaaatggctgttgttttttattcataagaacctccctgaatcagtaggaatattttacggtgtagttgctgccgtcaccgatgtattttttcaccgagtcggcactgttgctggcggcaagggtgggatccatcagggaccagtctttcccgtcaaattctatgatattgtctacccagccaacctcgtccagatatacgctgatccaggcgtgataggcttctcccgaatatccaacctccaattttgtggggatatgctgggagcggagcagtgcggtcatcagggaagcatagtcaaagcaaatgcctgtccctgcctccatcgtggcatccggatccggaatgtagccggatgctaccgtttccgctttctgttcgtcgtaggtaatattttcgatgacatagtgataaacttgctgtacatagtcgagatcatctgcggaagtctcggacagagcctgtccctttttggttactttggaatcgttggtaaaccagacatattgattcgggtacaggtacggctgaaattcatccttcagcgtcacatcgaggctctgggaaaaaatcagtgcgtatttgtcatcggtgacattttcatagagatccgcctggtaagtaccgttgctcccggacagaggaaatgtctcatatgttccataggcatccggattcagtgtgtaggtgtataccgtgccgtcgggaatcataatctgcaactttatcttggaaacctcaccggtatagcagagcatcagatagccgttttccgtgtgggaggcatccagcgatgtggagtcatctccatatacagtggtctggctggcttccggtgtacagacatcggtgtaagtttcacgggatgtcgtttttgcttcggtctttgtctcggtatcggtctgttttcccggtgagaaaccggaagaacagccggagagagggaaaagagtcagcaaaaaaagaagcagtaaataaatcgtatgctgttttatcttcattcgtatcgcatgtaaactcctttcccttagtatgggctcccggaagccgttgccgctgttctggcagcaggattccgggagtatcgtatgattggtttcagtatagcatttttttcggagaaatgcagtaatgcatttggagatttgatggaaagcgggtatgtattgcacagaaaggtatttgcatcaggaagaataagaggttatgaccgcctgctttaatactggaaattgacagggaccgatggcgagtacttttttatgaaaatcccgcaggttgaaagcatctccggcaagttcgcgtgcttcctgttgcagatcgagaaattgcaggcagccgaggtaatacttcagatagttggcaggatcttccacgatcacctgatagatttcctgctggatcgccgtgtctgtgactccaagctgtgataaaaaggtggcacagcgcgcctgattccatccgttatagtggatcccggtatcgagaagggacatgatgcacagattcagggagcggttgagccaggcaaactgtccgttggtggtttccggctgataatagcggtaggcgaaggattccgcatacgttgcccagccttctacataaccacccatagggagcagatgacggacaggatccgggctggaggcggcaaacgaaatggtctgataaagatgccccggaaatccttcgtgtgccagcgtggtataaagttccagtcctcccatgttcgcgtgacggttgatgtaaatgtcattgggacttaacgtgtcaatcggcggcgtgaggtagaaggcagggctcagatgctcttccagatccgggtggacatattttacttcataagaggtggaaggggcgtctgggaaatcgttttggatctgcttttgcagtgtcttcaggatctgttcgggggagtcttcggcggaggcaggtgtggaagtaaaggacaggccggaggctgtgtcaatcagtccggctgaaaatgtgagtgctttcgaagcgttaccgccggtttgggtatttattataggaagaaatacctcactggcaaatgcctgtgtagcggcgttatcgcccataagctgtgaggcagcagaaagatccgtctgaaactggcggatcagccgggactggatctccggtacggtatcgtagacaccgcagctgcttttgatcagatattcgtagtaggcactgccgccggtaaactgacagagtccgcccggatttttcccgcttccttttaacagggacaggccatcgatcagagactggtaggcaggaagcacctgaccggtaagaatctggtggtgaagtttctgataggctgattttttctggtcagagatgccggagagactctggattttttcggaaaatacggaatccaggtaattatcctccgggttctggataaatgcactgcattggtcaatgatgcggtcgacggtggtatcgctcataaaggttccgtttttggctttttgtttttcgaaggtgaggatgctttcaaagtaggtgtccacggaggtgagcattttcaggtagttttggacatcgtcctcgttgcggaaggtgtattcggcgaggagaacaggaagctgcgcctgagtgccgagggagggacttaaggtttcatctaggaggtactggttggcggggagcagttgggtttcgtagtagagggagaggatctgctgggtcagctggttgtcgggggaaagatctttggttgggaaggagtttatcagattgcggcggttttcgaggaggatcttctgggcggaaagctgggtggggtcgaaggctccgagggagagggagtagtccttgatgccggtggactcggggtaggcgagggtgtagtggaggttcagagggttggcggatacatcggcggtgaagatggtattggtgcaggcgcggaaacggcggttgatgaagtaggagtaggtgaggacacgcaccaggaggaaggttaggaaacacaggagaattaagagggggatgaaaatttttttggagagttttgaaatatgcataggactccatgggaggtgggaattactatcagtgtatgggaatcgatgaggaaatatgttagaatgtagccagtggggacggagaaatatgggctgaaaaaatgatttctacaaattttaatggaatgggggaaatggttgctgcaatcggtgttgggtgatgggcaatccagtgaaggttttatgataattcatttatgagataaaggagacgaagtgtatgtgtgagaatgtgtatgatatgattatggtaggctctgggccggcggggttgacggcgggggtttatgggaagcgtgccgggttgaaggtggttattctggagagtgggtttattcagggcggtcagattgtgaacacgtatgaggtggataattatccggggctgccggggattgggggactggaactggcggagaagatgaaggagcatgtgaccgggcttggtgtggagattatgagagggaaggtgaaggggat

SEQ ID NO: 2470 - DNA, 5179 bp, Unknown
  gut microbiota DNA sequence
cagtgaatgaatatatcctgtcagttctttcttttcttctgacataagctcctccatctctttttctttttttatatcattaacttcgttcatgatcgacattcgccgctcccgatgaataagctgcgcttattcccgctcgctaacgctcattatctcatgattcgcaccttcggtgcttgacgctgctttcgcagctatcatgatcgacattcgccgctcccgatgaataagctgcgcttattcccgctcgctaacgctcattatatcatagaaaacatttggcgatacagcttttcactgcaccgccaaaagtttttccttatatgcttgttttcaattcgttattattctgttatctgaatccgtcagacaaattacattgttttgtggcaggttcttgcgataacatccagctgctgttcacgagtcaggtcgatgaacttaacagcatatccggatacacggattgtgaagtttgcgtattccggtttctccggatgttccatagcgtcgatcagtttttctgtaccgaatacgtttacgttcaggtgatgtgcaccctgatcgaagtaaccatccaggatgtgtaccaggttgttgactctttcgtcatcgtcatgacccagtgcgctcgggctgatggtctgtgtattggagataccatccagtgccagttcgtatggcagcttagcaacagagttcagagaagccaacaggccgctcttttctgcgccgtaagatgggttagctcctggtgccagaggctcgcccagttttcttccatccggcagagtaccggtagctttaccgtatactacattggatgtgattgtcaggatagaagttgtcggctcggaatctctgtaagtatggcatttgttcagtttgtgcatgaatgttttcagcagccagattgcgatatcgtctgcacggtcatcatcgttaccgtatctcgggaattcgccttctgtctcgaaatcaactaccacaccgtcttcgtcacggattgcttttacttttgcgtatttgattgcgctcagagagtctactacgtgagagaaaccagcgataccagttgcgaatgtacgtcttacgtcagtatcgatcagagccatctctgctgcttcgtagtaatatttgtcatgcatgtagtggatcatgttcagagtatctacatacagttttgccagccagtccatcatggtgtcgtaatgttccattacttcatcataatccatgtattctgctgtgatcggtctgtaagcaggtccaacctgaacttttgtcttctcatcgataccaccgttgattgcgtacagtaagcattttgccaggttcgcacgtgcaccgaagaactggatctctttaccggtctgagtagcggatacacagcagcagatgctgtagtcatcgccccataccggacgcataacatcgtcgttttcgtactggatagaacttgttgttacagaaattcttgctgcgtaatctttgaaagattccggcagtctggaagaataaagaacagtcaggttcggttccggagacggtcccatgttttccagagtatgcaggaaacggtaatcgttctttgttaccatggaacgtccgtcctgtcccataccaccaacttccagagtagcccataccgggtcaccggagaacagttctgtataggaagtaattcttgcgaattttaccattctgaatttcataaccatatggtcgatcagttcctgtgcttctttctctgtcagaacgcctgctttcaggtctctctcgatatagatatccaggaatgtggatacacgaccaacactcattgctgctccgttctgagtcttgattgctgccagatatccgaagtacagccactgtgctgcttcttttgcgtttttcgccggtacggaaatatcgaatccgtaagatgcagccatttctttcatttcgttcagagctttcatctgatctgcaagttcttcacgaagacggaaatcagttcctttcattccatgtctttcgtaacgtttcatatcgtagtgttttttctccagcaggaaatcgataccgtacagagctacacgacggtagtcacctacgatacgtccacgaccgtaagtatccggcagaccggtaatgattttattatgacgggcaactttcatctcgtctgtatagatatcgaatacaccctggttatgtgttttatgatattttgtgaagatttcatgcagtttctcactcggtgtatatccgtgtgttgtgcaggctttctcagccatcttgattccaccgtaaggcatgaatgctctcttcagcggtttgtctgtctgcagaccaacgactgcttccagatctttcatgctttcatcgatatatcccgggccatatgctgtgataccggaaactacttctgtttccatatccagaacgccgccttttgcacgttcttctttctgcagctcctgcagttttccccacagtttatctgttgcctctgtaggtccctccaggaaagtttcatctccgtcatatggtgtgtagttgcactgaatgaagtcacgtacatctacggaattaacccagtttttaccctggaagccttcccactgttcaaacttagccattgcatatcctcctgtgtttgtgtgtatttacattgttatctttttgtcaggtgtagtataacatcacttttttcaaaaaacaaatagaaaataatcccaaatccatgaaatataggcatgtatgcaattttgtacaatctttggcagatattgtatttattcaagaacaatttccatatcttgtgtttttttatcctttttttctgtttttcttctctgtttcataagatttcagtgccttcatggcgattccggacatcggataaagcataataatattaaacacggtcatcagacccacgccgacgtctccaagatcccacaccactgtgtatgctgccagtccgccgataaacatcatcaccaatgcaagtactttatagagattctgcggcagcattccatctccaaacagatatgatatatttgatcttgcataatataaaataccgagaaaagtggagaaactgaacagccagagtgtcgctgcaatgaaaatcacaccaaactgtcccagatggtagcccattgctgcctgtaaaagttccattcctaccgccccttcggtcaggctttccggcgtcagaagcatgatcatcgccgtacagctgcagatcacgatcgtatcaataaaaactcccagtgcctgggtcagcccaagttttaccggttgatcgctttctgctgccgctgccgcacagggagctgagccggaaccggcttcgttggaaaacaaaccacgtttcacaccattcatcaccaccgtaccaagtcctcctgccactgcctgacgaataccaaacgcttcctcaaagattctggaaaacactcccggaagggcagaaaaattcatacagatcaaaatcacagtaatcagaaaataacatcctgccataaccggtaccagcacatcaagcacttttaccgttgcagtttttcgaaaaatgatcactgccgcaagtactaccagaaccactgtggtatagattggcggaatgtgaaaggcattgtggaatgcagaagtcacggaattgctgataacctgactgattccgcaccagcagatcagtcctgagattgcaaagagaacggatattcccacataacgtttcttttttcctccccgcttttcctgtatgaatctgtgcatgtaataggccggtccaccacggtagccaccatataccgggtctttttctttatagatctgtgcaagagttgcttccacaaaggccgtggacgagccgatgagtgccgtcacccacatccagaaaaccgcacccgctcctccggcggaaattgccgcaaccacaccgactaggtttcccataccgacacgtgtagcggtagagacgatcagtgtctgtaatgccgacaatgtactgttatggctctccccttccgcctttccctttttttcaaacaatgtatgcaacatgtccggaaacagacggatgggaagaaatctcgttcggatcgtaaaccagattcctgccggaatcagtatcagtacgagcagggaaagccgaaaagaacttcctcccggaagcggaagcacgatccagtcaccccataaaaactgatatactttttcaattatcgctatcatatgacttatccttttctttttttattctcctgctgagaggattggacggattaccttggaagattcctgtgtttttctgtttttctgcggatacttccggtaattgtggtaattgtggtattttctgtatttgcgatgttccggttttctgatttctgcaccgttattctcctgacggactgcaacttcttttacctgctgttcctgtttttcttctgtcagcaccttttctgccaccggaatctctgtgttttccacatcgggtttctgctgcgccggattctgtgattttgtttcctgttttcttgtgtgtacctgcagtcttgttgtctgccccggatgtgcatttcccttcttctgctgtttttttccatggaatttcttctgctgatcaggtttttctctctcttcaccggattccttttccgctttttccattttttccgggtttcctggtttttctttcttttcttttttttctgtttttgaaggtttttcttcttccagatcttcctttgctgctgcaatatctgacgcagtcttcacattttctccacgttctgcccagtaacctgtcaggatcgcaagacctttatcctcagacacaatataatatgtctcgtttttaccttcattttcactgatcagatatcccagatatgtggacaattgaaaatccagtgcatttttcacaccgacttcaactttttgtaatacgatctttccttttgtctgattcagtttttcgtgaagaccgaaggtaagtgtggatgcgttttcactgtagaaaatacacacacaatccttcttgccaagctgatccaccccgtacattccgtcagcttttacattttcataatctacgagataatatgccataattttttctccatttcttccatgtttgtgaagtactattctttcaaccgcacattatttt

SEQ ID NO: 2471 - DNA, 34573 bp, Unknown
  gut microbiota DNA sequence
tcggtattggtgaaggacaagaatatttatggtacgaagatgcttccgcttccatcgcctacgtttgtggtattttataatggaaagcagaagatggatgaggaaggggagctgagactttcggatgcatttgtgaagaaacaggagaatccgaatctggaagtgattgtaaaggtaaaaaatatcaatatgggaaacagtcgtgaactttttgaaaaatgcagaccgatgcgggattatatgatctttgtggataaagtaagaaggtattcgcaggagcagaccttagaagatgccgtggagcagacgattcgggagtgcatggaagaagacgtgatggctgattttctgaagagaaacagggcggaggttgtaaagatgtgtctttatgaatatgacgaagaaaaacaaagagaatttgacagggaagaaggcagagaagaaggtcgggaagaagaacgccagaataccctgagagaaaaagcacgtgcggatgaagaaaaacttcgggcagatgaagcctttcggaaaattgctatattggaaaagcaactggcagaattgatgaaataaaagaaaaattggtcggaagtggcgtttgacatttctgaatagtcattaagagtacataatgtgaaagccagaaaaaaggaagacggtaagaaaaaatttaccgtcttccagatgatattcaggaaaaaatttcaaagattaaaaacaacttcctgcgcagccttacaaaagtatcaccgggcttgtgcagacgaggttttcgatgatggtttctttctcgaaaagcatcgggatgatgattgcatggtctgcgaaagaagtcagcgggatccgggcggagacgttgcaggtgataacctgatctttggtgcggagggtgatcttgtaatcgtcctcagcgagcggttcgtagcccggtttaccggtttggtggatggtgaaggtgagtgcttcgccatcgttatggacttccagcagaggtcccttgcatatccaggtgcgctggttgtggatcgcgtcggagagttcctggcagacatcgccgtccggttcgcccaggatataggtggagtaatgtccgtgcaggctgctgttgccgtgaagatccatgccgcaggtagcagccagtttctcaccggagagtaccaggtcttcccacagttttacgcccttttcattgacttcgtggagcggttccgggttgttgaagatctcgatgaagtcacagcaggaataatccgtgatcgtcatctcgaaacggcagccctgtgcgaacggccatccgaaggaatacggatgagcgacaccgaccaatgcccctttttcgcgggcagcctggaagagaagttccggtttgtgtttgttgatattttcccacggcacatactcggtcaggttcaggcagaggatatgtccgtagtacgtggtatattccatgcccgggataaatgcgatcggctgtggatgctctttcagataattttcaattttgtaatgtccggagatggtgttgtgatcggtcagggcgaacgcgtccacgtgatctgccaccataaagtccgtcagttctttgcaggtaaatactgcgtcggattcgttggtatgattgtgtaattccagtctcttatacataaaaagtcccccttaacgtgcgcgtaccgtcagctgataatcggtgttgtccagcagtacggaaaataccagaatggttacttttaacacaccctcgatagtcggctgcggaatacagccttccgtggcttctgttgcggtaaaatgcatatgccgggttgtcagctgtctgtggatattgccgatgaacgtgtcgttcagggttgccatggtgtggatctcggttttcataccgtgatagacggcgtcctcccattcttccggtgttggttcttcgatcccgtactcttttttacagtagtcgagcaggtgttgtttcagttccggtgtcacatcttccgggcggaagtgctgcggtccaaaagaaaattcaatatccagttcttcataagtctgatccaggcagacggtataggaaatctgaccgataaagtccttgcataattttccccctacctggtaaatggttttcatttcttccataggtttctccatttccattttctatagtagtaccttctttttcagaatacgcagaccggttgcgcatgtcaatagtctgaaaaaattcgtagaaaaatccagttattttgaaagttatgtgcattatagggaaaaaccagatttgctataatggtcgcaaatacggcagaaagtagatacaactgatgccggacagattgacgaaactggaaaacatgcgaaaataaaggagagtcacatggaaaagagaacactttacaaagaaggaacatacaaaaaaggaaatcttcacacccacaccacctggtcagacggtatgcatacgccggcggagaccgcggagcactatcgtagcaaagggtatgattttctggcactgacggatcactgggtttacgggatccatccggaactgaatcgggatgatttcctgctgttcccgggaacagagttggatatcgagctgccgggaagaaaggatcatcatctggtaggtttcggtctgccggagacaaaccggatcccggaacattatacctttgaggaagaacgcaaaaacggtgtgctgacaacggcagagcgtatcatcgaatatttcggacagagaggaaatgtaactctgtacggtcatccgtactggtcgaagatcgattctacggatatcaaatatctgcagggcatgatcggtatggaaatctacaaccacggttctgaatttttcggaaacaacggcaattccgagacgtattttgatcattttctgttcgtgagaaataaaatcttctgctttgccacggatgatgcccacgatatctcagaacacgatctgggtggattcatcatggtaaagacgaaagaatttacccacagaggaatccttgaggcgatcaaagacggaagcttttatgcatcttccggaccgctgctccatgatttttatgtggaagacggagttgcacacgtgacctgtgagccgtgccagcatatttatttccagacaccgcaccggggagactgtctgttcagtgatgatggagactgcctgaccgaaggcagctttgcgttaaacggggatgaagagtatgtgagagtgacgatcaaaaacagcagaggacagaaggcatggacacagccgatctggttgtggctgttctgattgatgatagaaagtaaccaattgtgaaggcactgaacagttacgacagaaaaaaggacatacaggaggaagaatatgttaaaattagtgacttttaatatacgatgtgattatgaccaggacggagccaacagcttccggttccgcaaacctgtgatcttaaagaaacttgccgaggagaaaccggatgtgatctgctttcaggaagtgctgccccatgtggcagcatggctgaaggagaacctgacggaatataccgtgatcggatgtggaagaagtgagacacttgaggacgagcagatgacggtcgctttccgtaccgatcgtctgaatctgatcaatatggaaaccttctggctgtccccgacaccgtatgtgccggcaagcagatacgaggaacagtccatctgtccgcgtgtgtgcacggaagtggtactggaagatcttcaggagaagaaagtcttccgtctgtgtgatatccacctggatcatctcggcgtgcaggcgagaaccctgggactgtctcagatcctaaagaagatggatgatgccgttttattcgccaacgcaccggtgatccttgcgggtgactttaacgcagagccggacggagaagaatttgccgtgatgagagaacggacagattatgtcaactatacagagggcattggcattacctatcacggatttgaaccggaagatgaaccggaacggatcgattatatttatatcaaaaaagcaaaagaaggctatgcaggacttacctgccgcagtgtaaaaaaatgggaagaccgcgacaaagaagtatggctttccgaccattatccgatttgtgcggaacttgagtggataaatctataaaaaatactggacatttttcagagtgtagatttttccactggtgccggaagaaatgtccattgtgagaaaaacagctgcttcgtataatagcctcatcaaataaatgaaggaggaaatctatgaaagcagcaagtgttgaaaaggctaaaaaatataagccgaaaaaacagccgctgaagaaacgactggtacgttactggccgttgtatgtgatgctgattccatgtatcatctactatgcactgatctgctatgtgccgatggcgggttctgttcttgcatttaaggattattcctttaagaaaggaatctggggaagcccatggatcggtctgaaatatttcaagaccttcttttccagctatgatgcaccacgactgattaagaatacactgacagtcggtgtgatcaaatgtattctggaatttccattcgctatcatacttgcccttttgctgaatgaacttcgcagcatgaagtttaagaagatctcgcagaccatcacctatctgccgcattttctctcttctgttattatcgtaactatgctgcagagaattctggcaccgagcaccggtgttctgaatcagacaatcgcagcactgggtggagatggaagcacattcttcctgatggaagcaaaatatttcttcagaatcctgttttccatggacctgtggagaaatatcggatgggattccatcatgtatctggcagcaatcagttccgtagacctggcattgtacgaggcagcagagatggacggatgcggaaaactgggaaaaatgtggcatatcacactgccgggtatccggggaacgattggtcttctgtttatcatgggagttggcggactgctttcttccggtgtagaacagatctggctgttacgtacacctggtaacatgtctctggctgatacccttgatgtatacgttctgcgtatcggtattcagggaggacagtttggatatgcgacggcgatcggtctgatccagggtctggtaggactggtgcttgtagtagtctgcaaccggatctgtaagaagatcacggaagtcggactgtggtaacaaaaggaataaaaaaggaacctgagaattcaacgaagtggaggaaactacatgaaaaagaaaatggtaaaacgcctgatggcagcttccatggcaggaacactggcagtgaccatgtttgcaggatgcggcggctcatctgatagcaaagacagcagtgcaaaaacagaagataccagtgaagataactctgacaaaccggatacctggatcgctgaccggaccatcaccgtacaggcttacgtagatgatatcggaaatacgcttccaaaagattttaacaacaccgaaaccatgaaaaagatcacagaactgaccggtatcaaactggatgtaaaatatacacctggtgacagtgatgcaaaagttatggcttcgcagctggcttccggaaccatcccggatgttatcgtatcttacctggataactccacaagaccggagttcccgcttctgtacaaagcagcaaaagacggaatgttcgcagatgtatctgaatacatgaaaaacagcgaagtatattccaaatattatgaagacgattatctgccggacgatacaaagaacaacattgtattccgtgatgacctggatggtgtatatctgtggcagatgagtatcgatgaaattgaccgttctctggaatataatgcagatgaagaatatgtaggaggtatgtatattcagaaagcaattgcagatgatctggggattgataccacagcaatcaacacacaggaagacttttatgatctgctggttaagatcaaagaaggcggttataccgatgacaacggaaatgctgtttatcccttgggaccgaaatactggggcggatctgttgatgctctgaaatatatcgcaaccggttatgactggggtgtaagcgatgactacaacctggatgaaaacggcgatgtaaagcatatcgcagaaaccgatcatgtatatgatgaaatcaattttgtgagaaaacttctggatgaagatctgatgaacccggaattcttcaccatggactctacccgtgcagaagaagtatccaaaaaccacaactcagcaattatcgctgacgtgcataattacgaagagattatttactccaatgatgactggatcccgttaggaccgttgaacgatattgccgatgacaacaaggaagttgtacatggaaagagcggtcgtggatgtatggcaatctccgcagatgcagagaatccggaagaaatcttccagttctttgactggctttctacaaaagaaggacagatcatcgcacagtatggtgcagaaggcgtatcctatacaatggaagacggctacccaagactgacagatgaagttgcagaaaaactgaatgatggagataccgattatctgatcaacactatcggtgcgggattcggtggatccggaaactacttcttcgagttcgttctgacaaacaaaaacaacaaagataactttggtgagtcccgtccgggagcatcttccggtaactctacttttgcaagaagtgtacagatcgcagaagattacccggtagaaaagaaactggttccggggctggatgcaacagcttatatgtccgcggacgaacttgcggatgtaaagacacagatggatctgcttgactgggatgagacattcgtacaggcctgcttcgcaaaatcggatgatgaagtaaaaacaatcatcgaatctttccgcgatcagctgaaggcagcagggatcgatcgttttgagaaatacgtaaaagatatatacgaagaggatccggactctgtatctttctacgactaagacaaagagatcctgcctgccccggtggcaggcaggggaatgaaaagcgggtaagttacacttacagaaaggattgggtacgcaatgcacaaaagaaagataaaagtcaatccgatggatcaggcacttcagattctgatctatctgatcattattgcactctgtctgatcattctgctcccctgcctgaacgtagtggcgctggcattcaacgacggagcggatgcagcgaggggtggcgtatggttctggccgagacagttcaccatggataacttcaaagaagtattcaaagacggaagtattaccacagcttatgtgatcacgatcgcaagaactgtaatcggaacgtttttaagcttaatggtaactactctggcaggttatgcgctgaaacaggaagatctgccgggaagaaagatcatcaccatgctgatcacatttaccatgctgttcggtggtggtatgatccctacctatattcagtacaaaaacttacacctgttaaactctttctgggtttacgtggttccgagtctggtgagcgttacctatctgttgatggtacgaaccttcttcgaaggaatcccagacagcctggaagagtcagccaaactggacggctgcggattctttcagacttacctgaaaatcatgcttccgttaagtaaaccggtaatcgccgtagttggactgtataccgcagtaaaccactggaacgactggtttgcaggagcattctatgtcaacgatacgaaactgtggccggtacagaccgtcctgcagcagatgttgacaaaagcaatgaattcacagcaggaagtaacttctgttgcacaggcactggcacataacaccgtgtccgtaacatccgattctttgaagatggcagcagttgttgttacaaccgttccgatcctttgcgtatacccgttcgtacagaaatatttcgcacagggcgcaatgatcggtgcagtaaaaggttaagtaaaatataaaaggttctttgcctcgttcagcatttatatagagatgaatctatgagcgatgcggggaacctttttctatgaaaataaagttgaaaattactgtttctggaaaaattcagaaaagcagatggaatagataaaaatgcgataaatataaaaagtacaccacatggtgacagagaatcatgatacaatgagtgttagattcaaggaacaaaacgggctgcggaaaattccgggcacaaaagagagggagaaggtatgaacgcgaaaaagtgggatgtttatgtatacggcgatgtcaatattgatatcgtgatcccgggtgtggaaaagtttccggaaccggggcaggaagacgaagtttccgtgatggagacctttgtcggcggcggtgccacattatttaccctgggtgtcggcaaactgggactccacccggtgtttcagggggaagtaggagatgactgttatggcgaactgatccggaacaaattccgggaaagccatgtagacgattctctgctgacggtaagcaaagagttaaagacggggatttcgttaagctttacaaatgaaaaagaccgttccttcttaacctaccggggaaccaacgaaaaaatcagtatttccaacgtagatgtggaaaaagtgaaagaagccgcacatatccatgtgaccggctatgcgggatctattaatcacaacgaatacctggaactgctaaagaagatcaagacagagacacaggcaaccgtatcgttcgatgttggctgggactccaccggagagtggaaaccggagatccgcgatctcttcccgtacatcgatgtgttgtttatgaatgagacagaagcagaacattacggaagaaaagagagcgccgaggaagccgcacgcgaatttgccaaaaccgcaggtatggcagtcatcaagatgggaaaaaagggttccatcgcagtgaaagacggcaaactgtatcaggcagcgccgtacaccgtggaggcggtagacaccacaggagccggagactcctttaatgccggatttgtctacggattcctgagaggaaaatccatggaagaatgtctgagatgcggaaacggatgcggagcactctccgtaaccgcactgggcggcaataccggatttccgacagaagagaaactggaaacatttatcaaaagttacgaagcataaaaagagatactaaggagacaacaaggaggaagaaaatatgaaaatcgcagtgatcggaggagcaggagtacgaaccgtcatctttatcaacggactgttaaagagatacaaaaaacttcatatcgacgaagtggtactttatgatatccaggaggaaaaacagaaaatcattgaaaagttatgtaaacatgtagtggagagaaaccatgaggaactgaaagtatgggcggtatccgatccggtggaagctatcacaggtgcagattatattgtaaccactctgcgtgtcggcggagatcactcccgtgtggtagatgagaccatcgctctggatctgggtgtgatcggacaggagactaccggtgtcggtggattttccatggcagtccgtacgatcccggttctgatcgaatactgtgaactgattaaaaaatacgcaccggacgcatggatcttcaactttaccaatccgtccggtctggtaacccaggcactgcgaagcgcaggatatgacaagatcatcggtatctgcgatgcaccgagcagcacgaagttccgtatggcacacgatctgggtgtggaagaagacaatctgtatgtggaattcttcggattaaaccacctgtcctggatccgcagcgtgaagaaaaaaggcgaggaaatcttaccggaactgctggcagacgatgcatttttacagggcgtacaggaattctccatgtttgatccggaactgcttcgttccatcggattcttaccaaacgaatatctgtattattattatcacagagaaaaagcactggaaaacatccaaaaatcaggtgcaaccagaggaaagacgatcgagaacgtcaacattcacatgatggatgaactgaaacatatggacatcgacgcagatccggaaggtgcattacagatcttcctgtattatatgcaggttcgtgagaactcctacatgagcatcgagtccggactggcaaaacgtccgctgctggaaaaaggtcagctggaagtaccggacggcatgggatatgcaggcgttatgctggactgcatcgaaggtatgcagagcgaagaaggaaaatacctggtactgtccgtagaaaataacggaagcatcccgggactggcagacgaagatgttatcgagaccacctgtctggtatccaaagacggcatccagccggtcaaagtagaagaagtgccggaacactgctatctgctgatccgtctgattaagatgtacgaaaaactgaccgttgaggcagtaaagaatcattccaaagaaaccgctgtacaggcattgatgttacatccgttggtaaattcgtattctctggcaaaacagctggtagacaaatacgacgaagtgtacggtggaatctttcactgatgttgataaagttttcccctgtataaccgggaaactgtgtggatatacagggggaaaaagtatgtgggacgtggataagatgaagatcagatggacaaatcaggcagaagaagcgcagacagaagtttttttcgagaaaggaacggcgacaccggaaaatttccggagacttgggaaaaaacggggcggtgactgccggatcacagtaaaaagagaaggattttccgaggaggaatgggtacagatgctgtgcaatggggtgtgcagtctgtacgacggtgcatatcagttttcccgcagtggggtgaagatgctgggaaaacagaacgtatacgaaaacagggatgtactgtgtgattacggggacacctgttatacgtttgtattggaaggcacagcgcaggagatagaagcgctggagcgtggggaattattgggacgttgtaaaggatatgcccggacgcttggaaatctgccgaataactatctgcataccgaagatctggcatcttatgcacagacgctggcacaggagctgggaatcagctgtgagatctatggggatcagaagctggaagagcttggatgcggcgctcttttagcagtcaatcagggaagccgcagagaggctgccatggtggtacttcgctatgaaggggcaccggggaccgactggacggcgctggttggcaaaggactgatgtttgatgccggggggtatcatctgaagtctatcgatggcatgaacggaatgaaatacgatatgtgcggggcagcggaaatgctggagatgctggagtatcttgtcacacagaaggtcgaaaaaaatgtaatggcagtgctgatgctcgcagaaaatgtgatcagcccggatgcggtaaaaatgggcgatgtgatcacaaccctggcaggaaagaccgtggaagtctataacaccgatgcggagggacggctggttttgtgtgacggtatcacgtttgcgcagcgtatgggggcgcgcaccgtgatcgaccttgccaccctgacgtattcggcacagagtgccctgggagatcaggtggtggcgctgtttggcaatgaccgggaagcgcttcgcagctgggaagaaacagcggagcagaccggagaatattactggcagctgccgatgggaccgatctatcacaggatgatcgagtggtcgatctgcgcggactttgccaattatgcgccgggcaggggtgcaggtgccagtgtggcagcgtgtttcctggaaaactttgtggaagagggaacccagtggatccacctcgatatggtgggaccgtcggtggtgcgaaaagagaccgatgagatggcagagggagccagcggcgcatgtatgagtaccctggcggcttatttgacaagataacaatacacggacggagaaattacgaaaacagagagaagggaagtagcatttcacaggcgggggatgttacggatggaagaaacaatgaattttatatttgatggaaatatctccagagaagttctggaaaattacctgtcccggagtgtgacggcagcaggtttatatgagagcaaaacactggaagatgatctgcgtgcgatccgggagatgggcgtaaaatttctcggaagagcatcaggcatctggtatatgacaatggatgacgaggagcattttcgactgtcaaaggaattggcagacgaagtgcatgcacaggatccggaagtcatcctgcagtcctgcgttttcgagtggatcacacggcggatggagaccgtagagatcccggactatgtgtttgaggcattcggtatggaaccggaacatcggtgtttccgtctggacgatgcgttgtttacggatgagtccagcggatataccagcagaagagacgatccggcaaaagacggcggtatcccggatctgtcccggcaggaggcaagactgtggttttactaccgggcaacccgctacattgactgcggctatgaggcactgcatatgggacaggtacatctgtacaccgcaaatgacaagggaatggcaaagaccgcagagctgttcggcatgatccgcgcgtacgcaaggattcacggaagacgccataagatcctgctggacgcacatacgcatggggtaaatatccgtggaaaactgctgtttgactaccatgcgatgccatttacccgtatgccgcttctggaagtgccgggagaagaactggtactggtgcgtgagggttacagcgaaggcggagaaaatccaaacggatggtccgcaagaaccatgccgtatctgatggaatacgacaactggggcggactggtcgttgatgaccgggaaaagattccgagagaggaactggcatggagagactggtggggctacgatcagatcgcctggtttgccaaccagccggaggcaagccggaatcatttcctggagtatacctacaaatggacagagatcaacaatccaaatgcatactttgaactgccgtttcgccggatgatccacaacgcggaagtgttcatgaaacgcggagataacggggagatggatgcgcaggatttttatcagatcaacacgaaaagcgcagcctgcccgatgggatttgaccaggaagagactgcaaaacgcctgtgggcaaccggacatagcctgcgtgaacaggcagccaatccggagatgctgatccgttatggtgcggaaaatgtctacgacgaggaaaccggcatgaaactcccggaaaagattgttgtctatggaagtttccagtcacacgtcggagccgtaaaaaacgattccaacagcgaactgaccagaatgtactatatcggggacaacacctatacgctttctgttgtcatcccgtttgcgagaacctacgattattccgtggcaacctacggaacgttatccgcaacctaccagtccgacggatacccgagaggcggttcctcgaacaaggcgcattttaccacacagaaggacaatatggtggtacggttccggtatcagtttataaccaataaagtgacagtcgagatgtttgaataaagaaaagacctgggtgaggggtgtcgatgaaaaagcgacgcccctcacctgttttgtcttggcgctaattggacgttggtcgaaagttggaaagtactttctggtcaattgcaaaatacaaatatgcaaaatcgacaaatatagacatgatgctacaaaaatacacaaaaaagaaagaaaaatttgtgtaaaattaataaaaactattgaaaaatgtaagatcattgtgtattatgaaactacaaacaaaagaggagacaggaagaaggaactaataataacgaaggaggtggtatcgtggataggagggaccatgatcgatgccaagaactttacgtgaaatatagagagtttatgtattggtacgtgaaaaagcattttccggatttgccagaagaagacattcgtgatattctacaagaggtgtggacatcattattgaatgcgatcgacaagttatatgataagggcgatgaaggtcagtttgcctggttgatcaaggtgactcaaaccaaggtaatcgattactaccgctcccagaggaaaacagaagaactgggagaaaggattggccttgctttacaggaacagaaagagggatgttctgtgcaggacacagtaatcgagagaatgattgcaatggaactggtagaaggactgacagagaaagagcggagagtcctttccatcgaatatttctcggatacgaatgatgaagtctcgaatgccttcaaatgcagacgaagccgtctgagaagaaaaatcgaggaaagttttggagtattcagaaagaaacgatagggatctatcagtatcatgtattcggatgatgttattcacttcaccgtgaaatgacttccgcaaggaagctgagaaaggatattcgatgaagaaaaaagataaaatatatgacagtccggaatacaagcagatcagagaacatcttcctgagattttaaaagaaatggaacgtgacaagggtctgaaacaatatcagatgccggaaggctggaacgaagacttcgaacgcatctaccaggcagaacaccgcaaagaacgcatccgcaaccgcattcttgctggcgcatgtgcagcgatcattcttggcattggagccgttcatgtgggagaacgtctggagctgacttcgatggtgcaggcggatgatattggaaagactacggaaaatgggtttgaggatggaaattatcagtattcagtaaatggaaatgtcgaagaagataataacagtttgattattgatgattcggaagagattacatttgaagaaagtgatttgcagactttgtatgaaaacttgaaaacagaaaccaaagccccaatattttatttcactaatatagataataacagtgaggtgtcatatgcggtatataataaagcacatagagccattagttatcgagtacttgcaggagaaaattatgtatatataagccaggcgaagcaagtagaagaaacttcaaatggaggagttaatgaaaaaaaacttgttcaggaagtggaaatatctaagcttaatatgaaaacagaggtttatgaaagtacgcaggataatagcttatattgtaattttatttatgataataataccgttactgttatttcggatatcgatctggaaagttatatagcgatattgcaggggattgagtatcattaaaggaggagaaaagaatgaaaaaatatattgcatttatcttgagctgtgcattgttggttttacagtgtagttttgtatttgcagaggagccagagcagtatgaaatgacggaaatggaagatgatagtgcttttacgatggagtctcagagtgaagtgtcaccttgtcttctctatattgcaaatgtaggcacttcaatagtaaagataagttctaaccaagttgggattcgtgcggaaacggtatgcagcgaaaaagtaaaatcaatagatgtaacatattacttacaaaaatggaatggaagtaattgggtaagcattgcatcaaaaagtgcagttgcgtatgatgttgcacaaacatcaaagagttacacaattacaggtgtgtcttcaggaaaatatagaactaaggcaacagcatatgtaactggttatacgggttattcagaaactttaactggatacagcggaagcattacaatttaactttaaatcccgataaaatcccctcccttcaggaccccatcctgggcaggtggttttatacccttactccccaactaatttgtctttcataaaagcagtgcagtaagggttacagccattgcagaggaacctgaggcaaccgcatccgccgaagttccctgtgatggctgtgtttatattttatccaaatacgaaaaaacagtggcaaagatctgaaaaatggtctttgccactgttttttaatgtttcgaatcgcccgcagtctcatccgtccggtactgatcgaagatcccgcgtactgcctggtgcagatgcggtttgagttcttgaagacctactggctgctggtagaggatcgcgttgtagctggttccgttgacaagttcgagaatcagatacatcataagctccggggaatggtaggtatgattggcattttgcagcatcttatcgtagatggtatggattgacggggtgtcctcactcggtgtgaagaacagagaattcttgaaaaatccccagctcagatgcttggacaaaagccgtaccagattcagattggatgccagctgatcgagaatatcatccatgataaagatcacctgatcctcaaaatcttgaatctccggatgcttttgcagtgccagataggaagtctgaaacacctggcttgccttgtgggcgatcaggtgattgcggatatcgtatttatctttgaaataaagataaaacgttcctttggcaacacctgcattttttacaatatctgcaatggaagttttattgaatccattgtctataaaaagagagaaagcggaatccagcagggattcccttttttgttgtttgttgtgatcgacttttcccataccgggatcagcccccttcctgtcgttgtttcccatattataaggaaatatccacaaaaaagtcaaatgaaaattggtcatttttatattttcggaaagttgcataaaatataaaatgacttttagtcaactttttgatgaataaatattgactaaaagtcatttttagggtataacaataactgaccaaaggtcataaaaaaagaccaacgaaaatataataagagaagttaagggaggagtatgatatggagaagctgggaaggaagatcgtcaggtttcgaattccgatatttatcatcggattattgttgctgattccatccgtctttggatatatcaacacaagagtcaattacgacgtactttattatctgccggattccattgaaacgatgcagggtcaggatatcctggtagatgaatttggaacaggagcctattcgatgtttatctgtgagggcatggaaaacaaagatgtggcgaagttaaaagaacagattgaagatgtggaacatgtcagcaaggttgtctggtatgacagtttcgcagacatcagtatcccgatggagatgctgccggaggatatccgggacgcctttaatgcggacgattccacgatgatgtttatcatctttgatacgacaacatccgccgatgagacgatggatgcgatcgaggacatccgtgcactggcaggaaaacagtgtttcttaagcggtatgtcagctatcgttaccgacaccaagaacttggcagagtccgaggttgcgatctatgtactgatcgcggttgtcctctcctgtatcgttctggcactgacgatggaatcttatctgatcccggtatttttcctgttgagtatcggtatggcgatcatctataacatgggaagtaatattttcatgggacagatttcctacatcacgaaagcgctgagtgcagtccttcagctgggtgttacgatggactactcgatcttcctgtggcacagctatcaggaacagagagaaaaaggcgaagaggatcataaagaggcgatggcaaaggcgatcgcagctacgatcaaatccgtagtcggaagctcgatcacaacgatcgccggatttatcgcgctgtgctttatgagttttaccctgggtcttgaccttggtatcgtcatgacaaaaggtgttgtcttcggcgtgatctgctgtgttaccgtacttccgtcgatgatcatgatcttcgacaatgcactggagaaaacgaaacaccgtcagctgatcccggattttccgaagatttctgattttgtggtaaaacaccatgtgatttttgcagtcttgtttgtggtattatttattccatttgcttatttccaggcacatgcaagtgtgtactacaacctggatgccagccttccggataatctgccgagtgtgcaggcaaataccaaactgtccgaagaatatgatatgggtgcagcacatatgatcctgctggataaggatctggatgccaaacagaaatacaacatgatcgccgatatcgaaaaagtagacggcgtgaaacaggtactcggtctggagagcatcatcggaccggcatttccggagagtatgatcccggacgatgtgaaagaaatcctggagagtgataactacgaactgatgctgatcatgaacgaatacgcggtagcatccggtgaggtcaacagtcagctgagtgagatcaacacgatcctgaaacagtacgatccgaccggtatgctggtaggggaagcaccgtgtacgaaggatctgatcgagatcaccgaccacgactttgcagttgtcagcgcggtatcgatcctggcagtattctttattattttctttgtatttaaatcgatctcccttccggtgatcctggttatggtcatcgagggtgcgatctttatcaacatgggtatcccgttcctgacgggaaccaaacttccgttcatcgcttccatcgttatcggaacgatccagctgggcgcgaccgtcgattacgcgatcctgatcaccagccgttacgagaaggagcgtggaggaggaaagagcaagaaagaagcaatccagatcgcgcacaagaccagcatccgaccggtcatggtatcggcgttcagtttcttcgccgcaactttcggtgttggtatgtattcccagatcgatatgatcagttctctgtgtctgctgatggcaaggggcgcgctgatcagtatgtgtgcagtattattattcctgccagcaatgttctggctgtttgatggaattatttgtaaaacgagtctgaatttcagacggaaacattaggaggagatcgttatgaagagaaaatatgtacaggcaatgatgacaggtatggcagcgatgctggcagtaaccgttccggtgacgactgttgccgcagcgactccggagaaagagcagaccgtctatgtcaatgccgatcagaatggaaatgtagagaaagtgatcgtaagcaactggctgaaaaatgcagacaaagaaagcacggtggaagataacagcgaactgaacaatatcaccaacgtaaagggtgaggaaagctatacccagggaagcgacggcaaactgatgtgggcagcagatggaaatgacatttactatcagggagaaaccagcaaggaactgccggtatccgtaaaaatgacctacttcctggagggcaaggaaatcagtgccgcagatctggcaggaaagagcggaaaagtaaagatccgtatcgattacacgaacaattcttcccagaccgcgaagatcaacggcaagaaagagactatttacacgccgtttatgatggcaaccggcatgattcttccgacggatacctttacgaatgtagaagtaaccaacggtaaagtgatctccgatggaaataataacatcgtcctgggtatcggcttcccgggactgtatgacagcctgaaactgggtgacctgaattccttcaaggacaaagaaagtccggattatgtagagatcaccgcagatgtggaagatttctccctggcactgaccgctacggtagcaaccaccggtaccttaaaggaactgggactgagcgatatcgatgatctggatgatttgcaggacagcctcgataaactgaccgaatcctccaccgcactggtagaaggaagccgcgcactgcaggaaggcatccaggaactgaacagctccgcagatacctttgtggacggtctgaacagcgcagatgacggtgcaggacagttaaaagacggtatcgatacgatgaacaacagcaaaggcagcctgatctccggtatcgatcagctggtagccggcatggaaagcctgggaagcggcgcaggaagtttacagagtggtgtaaaatcctacactgacggaaccgagcagctgaacgccggtatcgcacaggtcaacagcggtgcgaaacagctaaatgcaggaatcagccagttaaatgagaagaaagcaacgcttaccgcaggtgttgcacagctttccgagggcggaaaacagttggagagcggagcagccagtctgcagtccggtctggtggcttacaccggcggagcagagcagctgggtacaggaatccatacattatatgatacgatggaagacaaactcggcaatgtcggagaacttccgggtgcggtaagcggactcatggacggatgcaagaaactgagcgcaggagcagcagcgctgcaggcaggagcagatcaggcagcagccagtgcttcgaaactgaacgatgccgtgacagcactcagcggagcagtgaccggaaccaaagcagccgtatcggcagcacagagcgctgtatcagcaccacaggttgtaacagatgtgacaaaagcaagtgaagcagccagcgcagaggcaacgacaaaagcaaaagaggcagtggcagcagaaaatgaaaaagtaaatgaagcagccagcacacaggcaacagaaaagcagagagccaatgtggaagctgctctgaaagctgcaggtgtggatgaagccacaagacaggcagtgttaaataatctggcaggtattcaggtcaatgtgggcgtacagaccagtccggaagtcagcgtccaggtggatgcatccaaggtaagcacttccatcagccaggagacaaagaccacacttgcaggtgttcaggagaacctgaagaaagtagaatccggtcttgccggtgtcagtatgacagaaaccgaagaacagatgcagtcattgaaaaacggagcagacaccgtggcagcaggaaccgcaaatcttgccaagagtgcggcagcacttggcgatgccgtagaaccgctgacgacattttcaacgatggcacagaccatgctgggagctgtaaatcagctgaaggaagccagtgatacactgactgccaatgataccacgctgaataccggagcagcagctctggcagagggaacgaaatctctgaacagcggactgaccaccctggcatccggcgcatctgccctcagtgacggtgtcacacagctggcacagggatccgcatccctgacacagggaaccgaaaccctgaaaaaaggatcggacaccctgatcgcaaacaacagcaccctgaaagacggaacagcaaaactggtagcaggaagcagcgccctgatcgtcggcggcaaagctttacagtccggtggaaatacgttaagcgcaggtatccagaaacttgcagacggcgccgcacagctgaaatccggaaccagtcagctggcagacggcggaaaaaaattaaaagaaggaaccacgaaacttgcagacggctccacagaacttgcagacggtatggaggaatttgacgaggaaggtatccagaagatctcagatctggcaggagataacctgactgccctgatggatcgtctggacgcggtgacagaagccgacaaagactacaccgcattcgacggctggaagaaagatgcagacggcagcgtaaaattcattatcgagacagctgcaatcaagtaattgctttcgaaaaaagcaggggaaactgtttacaaaagataaagtcaggaccggaagagattccggtcctgatattatcatatcggaacttcgatttgcgggataaatcaaagaaaactggaaatcctagtttttagctagtcttttcaaaaatttcaaagaatttttattgattttgtgtcgcaaatatgtataattagggataaagagagttgctatgggcgactgtctttgagggataccagaaacctgcatttgcaggaggttatcatattatgaaagaaagaggttaatgtaaaatggcagaaattaatttaagtaagtatggcattaccggaactacagaggttgtttacaatccttcttatgaaatgttatttgaagaagaaacaaaatctacactggaaggttttgaaaaaggacaggaaagtgaactgggagcagttaacgttatgactggtgtttacaccggacgttctcctaaagataagttcatcgtaatggacgaaaactccaaagatactgtttggtggacttctgacgaatataagaacgataaccacccggcaacacaggaagcatggagcgcagtaaaagagctggctctgaaagaactgtccaacaagaaactgttcgttgtagatgcattctgtggtgcaaacaaagacacccgtatggctatccgtttcatcgtagaagtagcatggcaggcacatttcgtaactaacatgttcatcaaacctacagaagaagaactgaaagacttcgaaccggatttcatcgtatacaacgcttccaaagcaaaagttgaaaattacaaagagctgggtctgaactctgaaacagctgttatgttcaatatcacaagccgtgagcaggttatcgtaaatacatggtacggcggagaaatgaaaaaaggtatgttctctatgatgaactactatctgccactgaaaggcatcgcttccatgcactgctccgcaaacacagacatgaacggcgaaaacacagcaatcttcttcggtctgtccggaacaggtaaaactacactgtctacagacccgaaacgtctgctgatcggtgatgacgagcacggctgggatgacaacggcgtattcaacttcgaaggtggatgctacgcaaaagttatcaacctggatgctgaatctgaaccagacatctacaacgcaatcaaacgtaacgcattgttagagaacgttactctggatgagaacggaaaaatcgacttcgctgataagagcgtaacagagaacacccgtgtatcttacccgatcgatcatattgaaaaaatcgttcgcccgatttccgcagctccggcagctaagaacgtaatcttcctgtccgcagatgcattcggcgtactgcctccagtatctatcctgacagaagctcagacacagtattacttcctgtctggtttcacagctaaactggctggtacagaacgtggaattacagaaccgactcctactttctccgcttgcttcggccaggcattcctggaactgcatcctacaaaatatgcagaagagctggttaagaaaatggaaaagagcggtgcaaaagcatacctggttaacacaggttggaatggtaccggaaaacgtatctccatcaaagatacccgtggtatcatcgatgctatcctgaacggagatatcaaaacagctcctacaaaaactattccttacttcaactttgaagttccgacagaactgccgggcgtagacagcggaatcctggatcctcgcgatacttacgcagatgcagctcagtgggaagagaaagcgaaagatctggctgacagattcatcaagaacttcgctaaatacgaaggaaatgaagctggtaaagctctggtagcagctggtcctcagaaataattaaaaaatataaagtgttcaaacgataaaagaactgccgctatccgaagtgattcggatgcggcagtttttgcactgtagaaatatggtaaaagaaaatgagtgacagaatatcggactttgcatatcgatattctgccacttattttatgcgggcaacgagtcaaagtccgtgcttgcacgagaccttgacgactgccgcgataatcaaaattaagaccgcagatatttgatacaggaaagcgcggccttcgctccttcaccgactgcaacagaaacctgcaggatcccgccgatacagtctcctgcggcgaagacgccagggagaccggtatccatttgttcgttgacgatgatccgctcatcctcaagccggataccaagtttccgtgcgagatcgctaccctttgcagtgccgagcgccatgaaaaggcatgccgggtgaagctgtgtgccgtcttcgagacagaccgcctccagtgcatccgtaccagtgagttccagaaccggtgtctggatgatcgtaactttcggtggaaagtcaactgaaggttccagtccattggtcagcagtgtgacggagccgacaaccggaagaagttcctggacttcatggagggcgtactcgccatttccaaggacggcgacagattcgccgcggtagagaaaagcatcacagacggcacagtagctgacaccatgcccctcgagtttggcgagattcttgattttcaatgtttttcgggaagttccggtggtgagaatgatggcgcgggcttcgatctgcgtggaagcggtagaaaccagatagttgccgttccagctgatcccaactacctcatcctgcaaaagcgtaccgccgagatcctgtacctgttttcttccgttttcaatcagttcatgaccggagaggggatgatccagtccgaaataattttcaattttttctgctttttccagagcaccgttatcttttccaatgacggtagtggaaaatccaccccggagaatataaagagcggcggacagaccagccggtccgctgccgatgatgacaacatcctgcataaagattacctccttgtaggaatcgtgattcctgttcgttgtttactgtcagtataggcaaaaatggagaaaaaagcaaagaaatcgtctgtgacatggtcacacagaacgcaaaatgcagttaccgttctctgataatccccccgaagcgtgttaccgggtacgaagtgaacaggaatcttgcaagtttgtgaatttcgtactatgatggtgcagaaagaaaaatactgtaggagagacagaaagaggacatacatatgagaacagaacgtttattttataaagattcccaccagaccacctgccaggcgaaagtgctggagtgcagagaggtgaagaaaggatatgagatccttctggatcagactgtattttacccggaagggggcggacagccatgtgacatcggaaccatgaaccaggtggaagttaccgatgtacaggaaaaagacggagaaatctggcatcggacacgggaagcgatccctgagggaacagaagtgaactgtaagattgactgggagcgcagatttgacctgatgcagcagcactccggtgagcacctgatcagcggactaatccacgaaaaatacggctataacaacgtgggatttcacataggaagcgagacagtcacgctggatgtggacggcgaagtgccggaagagttcctgaaagagattgaggcaaaggcaaatcagtatgtctgggagaatcatccggttgagatcacccatccgtcagaggaagaacggaagacactgccttacagaagtaagaaagagctgaccggtgatgtgcggattgtaacctggcccggtatggatatctgtgcctgctgtggtgtccatgtggacttttccggagagatcggacagattaccctggtatctgcgcagaagttcaagggcggtatgcgtattgagatgctctgcggaaaacgggcattggagtataccaatcagttaaaagaacagaaccgaaggatttcccagctgttgtccgcaaaatggaacgataccgcagatgcagtggaaaaattacagaaagaatatcagcagttaaagttccgcatggtaggaatggaactgaaaaagatcgagacgatcgcagcacagaccgcaggatgcggcgatcagctgttgttcgaggaagatatgtcaccggacagcgtaagaaagctggcttcggatgtgatggaaagctgtggcggccgctgcgcagtgtttaatggcaatgacgaaaacggctatcgttatatcatcggagaaaaagatggagatctccgtgaatttgtaaaagaaatgaaccagaaattacagggacggggcggcggaaagccatttttcgtacagggttccgtgcaggcatccagaaaggaaatcgaaacattttttgcttcgtaaggtagcgtatggcgaaaatacacggatttaacaaactgacgttgctggattacccgggacggctggcagctaccatttttctcggctcctgtaatttccggtgtccgttctgccacaatgccggtctggtgctggcaccggagagtgagccgctgatcgaggcggaggaagttctgaaagtgctcagaaaaagaaagggaatcctggacggcgtctgtgtgaccggcggggaaccgacgctggattcgggactgaccgaacttctggcacagatcaaagagctggggtatccggtcaaactggatacgaacggaacccgcccggcgctggtcagggaactggttgatgcggggctggtggattatgtggcaatggacatcaaaaacagcccggaaaaatatgcagagaccgccggtatccgccacccggatctggaaagcatcatccgtacggtggaatatctgaaatcaggtgtggtggactatgaattccgaaccacagttgtgaaggaacttcacaaacgggaagatatcgaagccatcgggcagtggctttccgggagccggcggtattttctgcaaaactataaggagtcggagcaggtgatccgtccggtatttacgtcctactcgcgcgagcagctggagaattttcagcagattcttcggaaaacgattccacaggttgagattcgggggatataggatcgggattttgcggttcggtgtggatcgtccggtaccagtagccgaaatgtccgggctgtgcagcttttgcccgggcggacttaaagtaggggaaaccgaacagattggcgagcagccgttcccgctcttcatagatgccggggacagccagaatgtagcagatggtgtcttcgtgttccatctttccgagaagaaaatgctgaaaagcgtggctgccgtagagaaaaaactggttgctgccacaggaaatcccaaaggagccaagaagagaaaggtctttcggggataattgcaggcagttgtggatttcctcatcgaaaaacggtgtgacctgtggataactctccgtcagtcgtttccaggaaaatgcgggagtctgtgcacgtgcaggtgtaggggtggaagaacgggaggaatccgatgcaggctccggatcagaacgcgtgtcggcggtgtctggctctacggattccggctgttccagcgaggctgcccggagaagcggcacagattccggcaaaaggagatcttccggggaaatcctgcagtcgctccagcaggtggcgtaacgctgcccggtatcacagacgacgatgagaccgtcgatatcgtcgagattccagctggtgttgcagatattggtgtcgggaatctggaactgaccgtacacatcaccctgtttccaggcgggattgccgagaaacagaccgtgcagtgcgccgggacgggcgataaatgcgtaggcgcggaagacggggacgaacgggcaggcgggaagagtcatgtgaagttccagacggcactggtgatcccggatctcaacgcggacaaatccgcggtttttcccctttttctgacggtcgtattcgtaaaggtaagagacaaaacgtttgtatgcagacaaaatggacacttcctttttggggtattctatggtagcatatgcaaagaagaaacaagatatgatgacaggaaagcggaagaatgatggatgagaagaaaatggatgaacggtttatgcgggaggcgatccggcaggcacgaaaagcaggtgcactgatggaagtgccgatcgggtgtgtgatcgtttacgaaggaaagattattgcaagaggatacaaccggagaaatacggataaaaatacgatctcccatgcggaactgaatgcgatccgaaaagcgagtaaaaagctgggcgactggcggctggaagggtgtacgatgtacatcactctggaaccgtgtcagatgtgcgccggagctattgtccaggcgagagttagccgggtggtgatcggaagcatgaacccgaaagcgggatgcgccggatcaattctgaaccttctggagatggaacagttcaatcatcaggtagaagttacccgtggcgttttacaggaagagtgctcccagatgctcagtggattcttcaaagaactgcgtgaaattaagaagcggcaaaaacgggtattgacggaagaaaaacaaggaagtataatgaatagcgaatctgctgattcgtaacaccatggagatgtacccaagtggctgaagggtccgcactcgaaatgcggtaggtcgggcaaccggcgcgagagttcaaatctctccatctccgtaaccaatgtaacagaagaaggctgcgaagtttattttgaagtaactattcaaaaggtagtatcccgcgaggtgttttggcatgtttttgccaaaatcccgagacatacaagtcaaaatgccatcaccgaaggtgatttgaaatgcattttgactcgtaactgtgagggtactgaacagttacattttgaaaaaaatatacttcgcagcctttttacgttgcagtgcatatcaataattggtccggtggactgattttaacgacaaatacaagtgtcttggaaaacctccctccgggcgtcccccttcaggctatttttcccaattttaaaagcgcaccgcccttcgaactccctccacagacgttactcctgcagttaactcggcccaggcacccttacggcacacagaaggttctgcttagtgctgctccattcctgacctgacacggttcacagattcctgttgcgtaagacccagacgtcaacgccacttacagaaggcagctctgcaaagaaaagccctcagtttggtatcacccctgctgtagcggattgcaggtacagggcaccgctaactccccggctgcgcaggattcagtatatcgtgttttttttaatttgtcaatctgaatcgtgatatttacttgtgagagtggcgaaaatgggctataataataaccagatgatattgtaaaaaaacgtaactattcagtagatagtatcccgcgaggtgttttggcatgaatatgccaaaatcccgagacatacaagccaaaatgccatcaccgaaggtgattttaaatgcattttggctcgtaactgtgaagggactgaacagttacgaaaagatacagatgcccggcactggaaaacagtgcggcgatctgtaagaaaaatttgtaaccggagcagtgaaaaccggctgcaaaaatctgaaaagaaggacggaaaaaaggtatgaagagaattggtttactgacaagcggcggagactgccaggctctgaacgcgaccatgcgaggcgtagtaaaaggactttcccacaatatcgatgacctggaagtctatggattcatgaacggatacaaaggtctgatctacggagattatcgaatgctgacagcaaaagatttttccggtattctgacccgcggcggcacgatcctcggtacatcccgtcagccattcaaactgatgcgtaccccggatgccaacggactggacaaagtagaagcgatgaaacagaactatcataaactgaatctggactgcctggtaatccttggcggtaacggaacccagaagaccgccaacctgttaagagaagaaggactgaatatcatccacctgccaaagacgatcgataacgatatctggggtacagacatgaccttcggtttctacagcgcagtgaatatcgcgacagaagcgatcgactgcatccatacaaccgcatcttcccacaaccgtgtatttatcgtggaagttatgggacataaggtaggctggctgactctgtacgcaggaattgccagcggtgcagacgttattctgattccggagattccgtatgatatcgacaaagtagtggaggccatcgagagaagaaagagaaacggaagcggatttacgattctggcagtagcagaaggtgcgatctccaaagaggacgcgcagcttggcaaaaaagaactgaaaaagaaaatggaagaagataagaaactttacccgtccgtttcctataaagtggcaaaagagatcgaaaaccgcaccggtatggagatacgtgtaacggttccgggacatacccagagaggtggaagcccgtgtccatacgaccgtgtactgtccacaagacttggttctgcagcagcaaaactgatcctgaacgatgagtacggctacatggtaggtctggtcaacggaaagaccaaaaaagtgccgctggaagagtgtgcaggaaaactgaaagtggtaacaccggatgcacaggagatcaaagatgccaagagaatcggcatcagcttcggtgactgatgcagaaaatgtaactgtgaaaatacagaacagttatgaaaaataatacgatagacggagaggggctggtctttgcgacagccctatctctttgtaacattatatattaaaattgacagattgaggagaggcagagaaacatgagctataccgctctatatcgtaagttccgtccggacaccttcgaggatgtcaaagggcaggatcatattgtaacaacattaaaaaatcagattcgtgcggaccgtatcggtcacgcatttttgttctgtggaacccgtggaaccggtaagacgaccgtggcaaagatccttgcgaaagcggtcaactgtgagcagccggtggatggaagtccctgtaacgaatgtccgacctgtaaagcgatccaggcgggaacatccatgaacgtgatcgagatcgatgcggcatccaacaacggtgtcgacaacatccgtgagatccgggaggaggttacctaccgtccgacacagggaaaatacaaggtgtatatcatcgatgaggtgcatatgctgtcagcaggtgcatttaacgcactgttaaagacactggaggaaccgccgtcttacgtcatctttattctggcgacgaccgaatcccacaagatcccggtaacgatccagtctcgatgtcagcggtacgattttcaccgtatttccatcgacacgatcgccggacggctgcgggaactgatggagaaagaacagatcccggtggaagaaaaagcaattcgctatgtagcgaaggcgggagacggttccatgcgagacgcgttgagtcttctggatcagtgcatcgccttctatctgggacaggaactgacctttgataaggtgctggaagtgttgggaaccgtggatacggaagtgttcagcaaactgctccgcaaagtgctggaacaggatgtcacaagctgcatccatatcctggaagatcttctggtcaatggaaaagaactgggacagtttgtcaatgactttacctggtatctgcgaaatcttctgctggtcaagacctccgaagacgcggaagaagtcctggatgtatcttcggaaaatctgaaagcgctgcaggaagaaagccagctgatcgataccgatacactgatgcgctatatccgtgtgttatccgaactttccaacaatctgcgaaatgccacacagaagcgtgtgctggtggaagtgggattgatcaaattatgtaaacctgcaatggaaacgaacctggattctgtgctggaccgtctccgggtgctggaagaacagatggaaaaaggaattccgatggcggcagttcagccacttccgggttatgcaggaaggaacgatggcagtccggcacagccaacgcaggcagttccgtccgcaccggaaaagaaaccggagaaagcggctccggaggatcttcagcggatcaaggaaaactggaaaagtatcgtgatgcagacacagggaatgttcaagacatttttaacaactgccgtgccgaaatataacggcaataccggggagaataaattatatgtggaattctcgaatgatctggcgcagacctgtgtggacgatccggacaaaaagcagttactcgagagtctgattttgcaaatgacggggaaaaccgtggaagtggagatgcttttaaagaaaacaaatatgcatcaggacttggcagaaatctccgttgatgatatattaaaacagacggttcacatggatatcgtggtagaagaagaaccggacgatgaataatgaatgatttttaagagaaaacaggaggaaccaatcgtggcaaaacgtggtggatttccaggcggcatgggtatgcctggtaatatgaataatctgatgaaacaggcgcagaagatgcagaaacagatggaagagaaccagaaagcgctggaagagaaagaatttacggcagcagcaggcggcggagccgtagaagtaaccgtaagcggtaaaaaagaagtgaccaaagtcaaactggcagaagaagtcgtagatccggatgacgtagaaatgttagaggatctgatcatggcagccaccaacgaggcactccgcaagatggaagctgagacacaggctgtgatgtccaaactgaccggtggtctgggtggaggattcccgttctaagatggaatactacagcagtcatatcagcaaattaattgaacagctgtcaaggcttccgggcatcggcgcaaaatcagcccagcgtctggcatttcacatcatcaacatgccgcaggatcaggtagagcagcttgcgggtgcgatgaccagcgcgagatcgaatgtcagatactgcaaagaatgtttcacgctgaccgatcaggaactgtgcccgatctgtgccaatccgaagcggaaccataagcagatcatggttgtggaaaatacaagagatctggcagcttatgaaaaaaccggcaaatacgagggcgtgtatcatgtcctccatggagccatctccccgatgctggggatcggtccgggagatatccggttaaaagagctgatgctgcgtctgcaaaaagatgtggatgaagtgatcattgccaccaattccagtctggaaggggagacgacagccatgtatatcagcaaactgatcaaacctaccggtatcaaagtgagccgtatcgcaagcggcgttccggtcggcggtgatctggagtacatcgatgaagtaacactactgcgtgcgctggaaggacgcgtagaattataaggaaaaaacgatggcaaagaagaaagcaacttctatggatgtggcccgggaagcaggagtttcccaggccactgtttctataatatcttttaaaataaataagaaaatggcgaaaataaaggaaaaattcaggataaacgatgaaaaacgtatcatataacgattaataatctgctactattaataaaaaatgttattaataaaaattcactcttgttgaccgtgaaaacaaacctgctatactgagggcagaaaataaaaaacgccggaaatgatcgggcagatttcaggaaaaacaggaggacaaaataatgagatttttcatcgataccgcgaaagtagaagacatcaaaaaagcaaatgatatgggcgtgatctgtggtgttaccaccaacccgtccctgatcgcaaaagagggaagagactttaaagaagtcatcaaagagatcacttctatcgtagacggaccgatcagcggtgaagtaaaagcaacgaccgtagacgcagaaggcatgatcgcggaaggaagagagatcgcagcaatccatccgaacatggttgtaaaaatccctatgacagtagaaggtctgaaagcctgcaaagtgctgacagcagaaggcatcaagacaaatgtaacactgatctttactgcaaaccaggcactgctggccgcaagagcaggtgcaacctatgtttctccgttcctgggaagactggatgatatttccacaagaggtgtggatctgatctgtgagatcgctgagatcttcgaggtagcaggtctggacacacagatcatcgcagcaagcgtaagaaatccgatccatgtaaccgactgtgcactggcaggtgctgatatcgcaaccgttccatacgcagtcattgaacagatgacaaaacatccgctgaccgatgccggaatcaaaaaattccaggatgattacagagcagtattcggcgaataataacacgtattaaaggtatagagtcttgcaatatttttcaaaatgtggcatactaagacggcgaatgagcaataattctaagcagtgtacggaaaggagtacagaatgaacaaactggagcttcagaaagtagcaaatgaagtccgcaaaggaatcgtaacctcagttcatgctgcaaaagcaggacatccgggcggatctttatcagcagcagatattttcacatacttgtattttgaagagatgaacgtggatccgaaagatccggaaaaagcagatcgtgaccgctttgtattgtccaaaggacatacagcgccaggtctttacagcgcacttgcactgaagggatatttcccggtagaagatctggaaaccttacgtcatctgggatctt

SEQ ID NO: 2472 - DNA, 38932 bp, Unknown
  gut microbiota DNA sequence
aataacgcagtggaatattttgtctcctactacgattactaccagcccgaagcctatgtcccctccacggatacttacattgccaaggactccgccattaacgaggaaatcgacagactccggctctcagctaccgcggcactttccgaacggaaagatgttatcatcgtgtcaagtgtatcctgtatctatggaatcggcagtccgaaggactatcagaacatgatgatctcactgcgaccggggatggagaaggatcgggatgaggtgctgcggagtctgattgacatgcagtatgaccgaaacgatatggattttcaccgtggaaccttccgtgtgcgaggggatgtggtggagattattccggcatatgaatcggatgtggcgatccgggtggaattcttcggagatgagattgaccggatcacggaagtggatgtgctgaccggggagatccggagagaactgaatcatatcgccttatatccggcgtctcattatgttgtgccgatggaacgtatcctggaggcctccaaggccattgaaaaagaaatggaagaacaggtggcgtattttaaaagcgaagacaaacttctcgaggcacagagaatcagcgaacggaccaattttgatctggaaatgatgaaagagacaggtttttgttccggtatcgagaactattcccggcatctggcaggactgaaaccgggagaaccgccgtatacactgatggattacttcggggatgactatctgatcatgattgatgagtcacatattacggtgccacaggtgcgcggtatgtattttggtgaccagtcaagaaaatcgacgctggtggactatggattccgtcttccgtcggcaaaagataaccgcccgctgaattttgaggaatttgaagaacggatcgatcaggtgcttttcgtgtcggcaacgccgggacaatatgaaaaggatcatgaacttcttcgcgcagagcagattatacgaccgaccgggcttctggatccttatgtggaagtgcgcccggtggaggggcagattgacgatctggtaggagaagtcaacaaagaagtggaaaaacataataagattctggtgacaacgcttaccaaacgaatggcagaggaactgaccgattatatgaaagatctgggtatccgtgtcaaatacctgcattccgatatcgatacgctggaacgatcagagattatccgcgatatgcgtctggatgtatttgatgtgctggtgggtatcaacctgcttcgagagggtctggatatcccggagatctcactggtggcgatcctggatgcggacaaggaaggattcctgcgatcggaaacttctctgatccagacaatcggccgtgcagcaagaaatgcggagggacatgtcatcatgtatgcagatgtgatcacagattccatgcgccgcgccatcgatgagacacttcgaagaagagaattgcaggaaacatataataaggaacacggaattacaccgaagacaatcaaaaaggcagtcagagatctgatcagcatatccaaagaggtggcgaagacgcagaagaagctggaaaaagatatggaatccatgagccgagaggaactcgaagaactgatcggaaaagtacagaaacagatgaaagcggcagcagccgacctgaacttcgagatggccgccgagctgcgcgaccagatgattgaactgaagaagaatctggaagaactggacaagtaagagtacgactcaaaaaatctgtatttatataaagaaagaattttctgagaaaatatcctcaaaatgtgtgagaggacattttcggcaggagattctttccttttattttacgcgagcaacgagccaaagtccatgcttgcatgagaacttggcgactgccgtgataacgagaaaaattcgtgaagcgtatttttctcgtttacgcgagcaacgagtcaaagacctggttgtgtgagaacacggcgattgttgcgataacgagaaaagtttgcaaagcataaagtatatgtcatcttacgtgagtgaataatgtatcaaaactatgcttgtatgagaacacagaggcttccagaaaacgaaagtaagagaaaaacacaggagaaaatttccagcttaaaacatcaataagaaaagaaatccaagaaaaaacaaaaattttcaaaatacccattgacaaataaaagaggcagtgctatctttaaaccatagatgttagcactccacttaaatgagtgctaacacaacaaaaagacaaagaaggaggcagagaagatgcaggatttggatgaaagaaaacgcaagattttaaaagcgattatccagacctatctggaaactggtgagccggttggttcgagaaccatttccaaatacacagatttgaatctgagttctgccaccattcgaaatgagatgtcggatctggaagatctgggatacatcgtacagcctcacacctcagcgggcaggattccatcggatctcggttatcggttatatgtcgatgaactgatgaaagaaaaagatcaggaagtttccgagatgaaggaaatcatgatcgagaagacagaccggatggaacgggtgctcaaacaggtggtcaaggtgcttgcatccaatacgaattatgcgacgctcattaccggtcctacctatcatcacaacaaagtaaagttcattcagttatccaagctgaacgaagaacagcttctggcggtgatcgttgtggaaggcaacctggtaaagaaccagatcgtgaatctggatgagacgatcgatgatgaacagatcctgaaactgaacctgttattgaacacacagctgaatggcctgacgatcgaagagatcagtcttggcatgatcacgaagctgaaagaacaggcaggtgtccacagcggcgtggtaagtaccgtattagatgcggtggcagatgccattgcagtggacgatgaggaagttccggtgtatacaagcggagcgaccaacatcttcaagtatccggaactggcagacagcagtaaagccagcgagctgatatccgcatttgaggataaacaggaactggttgagatgattaaagataccgtttctgattccggagagaatacaggaattcaggtatatataggaaatgaaagcccgatacagaccatgaaagactgcagcgtagttaccgcatcgtatgatcttggagagggaatgaaaggaacgataggaattatcggaccgaagcgaatggattatgaaaatgtagtagataatctgaaaacattgaaagtccagttggacaacatattcaaaaagccgtagaaaggtggaatgtgagagatgacagaagaaaataaaacgactgctgaggagacagccgaagaggtaaaagaaaccgaggcagctgaagacgaagtcaccgaagcaactcctgaaactcaggcaggaagcgaagaagtggaagagaccaaagagaaaaaactttttggaaaaaagaaaaaagataaaaaagatgaaaaaatcgaagaactgaccgatcgcgtaaaacgccagatggccgagttcgaaaacttcagaaaacgtaccgaaaaagaaaaagcaggtatgtatgctgtgggagccaaggatgtgatcgagaagatccttccggtagtcgataactttgaaagaggtctggatgtcgcagaagacaaagaagatcctttcgtacagggaatggaaaaaatctacaaacagttccttaccgcactggatggcatgggagtaaaagccattgaagctgtaggaaatgaattcaatccggatttccacaacgcagtgatgcatgtggaagatgaaacagtcggagagaacatcgtagtagaagagttccagaagggttacatgtacaaagacagtgtagtccgccacagcatggtaaaagtagccaactaacaattatcagaatatagattaagattataaattcatgaggaggaaacagtcatgggaaaaatcattggtattgacttaggaacaacaaacagctgtgtagctgttatggaaggtggaaaaccaaccgttatcacaaatgcagaaggagcaagaacaacaccatctgtagtagcatttacaaaaacaggagaaagattggtaggtgaacctgcaaaacgtcaggcagtaaccaacgcagataaaacagtttcttctattaaaagacatatgggtactgactacaaagtaaccatcgatgacaaaaaatattctccacaggagatttccgctatgatcctgcagaagatgaaatccgatgcagaaaactacctgggtgaaaaagtaacagaagcagttatcactgttccggcttacttcaacgatgcgcagcgtcaggctaccaaagatgcaggtaagatcgcaggtcttgatgtaaaacgtatcatcaacgagcctacagcagcagctctggcatatggtctggacaacgaacaggaacagaagatcatggtatacgacttaggtggtggtacatttgatgtatctatcatcgagatcggtgatggcgttatcgaagttctgtctaccgcaggtaacaaccgtctgggtggtgatgacttcgaccagaaagtagcagattacatgctggcagagttcaagagaacagaaggtgtagacctgtctcaggataagatggctctgcagagaatcaaagaagcagcagagaaagcgaaaaaagaactttcttcttctacaacaaccaacatcaacctgccattcatcacagctacagcagaaggtccgaaacacttcgatatgaacctgacaaaagcaaaattcgatgaactgacacatgatctggtagaactgacagcagaacctgtaagaagagcactgtcagatgcaggactgaccgcttctgaactgagcaaagtccttctggttggtggttctacacgtatcccggctgtacaggataaagtaaaacagctgacaggacatgaaccaagcaagagcctgaacccggatgagtgcgtagctctgggagcttccgtacagggtggtaaactggcaggcgatgccggtgccggcgatatcctgcttctggatgtaactccactgtcactgtctatcgagacaatgggtggtatcgcaaccagactgatcgagagaaatacaaccatcccgaccaagaagagccagatcttctccacagcagcagataaccagacagccgtagacatcaacgtcgtacagggtgagagacagtttgcgaaagacaacaaatctcttggacagttccgtctggatggtatcccgccagcaagaagaggtgttccgcagatcgaagtaacttttgatattgatgccaacggtatcgtaaatgtatctgcaaaagacctgggaacaggaaaagaacagcacattactatcacagctggttccaatatgtctgattccgatatcgacaaagcagtaaaagaagctgctgagtacgaagcacaggataagaagagaaaagaagctattgatacaagaaacgatgcagacgctatggtattccagacagagaaagccatcgaagaagtaggtgacaaactggatgccaacgataagacagcagtagaagctgatctggcagctctgaaagatctgatcgcaaaagctcctgtagataacatgacagatgagcaggttgcagagatcaaagctgcaaaagaaaaactgatggaaagcgcacagaaactgttcgcaaaagtatacgagcaggcacagggggcagcaggtgctcagggtgcaggtccggacatgaacggtgcagcaggcggtgcttctcagggatccagcgaagcaggctacggcgatgatgtcgtagacgctgactacaaagaagtttaataaagcgaataaaaatgcttaccaaacggttgcaaaactcatgtaagtaagttcaggggacggggataccggaaggatcaccgtccccataatgtgatgataccagggttaaaaggtcggaaatctgacgcaagcttgcttgcaggaagatttctgaacttggaacccgccaaaaacatgagtaagtagccatttttcgaagaaaaatgagcggattacgaatgtttttgaggattgtgagagtacgaagtacggaacaatccggtatcaaaggggtcaaaatattttttgcccccaacatcatttagtttgataattccgcagttgtatcccccaggggtacgaggcgtttcgataaggtgaaagaaaatggcagagaaaagagattattatgaggttctgggtgtagagcgcggagctgatgatgcgaccttgaaaaaagcataccggaaactggcgaaaaaatatcatccggatatgaacccaggggataaagaagcagaagcaaaattcaaagaggcgacagaggcgtacagcgtactgagcgatccggaaaagagaagaacatacgaccagtacggtcatgcagcatttgaaaatggtggagccggtcagggtggcggtttcggtggattcgactttaacggcgcagatatgggcgatatcttcggcgatattttcggggatctgttcggtggcggaagaagccgcagagcgaacaacggtccgatgcgtggagcaaacctgcgtgcggttgttcatattactttccaggaagcagttttcggctgcgaaaaagaactggaactgacactgaaagatacctgtaccaaatgtaacggaaccggtgcaaaaccgggtacttctccggaaacctgtagcaaatgtcatggaaccggtcaggtaacctatacacagcagtccatgttcggtatggtacgaaacgtacagacctgtccggactgtggaggaaccggtaagatcatcaaagacaaatgcccggattgccgtggaaccggatttaccgcaagcagaaagaagatccaggtatctattccggcaggtatcgacgatggacagagcatccgtattcgtgaaaaaggagaaccgggaaccaatggcggaccgagaggcgatctgctggtagaagtacaggtagcccgtcatccgatcttccagagacaggatatgaatatcttctccacagcaccgatcacctatgcacaggctgcactgggtggtaagatccgcatcagcacggtagacggtgaagtagagtacgaagtaaaacctggtacacagaccgataccaagatccgtctgcgcggaaaaggtgtaccgtcactgagaaacaaaaatgtccgcggtgatcagtatgtcaccctggttgtccaggtaccgaccaagctttccgaggaagccaaagatgcacttcgtgcttttgacgcagcatgccagggaaaaccggcaccggagaaagaaaagaaaaaacgcttcatggataaactgaaagaaacctttgaggattagtaactattcagtagggaatattccgcgaggtgttttggtatgaatatgccaaaatcccgagacatacgagcaaaaatgccatcaccgtaggtgatggcatttttgctcgtaactgtgaaggaactgaacagttacgaagattagaaataacagactgtacgacagaaaataaaaaagagtcagacagttacaggcaaaagagactgtccggaaaacagaaatagtttccgggcaatctcttttgttgctttttcggacagaatctagtatagttatcatagctatgcacttgtgtacttgtacagaaaggtgagaaatactatgaaatggaaaaaatttaaaataaaaacagtgacagatgcagaagatattatcatcagtacgttatatgatatcggactggaaggagcacagattgaagacaaagtgccgctgactgcgatggaaaaagagcagatgtttgtagacatcctgccggatggaccggaagatgacggaatcgcttacttaagtttctttgtggaagaggcagaagacggaacccttacggtaaatggcgaggagaaaacagaagaagagattctttctcaggtaaaagaagaactggaatccctgcggatgttctgtgagatcggcgagggcagtattgccgtggatgagacggaagatatcgactggatcaacaactggaaaaaatacttcaaacagttttatgtggatgacattctgatcattccttcctgggaagaagtcaaagaagaggacaaagacaagatgatcatccatatcgatccgggaacagcatttggaaccggtatgcatgagaccacacagctgtgtatccgccagctgaaaaaatacgtgacaccggagaccgaacttctcgatgtgggaaccggaagcggtattctgtcgatcattgcactgaaaatgggtgcaaaacacgcagtcggaaccgatctggatccatgtgcggtaccggcagtggaagaaaataaagaagtaaacggaatcattccggaaagcttcgacatgatgatcggaaatatcatcgatgacaaagaagtacaggataaagtcggatacggatgctacgatatcgtagtggcaaatattctggcagatgttttggtaccgctgacaccggtcattgttaaccagatgaaaccgggcgcagtatatattacctccggtatcatcgatgacaaagaaccgaccgtagtagatgccgtgaaagcagccggtctggagattctggaagtgacatatcagggcgagtgggtatccgtaaccgcaagaaagcaggcgtaagatgtatcgtttttttgtaaaaccggaacagattgatatggaagaaaaaaaggtgcatatcacaggcagtgatgtgaaccatataaaaaatgtgcttcggatgcgtcagggagaaaccatcctgatcagcgcaggggataatctggaatatacctgtctggtcggcgagatggaagcggaagaagtgatcgcagatatcagctatgtgcaggaagtaggcatggagctgccgtcaaagatttatctgtttcagggacttccaaagagtgacaagatggagatgatcattcagaaagcggtggaactcggcgtttatgaagtgattccggtgagcactgcacgggcggtagtaaaactggatgccaaaaaagaagcatccaaacagaaacggtggcagacgatcgcagaaagtgctgcaaaacagtccaaacgaatggtgattccacagattcattctgtgatgaagttttcagaggcagtgaactacgccggagagctggatatccggtttattccgtatgagcttgccgaagatatggcgcatacgaaaaaactgtttgaacagatcgaaccaggacagtccatcggtatctttatcggaccggaaggtggatttacaccggaagagattgaacttgccatggcacatcaggtacagccgatcacactggggaaacggattttgcggacagagacagcaggaatgacggtactctcgatcctgatgtttttgttggaaggaaaggaataacaagtggaagcatatttagataattcagccacaacccgctgttatgcagaggtgaaggatattgtcgtaaagactatgatggatgactatggcaatccttccgccatgcatcagaagggtgtggagagtgaacgatacgtgaaagaagcggcaggacagatcgcggctacgttaaaagtacaggaaaaagaaatttattttacctccggtggaaccgagtccaacaactgggcactgatcggaacagcactggcaaacagacggcaggggaatcatatcattatcagtagcattgaacatccggcagtatccgccccggcggaatttctggaaagccagggatttgaagtgacgagactgggtgtcaatgcacagggacagatttctctggaagaactgaaagaagcgatccgtccggagacgattctggtatcggtgatgtttgtgaataacgaaatcggagcggtagagccgattgcagagatcggggaactgatcaaacaggtgaatccgaagacgtattttcatgtagatgcgattcaggcatatggaaaattccggattcttccgaaaaaaatgcatatcgatatgctttccgcgagcggacataagattcacggaccgaaaggaaccggattcttatatatcagtgaaaaaatgaaaattgtcccgatcatctacggaggtggtcagcagaaaggcatgcgctccggcacggacaatgtgccgggaatcgcaggactgggactggcttctaaaatggtctatgatcatctggaagaaaatgtaaatcatatgtatgatcttcgcgcgtattttgtcggagaactcgaaaagatggatcaggttgtggttcatggtccgcacggggaagcggctgcgccgcagatcgtaagtgctgcatttgtgggtgtgcgaagcgaagtgttattacataccctggaagaaagagacatctatgtgtcagcgggaagtgcctgctccacacataaaagaagcggaagcccgacgctgacagccatcggactgccgaagaatcagatggaagcaaccgtacggttcagtttctgtgagacaaccacaaaagaagaactggactatacgttacaggtgttaaatgaagtagtaccaatgctgcgccggtatgcaagacattaagcgcaggaaggaacagaaggagaaaagagatgtttaaagcatttttagtaaaatatgcggagatcggcatcaagggaaaaaacagatatctgtttgaagatgcgctgatccgtcagatggaatatgtattgaaaccggtagagggaaccttccatgtaaccaaagagcagggaagaatctatgtgctgaccgagggtgactttgattatgaggaagcactggaagcgttaaaacgcgtatttggtattgcgtatatctgcccggttgtgatcaaagaagatcagggatacgaacagctggaaaaagatgtggtggcttatgtggaccatgtgtatccggataaaaataaaacattcaagatgcatgtacgccgtgcaaagaagacctatccgggaacttcgatggaactgaatgcaaacctcggcggagcgatcctggatgcatttccggagatgaaagtcgatgtgcacgatccacagttgctgatcacggtggagatccgtgaaaaaatctatatttattccgagtctatcccgggacctggcggtatgccgatcggaactaacggaaaagcgatgcttttgttatcaggtggtatcgactctccggtagccggttacatgatcgcaaaacgtggcgtaaagatcgatgcggtttatttccatgcaccgccatacaccagcgaacgtgccaaacagaaagtggtagatctggcaaaactggtggcaagatacagcggaccgatcaatctgtatgttgtaaactttacagatattcagttgtatatctacgatcagtgcccgcacgacgagttgacaatcattatgcgccgttacatgatgaagattgcagaacgtatcggaaaagagcagggatgcctgggactgatcacaggagagagcatcggacaggtggcaagccagaccgtacagagtcttgcggcaacgaacgaagtgtgcacgatgccggtattccgtccggtgatcggatttgacaaacaggagatcgtggatatctctctgaagatcaatacttacgagacatccattcagccatacgaagactgctgtacgatctttgtggcaaaacatccggtaaccaaaccgaacatccagatgatcaaaaaatcagagacaaaactcgcagagaagattgatgagatgatggatcaggcggtcaataccgcagagaggatctatattgaagcgtaaactggaagcgagataaaatacgcgaagcgtaaaaaacgggagtctgtgaaacacagactcccgatttaaaagtgcagaatcatcattcaataatgtatggagcaagtacctttaatacttcgtccaggctgcttccttctgcatgaacgttcagattgatcggtttggaaagatccagactgaagatacccatgatagattttgcatcgatcacatatcttccggaaaccagatcaaaatcgaaatcatatttggaaatatcgtttacaaatgcttttactttgtcaatggaattaagtgaaatactaacagttttcatgataacttcctcccgaaaattcagattatttttggaatgtacggcgcgtaaatctgtcaataacagttttgtgcggcgcatttcaactaaatttatcttaccgttttgattgctaaaagtcaaggtgaaagcatacaaagattcaaagaaaacagaaaaataaattggcagaaaagaaagaaggtagacaatgaaaggaaaagttgcactgcataatctgggatgtaaagtaaatgcatatgagaccgaggcaatgcagcagatgttagaggcggcaggctatgaaatcgtgccttttgaaccgggtgcggacatttatgtgatcaatacctgcagcgttaccaatattgccgaccgcaagtcgagacagatgcttcacaaagcaaaaaagatgaatccggatgccatcgtggtcgcagccggatgctatgtgcaggcagatacaaaaaaagcagaggcagatgcgtctatagatatcataatcgggaataataaaaaacaggaactgatccccatactggaaagttaccggacaggtcatcagaaaaccacagaatgtgtggacatcaatcacacgaaagagtatgaaaatctggagattgaccgtaccgaagaacatacaagagcatacctgaaagtgcaggacggctgcaaccagttctgtacctactgtatcatcccgtatgccagaggacggatccgcagcaaaaagacagaggatgtggtaaatgaagtaaaacgccttgcagcatccggctgtcaggaagtggtactgacggggatccatctgagttcttacggaaaagaacgcccggaggatcaggaaaatctgctgacgctgattcaggcagtgcatcaggtggacgggattgagaggatccgtcttggttcgctggaaccgggaattatcacagaagaatttgcagcggcgatcagcagtctgccgaaagtgtgcccgcattttcatctgtctttgcagagcggatgtaccaccacattaaagcggatgaaccgtcgctataccgccgaagagtaccgggaaaaatgcgaaatcctgagaaaatactatccggcaccggcactgacgaccgatgtgatcacaggatctccgggagaaacggaagaagaatttgaagaaagccgcagctttgtggacagtattcatttttatgagacacatattttcccgtattccaagagagaggggacaaaggcagcgggtatgccggatcagcttacggaacaggtgaaaaaagaacgaagcaggattctgatcgctctcggaaaagaacatcagcgggagtatatggagcagtttttgggacaggaaaaagaggttctgtttgaggaacagcagacggtggaagggcaggaatactggaccggacatacgatggaatacctgaaaattgcggtaatatcggaagaaaacctggagaataagcgtgttatggtacagcttcgggagatgatcggtcaggatctcattcttgcagaacggtaaaaaaccggaatcggcagaatgttacaaaactgataaatagcaacagaaagtttaaaaaaactgtaaacttgattgaatttttgcatcttctgtattagaatagaatagatatcaagtatagttgaggacgtgaaaaaatggcaaatttaagcaatacacagtattttaaagtgaaaacagagccggaagtacaggtgaaagaagtcctggatgtggtatacacagctatggaagaaaagggttataacccggtcaaccagattgttggttatattatgtcaggtgacccaacgtatatcaccagctacaaaggtgccagaagcatgatcatgaaagtagaacgtgacgaactggtagaggaacttctgaaagagtatattaagaacagatcctgggagaatcgctgatgaggattcttggacttgattatggctcaaagacaatgggagtcgcggtgagcgacccccttggttttactgcacagggtgtggaaatcatccgcagaaaatcagaaaacaagatgcgccagacactggcaagaatcgaagaactgatcgcacagtatcaggtagaagaaatcgtacttggtttaccgaagaatatgaataacacactgggagacagggctgagaaatctctggagctgaaagaaacgctggagagaaggacaggtctgcctgttgtgatgtgggatgaacggctgacaactgtatctgccaaccgggtattgatggagacgggagtacgccgggaaaaccggaaagagcatgtggacgagattgctgcggtatttatcctgcagggatatctggattatcttgcgaataagaaagaagaaacaggacggtagaatcgttatggataaaatcaaatttgtgacagatgaaggcgaaacagtggaattctatgtagaggagcagaccagagtgaacggtacagattatctgctggtaacagactccatggatgatgaagccaacgcctacatcctgaaagactcttctgatgagacagatccggaagcggattatgtgatggtggaagatgacgtggaactggaagccatgtcaaaagtgttcagtcagatgatggacgatgtggatattgagatgtaagtagtgacggaggtgctatttgaaaaaaagtaacgatggaaaattgaaaatcattcctctgggcggattggaacagatcggaatgaacattactgccttcgaatacgaagacagtattattgtggtggactgcggtctggcgttcccggaggacgatatgctgggaatcgacctggtcatccctgatattacctatttgaaagacaactatgaaaaagtgaagggttttgtgatcactcacggacacgaggatcatatcggagctcttccttatgtattaagagagattaatgtgccgatctacgcaaccaagctgacgatcggtctgatagaaaataaattaaaagaacacaacttacttcgtaccacaaaaagaaaaaccatcaaacacggacagtcgatcaatctgggatgcttccggattgaattcattaaaacaaatcacagtattcaggatgcttctgcacttgctatctattctcctgccggaattgttgtgcataccggtgactttaaagtagattatactccggtatttggcgatgccattgatctgcagcgttttgcagagatcggaaaaaaaggtgttcttgcactgatgtgtgacagtaccaatgcagagagaaaaggatttaccatgtcagaacgtaccgtgggaaaaacatttgacaatctgtttgcagagcataacaatacaagaatcatcattgctacttttgcgtccaatgtagaccgtgtacagcagatcatcaactctgcttacaaatacggaagaaaagtagttgtggaaggccgaagcatggtcaatgtcatcggaacggcgtccgaacttggctatctgaacgtgccggacaatacactgattgatatcgatgagatgaaaaattatccggatgagcagatggttctgatcacaaccggaagccagggtgagtccatggcggctctgtcccgtatggcggcaaatattcataaaaaagtttcgattaaaccgggcgataccattattttcagttccaacccgattccgggtaatgaaaaagcggtatcccgcgtgatcaacgaactgtcagccaaaggtgcggatgttattttccaggatgtccatgtatccggacatgcctgccaggaagagatcaagttgatctactctctggtaaaaccgaagtattcgattccggttcacggagaattccgtcatctgaaagcacaggctggcattgcggaaagcctgggtattccgaaagaaaacattttcatcatgcactccggtgatgtgatggaattaaacgaagagtccgcggcgatcaccggtaaagtgcataccggagcgatcctggtagatggacttggtgtcggtgatgtaggaaatatcgtacttcgcgaccgtcagcatctggcagaagacggtatcatgatcgttgtactgacactggaaaagtacagcaaccagcttctggcaggtccggatatcgtatcccgtggatttgtctatgtgagagaatccgaagatctgatgggacaggcaaagagcgtcgtagaagatgcgatcgattcttgcctggatcgaagaatctccgactggggaaaaatgaaaggtgtgatcaaggattccctgggtgacttcctgtggaagagaaccaagagaaaaccgatgattctgccaattataatggaggcgtaagatacatgaacaagatacaggaatgcgtagaaaaactgctggaagtaatcagagaggattccgcatatcagaggtaccttgcatgtgaggagaagctgaaatccaatccggaattaaaaaaacagattgatgaattccgtgtagccgtctttcatatgaacaatgacgatacacagggagatttgtacgatattacagatgaagtggaaaacagatatgaaagccttcggaaagttccggaggtgaacgcatatctggaggcggaactggatgtctgtcggatgcttcagcaggtacagtcacagttccgaaacgggattgatctgaacattcccaatgtataatcacactgccggacatccctgcagcagatgcgggaaggagaagcaaggagtatagatgggtagtaagaaaaagaaaaaagatgcaacgtatcaggctgctgtcagcggggcgaaaggagcaatccggatcctgctttatgttttactgatctggatcctgatctttgtgggaaaaacggcatacagctttggatatctgatcttttatcaggaaccggaggcagatacacaggcggacggtcaggatgtgaccgtgatcgttcatgaggaggattccgtctatgatgtgggtgtgacgttgcaggagaaaggactgatcgaacgaccggtcatcttctgggcacaggaaaaactctccgattaccgtggcaagatcaaaccgggaacgtatcttctgaatacgcatgagacggttgatcagatgcttgccatcctgtcagggaaaaatacagaaggacagccatcgcaggagaaagaaagcagtacttccgatgcggaggatacggaggctggggaggagagtgcgtcatgatcgtagatgaacgtatggtgacatttatcaattctctggatgaagggcatacggagtttctcgaacagctggaaaaagaagcaagggaagatgcagttcccatcgtaagaagagagatgcagagtttcttaaagtttctgatggcggctgccagaccgaagcggatcctggaagtgggaaccgcggttggattttctgcacttttaatgtgtgagtataatccggaaccctgtcagatcataaccatagaaaattatgaaaagaggatcccgattgcccgggaaaactttaagaaagcgggcaaggagggacagatcgaacttctggagggagatgcggcaaagatcctgccgacacttaccgagccgtttgactttatctttatggatgcggcgaagggacagtaccttcactttttgccggaagttttgcgcctgttaaagagcggcggacttctggtgtcggataatatcctgcaggaaggcgatctgatcgaatcccggttcgcagtggagcgaaggaaccggacgatctacaaacggatgcgcgagtatctgtatgaattaaaacacaatgacgagctggtaacttccctgcttccgttaggggatggggttgcggtcagcacgaaacgataggagaaagaaacatgagaattccggaattacttgttccggccagcagcctggaagtattacaggttgcggttatatttggtgcggatgcagtttatatcggaggcgaggccttcggtctgcgcgccaaagcgaaaaatttttcaaaagcagacatggcagaaggcattcggtttgcccatgaacatggtgtcaaagtgtatgtcacagccaacattctggcacataatcaggatctcgaaggcgttcgggaatattttgaagagctgaaaaagatcggaccggatgcgctgatcatttcggatccgggtgtatatcagattgcaaaagaagtatgtcctgagatcgaacgccacatcagtacccaggcgaacaataccaactatggaacgtatcagttctggtatcagatgggagccaaacgtgtggtaacggcaagggagttgtctctcgaagagatccgcgagatccgaaaccggattccggatgatatggagattgagacatttatccacggagcgatgtgtatctcctattccggaagatgcctgttgagcaattatctgaccggaagagattccaatcagggagcatgcactcatccgtgtcgatggaagtactctattatggaagaaagtcgtccgggagagtattttccggtctatgaaaatgagagaggaacctttattttcaattccaaggatctgtgcatgatcgagcatatcccggatctgatcgataccggaatcgacagctttaagatcgaggggcgtatgaagactgccctgtacgtggcaacagttgcccggacctatcggaaagccatcgacgactatctgaaagatccggcactgtatcagaaaaatatgccatggtatcaggaacagatttcaaactgtacttaccggcagtttaccaccggattcttttacggaaaaccaacccaggaagcacagatttatgataacaacacatatatcaaagaatatacttatctgggtatcgtgggagaggcaaacgaagaaggaaaatactatatctctcagagaaacaagttttctgtcggagaacagatcgaggttatgaagccgaatggcgataacatcgaagtgaccgtaaagagtattcaggatgaggaaggcaaccagatggagagcgcaccgcatccgaaacagattctttacattgatctgggaatcaaactggatcgatatgatattttacgcagaaaagaaccggtcacggagctttaatacagcatttttttcaatgcgggagacataggagcggctgattcccagccgtttccccagcacccgctgtgtcaattctttttcaccaaaaagcccgtagcggtatttgatcacttcatattccaatggtgaaagaacttcccttaaaaaaacatgtaacttcagaatccgttctttttggatgcactggtcggtgatatcctgttcttttccttccacaatatccagaagatgaatctcgtttccttctttgtccgtaccgatcggttcgtacagagaaacttctctggaaaattttttccggctgcgaagcatcatcaacaattcattatcaatacagcgggcagcgtaagtagccagtctgctgccttttgtcatatcataggtggacacggccttgatcagaccgatcgttcctatggagatcaaatcatccagatcttcatcaaccccctggtatttttttacaatatgcgcaacaagccgcagattgcgttcaatcaacacatcccgcgccgccttatcaccctgtcggcatttacggagatagaaagtttcttcttccgtggtgaggggtttcagaaaggtcttcacttacacacctcaaagggctttctttctaatctatgccctgacagaagaaattgtgcttttcccaaaatacagaagcagaacacatcagaatatattttcccaaaacataatgaaaatgccaaaaatcaatgtacatcagagaggagtggtcattgtatgtatacaagtatcttatcggcaacgatgcagggaatcaaagcgatcccggtgcaggtggaggtggatgtaagtccggggcttccgggattttccatggtggggacggtgaacagccaggtgcgggaggcacaggatcgcgtgcggacggcactgcataatctggaaattcctgttccgccaaggcggatcacgatcaatctgtccccggcagatgtgccaaagaccggaaccgggttcgaccttccaatcaccgctgcgatcctggaatcactgggacaccttccgaaaggcggtctggaacaggtcatgttgatcggtgaagtgggactggacggacagatcaaaaaagtacggggcgtgcttgcgatggtggaagaagcgagaaaatccggatgccaggggtgtatcgttccatgggagaaccgaaaagaggcgcagatgatcccggggatccgaagtgtgggagtgaaaaacctgaaagaatttctgagaactgccagagatcggggatgggaacagatggaggcagcgcagatgcagctggtgaataaccggggagaaaccgctgattttaaagagatcaaagggcagtctgcggcaaagcggggagcactgcttgcggcggcaggatttcataatattttgctgatgggacctccgggatccgggaagacgatggtggcaaaacggatcccgggactgcttccggcactgacgcatgaggaggcgatggaaattacttctatttatagtgtagcagggttactgtccgaggagatgccgtgggtctctgtccgcccgttccggtcacctcaccatacgatctctgcccaggcgcttgcgggcggaggaaagatcccgatgcccggggagatcacgctggcgcacagaggggtactgtttctggatgaactggcagagatgaagcgggataccctggagattctccggcagccactcgaagatggggagatccatatcgcgcggataggcggacggtataccttcccggcagaatttcttctggtgggcgcaatgaatccgtgtccctgcggctactatccggacagaaaccgctgtgactgcggggaacatgagatcagacgataccagcagcggatcagtcaggcatttcttgaccggatggatatctgcgtgaccaccagtgcggcaacatatggggaattccgcggagagacaccggcaggcgagagcaatctatggagtacagaacatatgagaagacaggtggagcgggcgcagcagatccaaagagaacgctttgccggatccgggatctgttataacagccagattccgccgggggagatcgcagtctactgtaaaaccagtgaaggagcagaaaaaatgttacagggagcctttgaatcgttacatctgagcggaagggcatgcaaccggatcctccgtgtggcaaggacggcggcggatctcgacggaaaagaaagaatcgaagaagaggagatcgcggaagcgatcggttatcggagttttgacaaacattcttggaaacagggggataaattatgagtgagaacataaaaatatataagaaaacagaagaaggatacccaaaaacattattacagcttccggatgctccggcgaggatatatgtgctgggagaattaccggatccgacgcgtccggcaatcgccatcgttggtgcgagaaactgcagttcctatgggaaaaatatggcgtatgaatacgcaagagttctgacaaaagcaggggttcaggtgatcagcggactggcaagaggggtagatgcggcggcccatgcaggagcactggcagcgggtggaaaaacgtatggcgtgatggggtgcggggtggatttctgttatccgacatcaagcagaaacctgtatcataccatgcagcagcagggagggatattatcggaattttctccgggaacaccgccgcttgcgtatcattttccactgcgaaaccggatcatcagcggactgtcccaggcggtgcttgtggttgaggcaaaagaaaaaagcggttccctgatcactgccgatgcagcactcgagcaggggcggacggttttcgctcttccggggcgtgccggcgaccttttaagcgagggatgtaaccgcctgatctaccagggagcgatccccgcatggaagccggaaatcattctggaagagatgaaatggacgaaaaataaggggaaaatacaggagaatttcacagaggagaaaaaaatagtgcttgcaagggaagatgatttggtgtatagttgtctcgatttgaacccaaaagccgtgtcacagttacaggacgagacaggtttgtcatccggcagtctgttaaagagtctgtattacctgacagcaaaagatctggcccgcgaagtctggcagaattattatatccgcacagaaaagaggtgggcgtaaaggcatggcaataaagaatcaggaggaaaacattggctaaatatttagtgattgtggagtcacctgcgaaggtaaagacggtaaaaaagttcctcggaagcaattacgaagtggcagcttccaacggacatgtccgtgatttgccgaaaagtcagatgggcatcgacatagagaatgattatgaaccgaaatatattacgatccgtggaaaaggagaactgctggcgagtctgagaaaagaagcgaagaaagccgacaaagtatatctcgcaactgacccggaccgcgagggagaagcgatttcctggcatctggcaacagcgttgaagctggatgaaaaaaagatgcgcaggatcacgtttaacgagatcaccaaaagtgcggtaaaagaatccatcaaacatgccagagacattgatatgaatctggttgatgagcagcagacaagacgtatcctggaccgtatggtaggttaccggatcagcccggtactgtggaaaaagatcaaacgcggactgagtgccggtcgtgtgcagtcggtggcactgcgtatcattgcagaccgggaagaagaaatcaatgcatttattccggaagaatactggtctctggatgctgtgtttaagatcccgggggaaaagaaaccgctggttgcaaagttctacggaaaagaaaaagagaagatgacgatttcttccaaagaagaagtggaaaagatcatgaaagaactggaaggtgtatcctatcaggtcagcgaggtgaaaaaaggagagagaagcaagaaagctccgcttccgtttaccaccagtaccctgcagcaggaggcttccaaggcactgaatttttccacgcagaagacgatgcgtctggcacagcagttatatgaaggtgtggatatcaaaggacagggaaccgttgcactgatttcttacctgcgtaccgattctacccgtatctcggaagaagccgatgccatggcaagaagctttatcggggaacattacggggaaaattatgtggcagctcaggagagcaaacagaaagaaaacaagaacgtacaggatgcacacgaggcgatccgtccgaccgatgtctcccgcatgccggcgattgtaaaagaatccctttccagagatcagttccgtctctatcagctgatctggaaacgctttgtggcaagccggatgcagcctgccgtatatgagacaacatccgtgaaaatctccggcggggaatatctgtttaccgttgccgcatcgaagatcaagtttgacggtttcatgtcggtgtatgtccaggcagacgaggagaaggcacagaacaatacactggtgcgaagcattgataaagataccgttctggatttccaggaatttgacgagcagcagcattttacccagccgccggcacattatacggaggcttccctggtaaagaccatggaggaactgggcatcggtcgtccaagtacctatgcgccgacgatcaccacgatcattgcaagaagatatgtggcgaaagaaaataagaacctgtatatgaccgaactgggagaagttgtcaatcagatgatgaaagaggccttcccgagtatcgtggatgtcaactttaccgctacgatggaagatctgctggataaagtgggtgacggaactgtagactggaaagtggtagtccgaaacttctatccggatctcgatgaatccgtaaaagaagcggagaagaatctcgaagaagtaaaactggaagatgaagtcaccgatgtgatctgcgaaaactgcggaagaaacatggtgatcaaatacggtccgcacggaagattcctggcatgcccgggcttcccggagtgtcgaaatacaaaaccgtatctggaaaagatcagtgtcaaatgtccgaagtgcggaaaagaagtagttcttcgaaaaaccaagaaaggccgtaagtattacggctgtgaggataatccggaatgtgatttcatgtcctgggcaaaaccgatcaacgaaaaatgtccgaagtgcggcggctacatggtagaaaaaggcaacaaaaaagcctgcgccaacgagcagtgcggttatgtggaagtaaaagaaaaataaaatgaaatccaaagatacagattcctgaaaagggtctgtatctttttttatgattttgattaggcagataaaacagtcacaataaatgaaaaaattgaaatattcagaaaatattattgttatttagagaatatcatggtacaatatgattaaattataaaaatgacaaaaaatccagaaaggagtagaagatgagcgtacagttattggacaaaaccagaaaaatcaataaattactgcacaataataattctacaaaagtagtgttcaatgatatctgtaaagtaatgatggaaacattggattcaaatattcttgtgatcagtaagaaaggaaaagttcttggtgtcagtttatgtccgggagtagaggaaatcacagaattgattgaggataaagtcggaagtcatgtggatccactgttaaatgaccgttttttaagtgtcttgtccaccaaggaaaatgtgaatcttcaaactctgggatttgagcgggatgatatccagcagtactgcgcgatcattaacccgatcgatattgcaggagaacggctgggaacagtattcatgtatcggaaggaacgccagtatgatattgaagatattatcgtcagtgaatacggaacaaccgtagtgggactggagatgatgcgttccgtcaacgaggaaaatgcagaagaagccagaaaagtccatgtggtaaaagcagctttcagtaccctgtctttctcagagctggaagcgattattcatatttttgatgaactcgacggagacgagggaattcttgtggcaagtaaaatcgctgatcgtgtgggaattacccgttccgtgatcgtcaatgcgctgagaaaattcgagagtgccggtgtgatcgagtccagatccagcggcatgaaaggaacctacatcaaagtactcaacgatgtgatctttgatgaactcgaagaactgaaagcgagaaagaacctgaaagcaacagaaaaagacgactgataccagaatcgttgaaaaaagaaaagacagaagaaagaagctgaggaatattccccgggcttcttttttcgttgcaaataaataaccgggaaccgccgacaaactggaaaaaaatatagaaaagtgagaaaataagagaaaaaaagagcatagatttaaaaatacgagaatatattagaaatgcaagcgaaaagtgaagttgcgaaaacagggcaaaattactaatataagaccatcggtagcactcaagacaaacgagtgctaataaaacaggttatacgcttaaaggaggcaaatagatatgaaattagtaccattaggagacagagttgtattaaaacagttagtagcagaagaaaccacaaaatccggtatcgtattaccgggacaggcacaggaaaaaccacagcaggcagaggttgtagctgtaggacctggcggaatggttgatggaaaagaagtaaagatggaagtagcagttggagatcaggttatctactccaaatatgcaggaacagaagtaaaactggacggagaagaatatatcatcgtaaaacagaatgacattcttgccgttgtaaaataatcgattttcagaaagaaaaacagagatagaatcaggaggaaaaaatcatggcaaaagagattaaatttggagcagaagccagagcagccttagagagaggtgtaaaccagctggctgataccgtaagagttacattaggaccgaaaggaagaaacgttgtactggcaaaaccatacggcgctccgctgatcacaaacgacggtgttacgatcgcaaaagaaatcgaactggaagacggatttgaaaacatgggcgctcagctgatccgtgaagtagcatccaagaccaacgatgtagcaggtgatggtactacaacagctaccgtactggcacaggctatggtaaatgcaggtatgaaaaacctggcagcaggtgctaacccgatcgttctgagaaaaggtatgaagaaggcaaccgataaagcagtagaagctatcgcagctatgagcaaaccggtagaaggaaaagaacagatcgcaagagttgcggctgtatcttccggagacgaagaggttggtaaactggtagcagacgctatggaaaaagtttccaaagacggtgttatcacaatcgaagaatccaagaccatgaaaacagaactggatctggtagaaggtatgcagttcgatcgtggatatatttccgcatatatggcaacggatatggataagatggaagcaactctggataatccatacatcctgatcacagacaaaaagatctccaacattcaggaaatcctgccgctgttagagcagatcgtacagtccggttccaaactgctgatcatcgcagaggatatcgaaggcgaagctctgacaaccctgatcgtaaacaaactgagaggaaccttctctgtagcagctgtaaaagcacctggctatggtgacagaagaaaagaaatgctgcaggatattgctatcctgacaggcggacaggtaatctctgatgaactgggtctggatctgaaagaagctactctggaacagcttggccgtgcaaaatctgtaaaagttcagaaagaaagcacagttatcgttgacggtgaaggcgacaaagaagccatcaaagcaagagtaaatcagatcaaaggacagattgaagagacgacatctgaatttgaccgtgaaaaactgcaggagagactggcaaaactggcaggcggcgtagcggttgtacgtgttggtgcagctaccgagacagagatgaaagaagcaaaactgcgtatggaagatgctctggcagctaccaaagcagcagtagaagaaggcatcatcgcaggtggcggatctgcttacatccatacaacaaaagttctgcaggagctggttgacactctggaaggagacgaaaagaccggtgctcagatcatcatgaaagccctggaagctccgctgttccacatcgcagccaatgcaggtctggaaggatccgtaatcatcaataaagtaaaagaatctgaagttggtgtcggatttgatgcatacaatgaaaaatatgtagatatggtaaaagcaggtatcttggatccggcaaaagtaacaagaagtgcactgcagaatgctaccagtgttgcatctactctgctgacaacagaatctgtagtatccattatcccggaagagacaccggcagcaccggcaggtaacccgggaatgggaatgatgtaatttccagttacagaacacgaatttcataaagatttaagaaaagcaggagctgacgcgatagacggcggctcctgtttgtgttaaaatgaaaagcagacctgactgctatcgcgcagaaaacgggtcggacatgggggaaaaacaaaagtaaggcgtcacagaaaggaaccgggatggaacagaaacgatacgaaagtgatatgaccccaaaagaaaaaagggaactcgagaaaaagaaattaaaacagatgacattcccacagaaagtggaatacatctgggcatactataaactgcatatggcgatagcgcttgccattatcctggtgattgtatttgtcggacagctgatttaccggagtcagtttgacacggtcttttatgcagcaattatcaacggttcgtcaggggacggagaggcgcttgcacaggattttaaaacgtataccggagatacggataagtatcatgaatataccgtggataattccatgtatctggtcaaagaccaggaggattataacatggtcatgaaactttccacgatcatcggcgcccagcaggtggatgtgctgatcgctccggaatacaaatttcaggaatatgtggatcagggtggattttatccgatgtcggaactgctgacagatgaacagcaggaggcatacaaagaccagctgacagaatacggactgaaggttggtgacagtgaggtactcaaagcccatggcatgcaggtggacgaagatgcctgcctgggagtgttgatctattcggatcatctggaggaagccaaatcatttattacatatattatgggtgatggaaacacgcctgatgaaaacgaaggaggacaacaatgagtgatttgtatttggaagaactggtagaaagaagaagaacgggaacggatcaggcactgcggtatgcactgatggcagtgactgcgatcggtgttgtactgtcgcttctcacctggaacctgatcattattgcggtttctatcgcgatttgcgtggcagatatctttattttcccaagatttcagacagaatgggaataccagtatgtcaacggagaactggatgtggaccgtatcctgaacaaagcaaagagaaaacgtatggcatcttacgatatcacaaaagcagaactgatcgctccggcagcgtctcacagatttgattactataataacaatcagaaattaaaagtctgtgattattcatcctgcaacccggagagagaaaaactggtatatgcgatgatcatgccggaaaaagaagggatgctgaaagtgctttttgagccatctgagcatatgattaaggacttccgactgaaagctccgagaaaagtgttctttgattaagattgacagggtgcatgttttttgttaaactaattgtcaacaataagtaaagcatacgaaaggagaaagaaatgggtacaattattggtgatggaattacttttgacgatgtgttactggttcctcagtattcagaagtaactcccaacatggtagatttatctacacatttaacaaaaaaagttaaactgaacatcccgatgatgagtgcgggaatggacacagttaccgaacatcgtatggcgatcgccatggcgagacagggaggtatcggtattatccataaaaacatgtctatcgaggctcaggctgatgaggtggacaaggtaaaacgttcagagaacggagtcatcacagacccatttttcctttcaccggaacacacactggaagatgccaacaatctgatggcaaaattcagaatctccggtgtgccgattacagaaggcagaaaactggttggtatcatcacaaaccgtgacctgaaattcgaagaggatttcaccaagaagatcaaagactgtatgacatccgaaggactgatcacagcaaaagaaggtatcacactggatgaagccaaaaagatccttgcacaggcaagaaaagaaaaactgccgatagtagatgatgacttcaacctgaaaggtctgatcaccatcaaagatattgaaaaacagatcaaatatccgcagtctgcaaaagacaaaaacggtcgtctgctttgtggtgcagctgttggaatcacagcaaacgtgatggaacgtgtggatgctctggtaaaagcaaaagttgatgtcattgttatcgactctgcacacggacattccgcaaatattttcaaaacactgcgtatgatcaaagataaatatccggatctgcaggtgatcgcaggtaacgttgcaacaggtgcagcaaccagagacctgatcgaggccggagccgatgcggtaaaagtaggtatcggacctggatctatctgtacgacccgtgtggttgccggaatcggtgttccacagatcacagcagttatggattgctacaacgcagcaaaagaatacggtgtgccgatcatcgcagatggcggtatcaagtattccggagatatgacaaaagcaatcgcagccggagctaacgtgtgtatgatgggcagcatgtttgccggatgtgatgaaagcccgggaagcttcgaactgtatcagggaagaaaatacaaagtataccgtggtatgggatctatcgcagcaatggaaaacggaagtaaagaccgttatttccagtccggtgcgaagaaactggttccggaaggtgtggaaggccgtgttgcctacaaaggtcatctggaagacacagtattccagttaatcggaggacttcgttccggtatggggtattgcggagcaaaagatattgagacattaaaagaaaccggaaaattcgtaaagatttccgcagcatctttaaaagaatctcatccgcatgatattcatattaccaaagaagcaccaaactacagtattgatgaatagataaaagaggcggtctcaggggtgggactgcctttttggatatacaggagaagagtatgagtgggagaagaaccgggggaagaaaccgacaggggagcaggacagtccgtaggagacggatgacgagacaacagaggagacagcaattgatccggcgatcgatgattgtactgtgtattgcttttttatgtattatcggtctgatatttttatgtgagaaattatttttttcacagacaggacaggatgcggtgcaggagacgggacagattgactggaccggtgcaccggaaatcgatgtggaacttctggatgtcaacgaatattcccgtccgggaatagcgctggagcaggtgaacagcattgtcattcactacactgcgaatccgggaagcagcgccatggcaaacagggattattttgagggactcaaagatgcccataccacaaaagccagcagccattttattgtaggtctggacggtgaagtcgtgcaatgtataccaaccacggaaattgcatatgcttccaataaccggaatgccgatacgatatctatcgagtgctgtcatccggatgataccggtgctttcaacacggcaacgtatcagtcgatggtgcagctgacggcatggctgtgcaaccggtttggactgaccggtcaggatgtgatccgtcactatgatgtgacaggtaagatctgtccgaaatattttgtggaacatgaggacgcctgggagcagtttaagacggatgtgcagcagcagatcgaggcgcttgcgtcataaaaataagggaagaaaaagatataaaaaagtaccggaagcggttgcaaaacagaaaaaacatgttacaatagtgttacgaaaaaattaaaggtgataacatgaacttatttgaagcaatttttgtccggaaatccgtccggagttatacaaatgaagggatcagtccgaaagttttggaagatattctgaaacaatttgatgagatcaacggactgtttggtggagtagagacggaactggcgatttttgacaatcgacagaatgattataagatgctgagcctcctgggaatcaaggcgccgtactatctggtgctgtattctgaggaaaaagaccgtgcgatgatgaacgccgggtatctgatggagcagctttctttatatatgtataccagaggaatcggaagctgttttatcggcaatccgatcatcaagaaaaaataccagtaccgtgataaaaaacggatgatggtggtgatggcattcggaaaaccgaagggaagctgttatcggaaacaggtggaggcgaagcggctgagtctcgatgaactgtgtgtatacaaagagacaccgagacagtggatgaagcagctgttagacgccgcacggatggcaccgtcgagtatgaacagccagccgtggcgctttgtagtatttgacagccggatccatattttctcaaagaagcatccgagtgataaactgggaaaatgggatgaggtaaactttggtatcatgtttgccaatatgatgacggcagcagaagagatgtggctggatgtggatctgatccgtctggacgagctgagtcagaaaaactttcagaacaatcagtatgtgttgagtgcgattttacgtccgtaagatggaaaaatagcatgatttatctcagttgaagaaaaaatataaaaaattgcaacaatttagttgacaggtgctgagatttatagtatgatatctttgttccaaggaacaaggatatgcacgagtggctcagtggtggagtatcgccttgccaaggcgagggtcgcgggttcgaatcccgtctcgtgctctgaatgaaggactttgtcagtaatgacaaggtcctttttcgtatataaaaaataagtcaggaggaatgctatggaatacacaaagatttcaaagaagatcaaatctccggttgacggactgaaactggatctgctggtgctggttccggccggaacgccaaaggggattctacagattcatcatggtatggcagaatataaagagcggtatctgccatttatggaatattttgcacaagccggatatgtgacagcgatccatgactgccgcggacacggaaaaagtgtgcggacgaaaaaagatctgggttatatgtatggcggcggtatggacgcgctgattgaagataccgctgaaatcaccagaatgttaaaagaagaatggcagggagtaccgcttattttactgggacacagcatgggttctatggtggttcgctgttttacaaaaaagtacgatgatcttctggacatgctggtagtctgtggttctccgtcgaagaatccgggagcaaaagtcggactggcgctggcagctgcccaggaaaagatcagcggggcacatcatgtcagccgttttctggaactgctttccctgggaagctattcggcgaagttcgccggtgagggaagtcgttttgcctggtgctgttccgatgaacaggtcgtgcgtgattatgaagcctcggaattttgcggatttacctttactgtggatgcggacaaggcactgtttcagctgatggatgagacgtatcgggagactggatggaaactttccaacccgaagcttccggtattatttatcggaggctatgaagatccgtgtatcggaggagcaagaaaatttgctcaggcagtgcagacgatgcggcgggtaggatatatggacacgaaaggcaaactgtatccgtccatgcgtcatgagatcctgaacgaacgggaaaaagaaaaagtgtatcatgatgtgaaaaaatacatggaaaagaaattaaatatttgaactgtaaagtgaatttctgctcactttacacagatttaacaaaagaccgtgaacagatttaacagggatttaatataatgatgccgtcgaaagagaaaaaacattgggaggacaacaatggacatattcagtgtattaacgatggtaggaggactggctctgtttctgtacggtatgcaggtgatgggagacgggctggcgaaggtatccggcggaaagctggagcggattctggaaaatctgacatccagtccgatcaaggcggtactgctcggagccggtgtgacggcggtgattcagtcgtcatcagcgacgaccgttatggttgtcggatttgtcaattcgggtattatgaagctgaaccaggcagtgggaattatcatgggtgccaatatcggtacaaccgtaacttcctggatcctcagtttatccgggttgcagggagacaatatctttgtaaaattatgtaaaccaagttccttttccccgatccttgcagtgatcggtgtggtttttctgatctttctcaaagatgagaagaaaaaagatatcggaacaatcatggttgggtttgccgtgctgatgttcggtatggaaaccatgagtgatgcggtaaaaccgctggcaaatgtaccggaatttaccggtatcctgactgcattttccaacccgatcctcggtatgatcgccggagcagtgctgacagcgatcattcagagttcttccgcttccgtcggtatcctgcaggcgctctgtgtgaccggagcggtaagctacggggtagcgatcccgatcatcatgggacagaatatcggtacctgtgtgaccgccctgttatcgagtatcggagcaagcaaaaatgcaaaacgtgccgctatggtacatctgtatttcaatattatcggaacggttgtgttcatggtgatcttttattcggtcaatgcagtcgttggattttctttcctcggtacggcggcaaacgcagcgggaattgctgtggtacacagtctgtttaatgtatttgctacgctgttattacttccgttcagtaaaggactggagaaacttgcctgcctgacaatccgggacgatacaaaatctctggaagaggaagaagagaaaaaagaattacagcttctggatgcccgttttctggaaaaaccggcatttgcgatggagcagagcgttcatgtggcaaataagatggcggaggaatccaaacgtactctatttacagcgatggatcttctgtggaattacacggaggatggcgcgaaaaaggtgagcgaactggagacactggtagatcagtatgaggatgagctgggaacgtatctggtaaaactttccaggcagaacctgagtgttcatgacagccacacgttatcgatcgtgctgcactgtatcggagattttgaacggatttccgaccatgccatcaacatcatggaggcagcgcaggagatgtacaacaagaagctgaccttctcgccgaaagcggaagaagagttaaaagttttcagcagagcggtgcaggatattgtggaaaaagcgtatgcggtattccgtgaccaggacgagaagctggcgcagaaagtagaaccgctcgaagcggtcgtggatgacctgaatcaggaagtgaagaaacgccatatccgcagactacggaatggaaaatgtacgatcgaactgggattcatcctttcggatatcacgaccagtctcgagcgtgtggcagatcactgttccaacattgcagtctgtgtgacacaggtaagggatgatacttacgatacccatggatacctgaacagtgtaaaaaatgaggacagcgagattttccgtggactggtattagaggcagaagaaaaatatttgctgccataaagataggagagacttatgatttactgcgttgaggatgagagaaatattcgggaactgctggtatataccctgcattccacaggatttgaggcaaagggactggaaaatggtgagcagctgtttgaagaactgggcaacctgatcccggatctgatcctgctggacatcatgcttccgggggatgacggatatacgatcctggctaagatccggcagatgccggaggtacgggaggttcccgtgatcatggtgaccgcaaaaggtgcggaatttgataaggtaaaaggtctggatctcggtgcggacgattatatcaccaagccattcggcatgatggaatttatctcccgtgtgaaggcagtacttcgaagagggggaacccggacggaagaaacactggtacacggtccgatccagatccggatccagcgccatgaagtgctggtgcacgggcagaaggtagaactgacattgaaagagttcgaactgctgaaatatctggtggaaaacagaggaattgtcctgacgcgtgatcagttattgaccagaatctggggatacgattttgacggtgagaccagaacggtggatgtccatgtgcgaaccctccgacagaaacttggagaagcaggaacatgtatcgagacggtccgcggcgtaggttaccgcatgggagatgaatcatgagacagaaaattttaaagcaggttggagtccttttgacggtctccatcctgcttacctttttagtcgtcagtctgacgatgtacagcaaatttaacggatatatgcatgaaagtgtgcgggaagaagcggaatatatcaaagtggcaatcgaggagacggatggtgcatacctgaatgagaaaatcagcagtatgaagtcggataatagaatcaccctgttaaatacggatggtacggtgttatacgattctctggaagatgcctccacgatgggaaatcacaacgatcgcccggaggtacgggaggcagaaaaagacggctccggtgagaggctccggtattcggaaacactggacaaacagaccttttattatgcagtccggctggaggatggtaaaatcctccgggtgtcaagaagcatcgattccgttctgggatacttacagtccggaattgtactggtggcagttctggtgctgggaatcatcggtatcgcctttttcgtgatccagaaccagacaaaaaaattggtggagccgattaataagatggatctggaacatccgcttcggcatgtggaatatgaggaactgcgtccgcttctggtgcgtgttcacgaacagaaccgccagatcgcaggacagatccaggaattaaaagagcgtcatgaggaatatctggcgatcacggagaatatgaaagatggtctggtggtagcaagccagacagaggtactttctattaataaggcggcacaggaactgtttcaggtacaggcgagcgactgtatccgaaaaccgatcagccgtgtcagccggaacaaagaactgaaaaaagcgctggacggcgcactggcaggcgaacatatcgagacagtgctggagacacacggacgtttttatcagcttcttgccaatccggtaaaagtatcaggaaagacttacggtgcagttatcatggtgtgggatatcacagaaaaaaatgcggcagagcagatgcgaagagaattctccgccaatgtatcgcatgaattaaaaaccccgctgatgtcgatctcgggctatgcggaactgattgaaaatggcatggtacagcaggcagacatcccggaatttgcatcccgtattcatcaggaagccaaccgactgaccgcactggtacaggatatcattcagctgtccaaactggaagagggaaccagccagatgcaggaagagacggtagatctctatgaactgacagaagatatcggtgatacgcttcttcactccgcccagaaaaaagacatcacgatgaaaatcgaaggaatcacccaggaaatcaccggcgtccgccagatcctgtacgaaatgctgtacaacctgatggataacggaatcaaatacaatgtagaacacggaaaactctgggtacgcatgtggaaaaccgccgataaaatctactggcaagtggaagacaccggaatcggaatcgccaaagatgaacaggaacggatctacgagcgcttctaccgcgtagacaaaagccactcccgccagaccggcggcaccggcctgggcctgtccatcgtaaaacacggcgccgccctccaccacgcccagatccgaaccgaaagccaacccggtcagggaaccaaaatcaccatagaattcccactcgaccgcgaaacctgagacataactgtagattcttaacttttgaagctgaaaaaatgaaagtgtggaaaaaattgacaaatacagttaaaatgcaacggtgatgtgtaataaatatatattggtaaatcaatattaaaaatgagtatggataaaaaatgtgaataataaatcatgtggtgctggaagatgggtagtattaaacaaagtccgatagcataccatcaacaaactaacacaacgtttcacaaccagtaaccagccgaaaaacgagtcctgggtgagtggatcagtaagggggaacactttgtggacggttagggcaagctttaagatccagtccttagaagaacttgacagtgagcggctctccgcgaactggcatatagttcttcttaggacttagcttaaagttgcccagcccacgtctccacgtttgatccgctcacccaggactcgtttttcggcgtcccctttaccaacaattttcggcatcctataatttataaatcaccaccggaatcggcggatgattcggccgattataataacaggaaagcactaccaaaaacctccgcgaatccagccccttcagatactcaagcaccccatcccgttcctcaaatccactatcccctccactgtaaatacaaagactgatacatcctcccgttttcaaaagctccagcccctgctccagtgccgcaatcgtcgattccttatgcgtagcaatcgaatgatcccccgaaggaagatatcccagattaaaaacaatacacgaaaccgtccccggtctggcgtaatcacccatattggcatggctgtccaaaaacagcgaaaccggagccaccccgtcctgcctctccagcagcttgcgggtagcatccagtgccgcctgctgaatatcaaaagccagcacccgcccggaaggaccgacaagttgacttaaaaacagcgtatcatgcccatttcccattgtcgcatcgatacagagatcccccggttttacctgcggccggatcaacgaacgacaccattcggtaatctgatatggatttgatttcttcataaaatacctcaacctttctctagagcgtgtttgaaaaatcatttccgcaatctgcaagccccactttgcggtatattttaccctcattcggttgccgtagcccgctacgcc

SEQ ID NO: 2473 - DNA, 47454 bp, Unknown
  gut microbiota DNA sequence
aaacaaaggaaaatttgtaagtaccgtatctatcgtctgccttcaccttccggcagcaatgtaacaaaataataaataattccaaatacagctatacttcctatcataataccgatcatctgattgacacttaccacattcccatgaaataccggattgcaatcaagagtgtctcttatcacttcaaccatttcatccggataatgttttctctccatctctctgaacactccgtgaagcatatgattcttgatcaatgaagtggcatatgtactcggaagataagacagcaccttctgaagacctgatccaaaatttgaaattggcatataagcaccacatataaaaccatatcctgcactgacaatggtacccacagccgaaagctgtccctgggttgtcaatggaaagctaatgatacttgaaagcgtacttccaaacaggacgagcaatatcatatcaaataatacccataatacatctgctgcattcatataccatcccattttaagcagatatcccagacataatataagcgcaagtccattgaccatcaatgaattagctactgttgacagaaaatatcccaaataaattttccctttgctgacaggcgaaacattaaaatccttccttgttccatttgccttgtcctgcaccatagtcaaattcacacaaaatgttacagtgatacagctcactgccataagtgatgctgtcagctgtgctgccacggttccattaatgagcttatccgaaatcgtgatcatattcggaatcgctgctgtaaaagaatctctgaaaacctttgcaagaaacgtagcatacagaacaatcagaataactggtgtgatcattgatgtaaacaacatccctttatctttaaaatacagtttcctgttcctgttcattagtgccaatactgttctcatcaatgctcacctccaagcctttttcctgtgactgcaagaaatacatcatccattccgccttttactacttcataatccgtgaataagtcctgatgctctacaataagtctcgttgcttccttcgtatttcttacttttaactgatatccgtcacgtatttttttatattctctgttcaatgacttcatttcatcttcggaaacaccataaactgacacgatatcctgtacataatcatttttaagttcaaacggtgtaccttccgctgcaatacttcctttgtcaagaatcacaacatacccggcattagcagcctcttccatataatgtgtagtcagaaatactgtcatattttctgttttctgaagcttctcgataacattccagagtaactgccttgtctgcggatcaagccctgttgtaggctcgtcaagaatcaaaatctccggtctgtgcaataatgcacgggcaatatcaattcttcttctctgacctcccgacagcttacctacaggtctgtttaaaaactcgtcaaaatccagaatctcgaccagctcctgtaatctcttatcaaaggcatttcctgtaatgccgtacaaagcagctctgctcattaggttttctttcactgtaagcggtttatcaagtacgctatcctgaaatacaacaccaagcatcctttttgtctgtgcgccggctttgtcagtttctattccgtttacctgaaccgttccactgtcttttttcagcagtccgcagagaatagaaatggttgtacttttccctgcaccgtttactccaagaaacgcaaacaattctccttttttcacacaaaagctcaaatcatttacagcttttacttcgccaaagcttttattcagatggctgattttaataatatttgattccatatcttctccttatattttcatttttccttaaatgctgcggcatcaaatatctcggtttcgttctctacgtccagggatgcggttgcctcatcgagaaggatcaccggggcatcttttaacagtgctctggcgatggacaggcgcttacactctccaccggaaagtgtggatccgttttctccgatcacggtctgatatccctgcggcagacgctcaatgaattcgtgacaccgtgcggctttcgcagcagcgataacttccttgtccgttgcatttttccggcctacacggatattttccataatcgtattattaaacaacaccacattctggaataccatcgagaaatcctggatgcctttcagacgtttcacctgaagatccacagcaaataattctgccatatttaccattgctcccgagagcggatcatataatcgggatgctgcgatcaggaataacaggtaggaaaataaggtaatccgctctttcatgatcaacgtatttccaacaacgatcactgttgccagccccagacgcaggaacatctgaccagtataatgcagtgccagccgtagccgcatccaagatcaagcacttttttccctgtaactctggaaaaagctctttaaactggtgtcattctccagccgcacgcagaccttcctgactgcgggacattttggcgtattcctcaaaaaatgttttattgtcatattcgctggtcactgttttctgttcttctctctccatctgttttttttctgagttctacaatatactccgttgtcccttcttcaaattctctctttcctgtcggtgtaaagctgtgacgccggtaaaatgcaagcgcccgctcatttttctcaagtgcccacagatgatccgcaccaaactgttccaccgcaaatgttatcagttcatgaccgatttttcgcccctgaaaccatggatccacatacagcttacagatctctgttccgttcatctggataaagccacggatcagtccgtcatcatatatatagagatttttgaagacctcgtcttttttcaggtaattatctataaagggaacaacctgcagctcaccgaatgagtagctctcatctttgaatattggaaaatagttgattctattattgcagataaatatttctgcgattcttgacaaatcttcctctttcgcttttctaatcttcatttttaccttttattctgacctttcttatcgaattttccagattttttataccgtcttcgtaaaccttaacttctgtcggcttccatatccctgtttcttgaaatcagaattcagaagttccatctcctccggaacgattttgatcaggtgcatcggatgctccagttttttcagtgcttctacagggattttgcggaattcagccgcctgtagatattcttctgaaaatggaggcacaatcgcagctgtacccgtaatctggatgctgttcagactgccaaatccgctatatgtttcatagacagcaagacttactttcttatttttctcaagtcccgcaaatttctttccgccctctgagaagatccagacagcaccgtcgtgccaactgtattccaatggtgtacaccggatcactccgtccccaccggttgccagggcacaggtattgtgtgcacgtaaaaaggcgtctgcctcctgtttcagctgttccggttccatgtgtttgctttctttatctttttccacccagtaaacggctgctgcctgatattcttccggagtcatatctgtgatttcttcatattcctctctatccagagaaaccggaattcctgttttcccagtaatgtgcactcctccgtaccaggtgccctcaacctcaaaaatatcaccgatctgatattcactggaatattcatctgtctttttcacaatttttattttcataatcgcttcatcctttcttctccgtccttcgtccgatatttttattgtaagcgaaaacatttatactgtacagcgctttttcattcagttattattatgaactcttaccttttacataaaatatctataaatttattttcaaaaggacttgacgaaccttcaaaatacttttactattaatacataagaaatgggttttttgtccggtaagtgtttataaactgaaggagttgctcgtttctttttttatgtcaattatatcatacagatacattctcccatctgatgcatttcttctatgtttttcttttttatccatatatcgctccttttactaattttgtacaaatgcttttttctaatttttaggttgtggaatattttcagaatatgtatatcagatgtgtatataaaatactataatatgttttatgatattataacaggtattgatatctatatcaacagaaaaactgggctgtcacagaattctttattttctgtaacagcccagttttctactcttctttttcttgcagattccatactatagtacactacaccggtgttccaacctcgatcaggttgccatccaggtcataaaaacggatcactttctgtccccagctgtgtgttatcaaccgattgacataatagatttccggatattgtttttccaatttctcagcaaaatcttctatctctttttcttcaaaatacaactcacaggaattatttttcggaacaacctctttaccaagatattttttccatattgcttcatcctgaagcaccagtccctcggtcaaaatcacgtttccttcctgatccagcactacgtccagaccgaacagatcgtgataaaatttttttgctttttctatatcttttacaacgatcaatacattctttaatttcactgcacaattactcccactttttacaaccgtgacatccatccgcaagccagttccatccagctctggcactctggttggatgccgctgccgtcctggcgttttgtttcttcgtttgcgagactcagaccatgaccgcctgccgggtagatatgcatttccaccggtatcttatttttatgtaatgcttcaaagaagaacagcgaattttccaccggaacacagtcgtccggttctgtatgccataagaaagtcggaggggtatcctttgtcacctgaagttccaacgactgttctttccgtttttccggatcgtaagcatcttctccaagcaatgcttcaaaagaacctctgtgggcatattccccggaagtgataaccggatagcacaggatcattccgtttggccggatctgttctgcggacacgccaagtgtttcggaaagaaacggtttcttccagaaaactccaaggctgcatgccagatgaccgccggcggaaaatccctgtaccactattttttccgtatcaatatggtattcgtccgcatattctctcagatgtgccactgctttcgccagctgcaaaagtgccagcggatatttcgccggtttcacgctgtaacgaaggatcgccgcctgatatccctttgcgatatactgaatcgccaccggttctgcctcccggtcggatgtcatctcatagccgccgcccgggcagatcagaacgagcggacgttttctgtccggaatcatctccggagagttgtccagaaaataggtatataatgctgcggtttcctgataactttctacgctgatatcaatctttttgcaaatcatagtgttgtgtcctcctgactctttctctattgtcttacttgtacctgacaaggcacattctttattctgcatttaaaaattttagtaaccgttcagtaccttcacaatgattacctatggaacagttacacgctctattactcattatacgtcctgcaatctttctgtcaattcccgttctttgacctttcttccatatccctgcatctgtttttcagcaatttttctccgccgagcagctgttgttcatatctggtataagccgggcatccataggttccgaggaacttccggatccggtcattccttgtgagattcgctgcaaataatgccagctctgcccctgtaccatagctttcttccagaaatgcaaatccccgctccaacttctgcgagatgccctcctgccgttcgtcacaccgtttcgtctcttcctcacagacctgttcgagccgtcggttcagtgcttcccttccactctcatgatccgcttttgcctcctgatcgatcttccacaggatcttcagcaccgcctcttcgatctgtcgcttttctcttcggatcagttcccgttctgtacggatctgcaaacttttttctctgctctcgatccagtctccgaatgtctttccggcatcattgccccagaaaataccgagctgtctgcggctttctgccagcgccttctgtatctgcctttcccggaaatactgttcaatgttctgatccagcacagccagcagaaacgccagtaccatgctgcgctcctgcggcgttccttcttttgccatccgggtaatcgccttccgttctgtatccgaaaggcttccatccaaaacctgtccaatctgataatcctgtccgtacttctgataaatctggtaatacgaaaaaaattccgccgctgtcttttcttcctgcatatactgctccaccagtgttttttctaccggaaatcccattttttcatagcttctcagcacagcagacagatcctcccatccccgcgccgtcacaaactgtttttttccgtcctcctgacggatccggtagaagcgatctctgtgtgcttccagatacgaccggatacttccatgtacctgatggagcagtgcatattccatccaggcatcgagatccggctccagcacgatctttcggacacggtccagcgtcgcgatgtcaaattcccggacggatttgttgtattccggcgggttgcctgccgctacgatcagccagtcggatggaagcttctggtttccgaacgttttatcctgaagaagctgcaacatcaccggcgcaagtgtctctgatacacagttgatctcatccaggaataaaattcctctcttttttccggttcgttccatacacatataaatggaagcaatgatctcactcatcgtatattcggtcacactgacctgcgtgtcgccaaacgtccgctccacaattttcggcagtcccatggcactctgtctcgtatgatgtgtcatcgtgtacgccaccagtcctgcgccacattctccggcgatctgttccatgatggcagtctttccgattcccggaggtccgatcatcaggatcggccgttgctgccgcagtggaaccagcggatacccgttttcctctttctgaaaatacgcctgcagcgtatgtgttatcgtttcttttgcttctttgatattcatctgttttctctttcccctgtattatttttctgtcaccagcagttttttcgcccatcccggcacccggtccatcttctcactcttttttacaaatacaaatgctgtctcataatccggtttcttctccggatagatcccgtcaccgtcggtaaaataaatcagtgctttcaagtcgctgaattctcttttctcccgcatccgctccacttcctcgaacaccgggcgaaaatcggttcctcctcttccgtgaatcaccatctgctcccggtaggtttcccactcttttgcggaatggatcatcactttttcctgaataaaactgtcacactggatcaggcatactttccagttctcgaaaaaattttccttttcttccagaatccttctggtctctccaaggaaacgggctaccatttcttttttacaggaaccggaagtgtctatggcaatcaccagttcctccagccggtttccctcccgggtttcgagaggctcgatcatgggaagatttccataccgttccatcccataataataagcaaccgggtcaaacgcatcctgatccagtttcatctcctctcttgtaacggtaaaacgacgtaaaaaccgccggtagtcatattttcccttctcgatttcagaaagttcttcactctgaccaccgcggttctcgcctcttcgttttccgcctgcgccgtaggtaatcgcaagttcttctgcgatttccttccattttttgcagattgctttctgtttcgctgtcttctctccaaaacgttccggcatttcaagacactggcggatcagccggagatatttctcatataccttctccggattctctccgaaaagttgaatcagatattccggattcacatacaggctctccccgtctgtctccatagcggttacctgctcatccggctgtacccgaagctccagcaacgccctgccaagctccggataccgccagcataactcatttttgcagtgtttcatcagaccggcgatcagttcctgtttcgtctctgtggctgtggatttttcttttacggaaatatggttcttccaagccagcaatacccggaaagcatcccatttttccagttctcctgcttttgtcagaaacccgttcagttcctgttctccaaaccatcccctgtctgccagttttttcatcccatcaatattttcctgcccgatcagatactccatggcggggcggatcctgcgtttcagataggctgcatcctcttttgctatttcttcgttttcctgcgtgctttgcaaaaaacgtttgatcactttttccagatgttgttgttcattcatttgtatgcatcaccattttttatattctgtatccatcgtagcaccctttattttgatttacaagcagatccttttactgattttcctgtgtttcgtcacctgactggctgctcatcggcgtgatcacgatattttctgctgcaatgccggttttccgtttgacaatatcctcaatctgcgctctgctggcatcgtccacctgggtatccggtactacaatgtccgctgtctctccggtcagatttacaaccacatccggaaatccttttgcttcgagaagcagttctgccgccgcttctttctccacaagatcggtcatatttaccatactggcgatcgcactttctctttctgtctcggaaagtgcttcgttgttgatgatcgataacagagattccttattctgggagcggatctgttcccgttcgatgcgcgcctgtgccatatatgtagaagcacctgtcagaacagcctcccccggtgtctcctgaatctgtgattctgtgccggatgacccttcgccggaagccgtggcatctgtaccgtcgctggcggtcgccgcaccggtctcatccgtaacatcaagatccagattttccatatcctgcagaacctgatccatattgaccgaagtctccgtctcactggcggtctcggtctttgcagtcttatctttttttccttttatttgtgcatcggaatagctgatatagcctgccgcggcaatcatgactgccagagctgtgataataatctgattctttttaaatatttttttcactgctgctctccttttttattcattttgactctgctgatactatgataccggattgttccgtacttcgtactccacaatccccggggctcatttcatttttaacactttgatttcgtgggcttcgatgtgaaacaatgccatcaccgcctcctggatctgttgtacgatcaccgggttgccgcctccctgggctacgacaatcacgccgcggatctccggataggtacttgaggatatatagggtatctgtcccccgtctccggtatcctcgtatactgtagtttcccccgtggttaccgcctgactggttcgttctgttccggaatctcctttttcactggacgtgctggtatcctccgggctgtctttttccacctgtttcttcccggtggattccatcgccaccgccacctgcacagttcccacaccttctacctgcgacagcacactctccagctgtttttcataggactgccggatctggtcgtcggtcggttcctgcgactgtaccgttacctcctcctgcgtctttttttgttccttttgttttacaggagcggcaatcacaagaagtaaaagacctgccagcccgcagatcagccactgctcccgtttcatccctctgactgctgcaaacaccctctccttcatagactactcctgtatctttatatttatattcccttccggaagattatagacttgtgcaagtttcctttttacctcgtcagactcactttccccgggcggattcccgtccatacgccggatcacacagcggatttctttcacatccagttcctccccgttaaaaaatttcacactgacctctgtactctcgtaagacagctcttccagcagcgcttttatctggcgttccatctccttctggcagttttcctgtacataatcatttccttcctgttccagatattttttctccatcgaaaagtcctcgtattcctgccggattccttccgaaagtgtctcccaggagaggatctgatccagatttccgacggtcagtagcggtttgatcagtaccaatatcagcaaaagtcccataaaaaaacggatgtattttcgttcctctccctgagggatcacattcatcaataccgacaggaaaataaaataaaacgccagatttcgcacccactgggaaagccattccaatattttccctccttccgtcttgttgtaacgcctgtatttcccctacactcaacctcgaacacctactttttcattgcagagatcccgccagaatcgcaatcgtcagcaaaaacaaaatttccatcgtcagaagcatccgtaccagcatcccgagactctcccccatcgtatggatgcaccctaccatccgcttgtccgtcaccggctgtaccagggctgccagaaattggtaaacgagtgcactgattcccatccgacaaaggggagctgcgcctgccagcagaagaatcacgatttccgccacaccgaggcagtttttgatcagcaccgccgatccgagcactacttccgtgatcccggaaaacaggtttcccaccccgggaagcgcaccggctgtccttccgatcaatgatcgtttcagggtgtcaaccgccggggagatcagacgctggatcagttggatccccacgatcacgcctaccatggatttcagtgcccagaggattccgttctttaaaagttcggtcattttcgataaaaattcttcttttgtgaggaaattgatcagttccagcaccagatacatccggatcgccggaaggataaaaagtaacaggatcttttctgtgagaaaaatcaaaatcaggatcatctggtaaaatgctgtcgccgttgccacgccacatgccccggtcagtgcgatataatacgccggaagcagtgctttcataaataccgccacaccctcaagcaggctttccatctgccccgccatctgatcaaacgcctgcaaaagcagtaaaaacaacagaagatagatcatataaaaagaaatatctccgatctggttattctgaaaaactccggacagatgatagaacactgcggaaagaagcaccagcaccagaatgtgtacgcaggtttccttctggatccccatggcatcccacacgccctgctgaatcacggctttccactgctctgcggaaaatgcctgtccgcttgtcagaatttcccggatcatcccgcgcatgctctgtttttcttccagcagctgatccaccgccgtctccacatccttcagatccagctcttccaatgcttcttcctcgcgtgaaaagtcctgattttcggcagcatacacacagatccgggtacaaaaaaagagcaggaacagactgaagattgctattttcagtattttcccactctttttcttatcccagaaacgcatggatcgtctccagcagtgcggtaaggatcggcatactgattgccagtactgccagccgttcgtagatctcgatctgtcccgccactgcagaatagcctgcgtccttacagattcctgccgagaactgaccgatataggtgataccgatcattttcataaggatattcatatatgtagtatctacaggtacatattgttgtatttttttcagggattcatacagataactgaactttcccaccgcgaacgccagaataaagagtcctgccgccatcgtcagatagaccgaatactctggctttgccgttttcataaagatcgcagccagtacacaggcgatgcccgctgcactgatccggataatttccatatcgccatcctccccgcctgcctacactacagggcaaataatttttttacggtttcaaaaagatcataaatataggggagtacccaaaacaataccagcacaagcccggcaagactggtcaaaaatgcctggtcttcccgcccgctgtgctttaacaccagactcaggacggataccagaatccccactgcaccgattttaaatataatcccgacttccacaaccgcctcccgtctcagataaggatcaccaccagaaaggctccccccaggatcccgaggctttgccacacttttttctgttccggcagctgatgctgcagtttctcttccctcgccgcaagttctgcccgtccgttctcaagaagccggatctgcattcttgcatccagataaccgagatgtccaagcgtctgtaaaaacagatcccagtcttcttcccaaagaccggtcttttcccgcaccgtctgtgtctgttctttcaaaatccctgcaaatgcttcgccggtctgcgctttcaatcgctctgcaatggattgcagatattcccgaaaaggagacaccacttttgtgctgatcctggaaaatgcttccggcagcgtatttcttgcaaaggagatttctccggtcaggcagctgatgatcagctgtaacatctgtaagtcttcgatccgccgctgatattgtctgctcttccagtttcccatgccccagccggcaaaaaataccagcagagcaccgcctgctttcagcacaccgaccgctgcctctggtacaggcaggttccccgttcatcatagatttcctggacttttccgatctgccctgccgtttctttctgcaggatgatatagcgctcaaaaacatgttctttcatcagtcgttccaacagcggttttttccggatctcatcgatagaacttccgtggactgttgccagaagtttgcatccgctattcagcgtcatctcaatggcacggatatcctcataattaccgatctcatccacggcgatcacctgcggtgccatcgagcgaagcagcatgaccatcccttccgccttgctgcagcagtccagcacatcggtacggattcccacatcattttgcggaattccctgatagctgccgccgatctctgaccgctcatccaccacgcccaccgtatagcccggaaacgtctcccagccatcggaaatctgccgcaccagatcccgcagcagcgtcgtttttccacagcccggtggggagataatgagcgtatgacaaagttttccctcttccgtcacatacgggatcaccatatccgcacagccggtaatctgatgtgcaaaccggatattgatacaggaaatctgcgaaagtccttttactttctgcccttccatgatcgcttttcccgccacaccgacccgatgcccaccctgtatcgtcagaaatccctgttttaattcctcttcatacgcatagagggaatacgttcctactgtctccatcgttcttcggatctcttcctgcgatacgatatatgcctgttcccgatgcctcgtcaaaaatccctgttccgccacaaaatattcctgcccatcctgccacaaaatcagcggtttccctgcccgaagacgaatctcctgcaacccctgtggattccagtctgcctgctgtaagatttttcggatacgctccggaaacagacggataacttcctcccgtttcatgtacatcacctcttacctttactatatgtggacagactgtaaatagaactatttccctacgcaaatcataccggaatactcatccggcatcgtcaactggtaaaagctgcattcctcgtaagaaatctcgcacaactccctgcggattccttcgccggtgaacttcagatagctttctttttttgtccagatctgaaacagaacatcctttttcccccgctccgtatctgcctgttgaaaaagtttccattcctccgggttgcagatttttctggctgtctgttccacttttatttctctgtgatactggatatcaagccccaccggtgcatctcccagcgcgcaggcgatccagtcccccgaatgactgatattaaaaaacagttccgggtgcagacgcagatatggttttccggtttctgttcttactaccggatctgtctctttccaaaaatcatatccatatctcgtttttaccatttccgccaacaggcgatatcctgcccgggactgttctttcttttcttccggtgttttgccgctgacctgctgcatccagacttctgtctgttgatccggggactgccataaaatatggtctgtatttacattattttccatttttctgccccccgctgccacgcttcggtgcttcttccagttctaccagaaaacgggaaggttccatcttctttccgaaccgctcttccaccgcatacagatgcagttcctttttcgctctcgtcatgccgacatagaacatccggcgttcttcttcaatctccggatccagaatcgctttctgataaggcatacacccctcattgacatccagaatatacacccgttcaaattccagtcccttggcgctgtgcagcgtcgatacaacgattccttcctgctggcgcaccttctccgactgttctttgagtttttccttataggcatccatggaatcaaaccattcctgaaatgttttgtatcctttggcactctcctggatctcccgcaaaagatcatacagctcttccactttgatcttccggtactgcgcatattctttcaggaactcgtcatagccaatcccatatcggatataattgatagccgcgaacggtgccatatttttcatcatcttcagatcatgctcgaacttctcgattcggtcacacatccattcttttccttcgtagaactgatacagaatctcaaacggcacttctttttcgtaaaatgcttctctggaaagataccggttcggacggttcatgatggcaagaaaatcctttcgctcccgaccgcccatcgccagatgcatataagcgaccatatttttcgccagccaatgttcatacagattcggcaggacatcgcgcatcgtaaacggaatattgtactccatcagccgctccaccgtcattctgcaattatgattggtgcggaataaaatcgcaatctctttgtgcggacagccttctgccagatccttctggatctgttttaacagccaggtcgtctcctcactctcattttcaaaagtccggatctcgatcagttttcccttgtcattttccgtaaacagctgtttttcatatctcgcatcgttccagcggatcacattctgagatttttccacaatttctccggtacaacgataattctgcttcaagatcacctgctgcaactgcggaaaatccttcggaatctgcagcatgatctccggtctggctccccggaaccggtaaatcgactggtcatcgtcgcccactaaaaacagattattttccggaagtgccagaagacggacgatatcatattgcagctggttgacgtcctgaaactcgtcgatcaagatataccgaaactttttctgccacgcctgtaaaatatccggatgtttctgaaataattgataacagtataccagaagatcatcaaaatccagcagtcgtttcccgtgcagccgtttttcgtatgtctcatagattttccgaaattcctcatccggacagcttgccgaataataatggcttaacgggatccttccgttttttaccgtgctgatctctctcgccaacgactccagcaggtcattttcatcttccacctgcatcgaggaattctgcaaaatctgtcgtaaaatctgatattttatttcttcactggcgatgttcgccgatgtgataccatatgcctgccggaggatgccgtaaaagattccatggaatgtaccaaaagtcacctggcttttttctactccacacaggtgtaaaaatcgctccctcatctgtcctgcggccgccttggtaaaggtgaccaccaggatagatgaaggagcgacctgataatcctgaatcagtttacgggtacggcggataatgacttccgtcttaccggatcccggtccggcaagtacaagcatcggaccatctttgtgttccatcgcctgttgctgttccctgttaaactccattctttccctccatatgggaattattctgctgcttttgtcagcttttcaatagctgcctggattcttacaaggctctcttcttttccgagaacttccagaatctctgtagcgcctgccggtgtcatctgttttccggacagagcggtacggatcggccacattacataaccaactttgtatccatgctcttttgcgtaagcggaaagcattgcaaacagtgcatcgttgctgaaatcttcctgcgcctccagtaacggctgtacttctttgagtacctgcagagaagtttcttcgttagttttcatctttttatgcacatacatggatgtctcatattccggtactttttcaaagaaatctacgtgatctttgatatccgggaatacttcgattcttgtttttaccatggctgcgatcttgtggaaatccagatctcttgtgatcacttccttcagatacggcagagccattccatagaatttgtcatcatccatcttcttcatgtattcgccgttcatccagcgaagttttaccatgtcaaagactgccggggatttgctgattctgtggtaatcaaattcttttaccagttcttccagagagaaaatctcattgtcggaagacggactccatcccagaagtgctacgaagtttacaatcgcttcggtcaggaatccctgatccagcagatcttcataagaagaatgtccgcaacgtttggacagtttctggtgatcttcgtttgtgatcagcgggcagtggatgtatttcggaatctcccatccaaatgcttcatacagacggttgtacttcggtgcagaggacagatattcgtttcctcttactacgtgagtaattcccatcagatgatcatcgataacatttgcaaagttgtaggttggatatccgtcagatttgatcaggatcatatcatccagctcattattttctacggtgatatctccgtacagctcatcgtggaaggttgtggttccttcggtcggcatattgatacgaataacgtatggttttcctgctgccaggtttgcctcgatttcttctttggacagatgcagacagtgtttgtcgtatacagtgatctcttttcctgctacttctgtcttcagactttccagacgttctttatcgcagaagcaataataagcgtctccctgctcgatcagtttttttgcatatttcagatacagaccctgtgcctgtctctcactctgtacatagggacctacaccaccgtctttgtccggaccttcatcatgtaccagaccggtctttgccagggtacggtagatgatctccagtgcgccttccatgaaacgttcctggtcggtatcctcgatacgcagcatgaattttccgccttcatgttttgcgatcaggtatgcatataatgcagttcttaagtttcctacatgcattcttccggtagggcttggtgcaaatcttgtttttactgtgctcataatattttctcctgttatttataatgtaggtgtcactgaatcttctgacacctgtaagtccggactgctgtgtgcttagcacattcacaatccccttattcaaggtaaaaggtgtggaattaatcctccacacctttgctttttaagtattcaattacgtctccaacggtttccacatctgcaagttcttctgcaggaatctccagtccgtattcttcttccagagccataaccagttcgaacagatccagtgaatcagctcccaggtcatctttaaatgaggtgtcaagaccgattgtctcaccatcacagtttaactgctctgcaataatctctctcattttttccagcatatctttttatctccttaataaagctttttcgacttacgcctttgtttaacgaaagtatatctattataaaatcatttgtcaacccattcgtggaaatatgcaaaaaactttgttattgctctgtttccacttccatcatttcttcacgttccgcttccgtcgtccggatctgccccgaaacactcagggcaatccccatctccgtcatcaaaaacaggatcgatgtacctccgtaactgacaaaaggaagcgtgataccggtggtcggcatcagatttaatactacgcagagattcaggatcacctgcagcgcgatatgtacaaaaatgcccgccacaaccagcgttccataaagatccggtgcgttctgtgtgataaaaaacagacgatacagcagatagccgaacattagaagtaacagcgccgctccgaaaacccccagttcctcacagacgatagaaaaaatcatatcgttctgggcctccgggatcgttccaagtttctgagcgctgtttcccagacccttgccaaagaaaccgccgcttccgatcgcatacagtccctgtaatgcctgatatcctccggacgacatatttgcctccggatgcagccatgccagaatcctccgaatacggaaatcctcactggttgtcatggtcagtcccatataggcaacaatacttcccgcaatcgtaccgatgatggctgctaccacaagaaacggtttggtcttcggatgtgcgataaagatcataaccatggcaattccgccaatgataatacctgtactcaggttatcggtgagcacgaatgcccctgccgcctgaatcagaccgaccagcacaagaaatgctaccgtccccagttttcttacctttctccccgtcttaataatgagaaccggtaaaaaagtaatgattgcaatcttggcaatctcggacggctggaactggattcccagttttaaccatcgtctggaaccgtatgcttccacaccaaacggagaaaaacgtaccattgccatcagtataagcgagatcacgtacaacgctcccgtaaacggaatcatcagatgataatccaattttgatatcaaaattgcaatgacaatcgctcccacgctgatcagcgcctgccggcggaaataatacatatcatccccgtgaaatttcatctgcgcctcataggcactggtactgtagagcataatcagtccgaagcagatcagcaggattacgatcgcaagaagattataatcataatatccaccccggaagtttttctttttctttctttttttctctttttgttccatgcaataccctcatttcttttaatgctcccctgctatcgatatcccgccgaaggtaacaaccggatatctttgtttagtataacactattaaaaagagaaaaaaacccccagacatctctttttttatgtttctgagatgtccggaggttctgttttatctaaggagaatgtttactttttattctacatcctgcagtgcatccgtatcttcttcaccggtgcggacttttacgactctgtcaacattgtatacaaagatcttgccatcgccgatatgtccggtatacagaactttctttgcagcttcgatgacctgatcaaccggaatgctgctgactaccacttctacttttacttttggaagcagggttgcatcgatttcaacaccacggtatttctcgccggcacctttctgaacgccacagcccataacctgtgtaacggtcataccggtgacacccagatcgttcatagcttttctcagtttgtcatatcttgacagtttcgagatgataactactttatacataccggtatctgctgctgccggagcttttactactttaactgctgcatttttctgtgcatcagatgctgctttgtaatcatctgtaccaaggtttgtattttcattgacatccatcatcatggtgttggaaacatccatgatactgaatcctgagtaagcagatgccagaccatgttccattgcatccagacctacgatttcctcttcctcggtaactctcaagcctacaccagcacggatcacaaggaaagtgattgtgatggttactacggtccatgatgctactgctgcaaaaccgatcagctgttttccaagaagggtaaatccaccgccgtagaacagaccaaccagatcatcatttccaggtgcggatgtggttgcgaacagaccaactgcgatcgttccccagataccgtttaagcagtgaactgcgactgcaccaaccgggtcatctactcttaatacataatcaaggaaccatacaccaaatactaccagcagaccggatacaataccgataatgattgctccgagtgcatcggttacatcacatggtgccgtgatggctaccagacctgccagggaagcgttcagacacatagatacatctggttttccgtaacgaacccaggtaaagatcatacaggttacggttgcgatcgccggagcgatggttgttgttacaaagatagaaccaagctgttctacagatgttgcagctgcgccgttaaatccataccagccaagccacaggataaatacaccaagtgcaccgattgccaggttgtgtcccggaaatgcattgacttttgtgatttttccggatttatctttcgtaaattttccgatacgcggtccaaggatcttggcaccgatcagtgcggagataccacctaccatatggatcgcacaggatcctgcaaaatcgtggaatcccatctgagccagccagccgccgccccagatccagtgtgcttcgatcggatagatcagtgcggagattacaccggagtaaatacaataggataagaattttgttctttctgccatggctccggaaacgattgttgctgttgttgcacagaacaccaggttgaatacgaagttcgaccagtcaaaatctgcataactggtaaaaatatcaaatcccggttttccgatcagccctaccatatcttctcccagtaacaggctgaaaccgatcaggataaaggtacaggtaccgatacaaaaatccatcaagtttttcatgataatgttacccgtgtttttcgctctggtaaaacctgcctccaccatcgcgaatccagcctgcatccagaacaccaatgcagcgccgatcaggaaccatacgccaaatacctgaccgttcagaacttccataatttcttctgtcatacttttgtcctcctcttttctttgtaatgaaaaaagcgaaacaacgacgttttgcttctattatatataagaagctgcaaaacgccgttgtttcgcttttttcaagccctgccgtatcataagaaaacagagtgtgcgatttctcttgatacgacaaaaggcactacggatgtttttccatagcgcctttgctttgtatgggtgtatcttacacctgtatttcgtttgtgtcaataaaatttttatcgtttttttatatttgtcatttctgcttgttttttataagatattgtctgaattttctacgtttttactgtacacattctccctggcagtcgcacggttcccgcgtcagtccggtgtcaaaactcggattcatctgatagaagttcttactgttcagctgatcctggagagactggagagcttcaccgaatctctggaagtgtaccacttctctcgcccgcaggaaccggatcggatccgcaatctccggaatatcccgcacaacccgcaggatattgtcgtaggtgctccgtgctttctgttccgcagccatgctctcaaacatatccgtgatcggatcccccttggactggaactcacaggagttaaacggaattcctcccgccgactgcggccagattcccactgcatgatccacatagtagtccgcaaatccctggttctcgatttcttccacagtgaggttggcagtcagctgatgaacgatcgtggataccatttcgagatgtccgagctcttctgtcgctacatcggtaagaaccgccatgcagacacggttcggagcggtgaaacgctgagagaggtagcgcatcgaggcaccgatctcgccgtcggggccaccatattgtgttgctataatcttcgcgatccgtgcgtctgtcttcgtgatgtttaccggatattgcagtcttttttcatagatccacatacactaacacctgcctttccgggatctttcccatggccatggctgcatcatccactcccaggtgtcgcagttgctctcgtcaatcagatccattgtcagaggaccgaagcgtctggcgtactcttccatagcttcctggcggatcaccgactgtttgtggtagtaagccatggcttcccggtcctgtggatgggtgtccatataaagcagggtatcataagcggcaaatgcagactgcccgatcgtctccatcagctgtgctttgctccgttctccctggcaggtacagttgtttcgtcccatcatcgcctgcattcgcctcctttcccgcaaaatggtttacaaagttccgggaaaatcgtgccaagctgaaatcctctggccggttcgtatacctttccgaatttctgcattggcacatacgccattgccagtggaagcatctgcaaatgctcctgtacagatgtttcctgtgcaccacgatcgcgtgtattggtgcaggttttgccattggtgtccatcggcatcatcgcttctctgtttcctgtcatgttgccacaggtccggtttctgcagttaccggaagagttccggcaattcatacgatacggatccattctcttctccttatttctgagttctatttctctttatcatatgaatgtctgcaaattttcgtgtttctgtccgcttctacttctttttatttacgctacagtcgcctaccatgtccgctactgcctttgctccgtccttgttcagacgaataccgtctttctgataccattccggatgctcctggctgtagctgtaaagatccagaaccgtcagtttgttcttctcgccaatggtttcgaccgcatctttgacttcttccactcttttggctctctcttccatttctgtgcttccatcagactggatcatcggcggtgtaaccagccagacttccggactgctctttaattcctgataatttttgatcagggattgataatctttttgaaacgtatcgatatctgtccagttttcctctgtcgtatcgttcgttccaagcattatcacaacaagattcgctttatattcggtactgctctcatatcgttcttcttttgtatatggctttttgctctttttttgaaccgctgcaccttccacaccgaaatttccgatccggtattttttctctgccttttccatgtatttctgcaactgtaccgggtaacagttgtcttcccggtcttccacatcggttccaaaagtcagttcatccccgacacatgccacccgtaatttctgctgatctgctgtattctgcatcagattccagaaaatcagtacgatcgccaccagaccaaatgccatcgcccgtttttttctcttctgctgttccatttttctgctcctttctgctactgtcttttcttattttgtcgtatctttttctttctgtcaattttcttaaaaacttctgtcaatttttaacaatcacttatctattttacttcctattttctccatattgcgccttgaattttttctccatgactcttagaatacctatggttactgatttgtaatcattgcactttttatatagaaaggattcatcatggacactactgtaaaggcacctgccgtatcgggagatcagcgtgaatatctgtttgacaattacaaagtattattgattcttctggtcgtcatcggtcactttattgaaccaagcaacgatcagaattcatttctctacgaattaaaatggggaatcgtggcattccacatgcctgctttcatctttatctccggatatttttccaagcggatcccgtccttaaagaaaatgctctgcggactggtcattccttattttgtatacgagatcctgtattatcttttatatacgtttgttctggacaaagagaccgggttttattttgccagaccgaaattttctctctggtatctgatggcactgttcgcctggagactgttctctcctctggttgagaaaatccccggctgcatgattttgtccgtcattgccggaattcttattggattcacggattttgggaattttctttcgattccgcgtattctgtttttcttcccgttctttcttgccgggaaaaaatttgattcttcctccctcgcccgtctccggaaccggaaggggtatctgggtgcactgaccatcctgggaggttttgccgtttttttatttaccgacaattaccatcaccggctggatcagaaaattttctatggacgatactcctacgcagatatggatatgggttccgtcgaaggtgtacttgtccgcatcggctgttatctgatctcttttcttctgatctacctgttcatgctggtacttccgaccgaaaagaaatcctactcctatctgggagaacgaaccatggcaatctatatcttccacggtttcgtctacagctgcctcaaatacggttcttccattctgacttcggttgagagcaatctggaatgtctgtatctgctggcattctgcttcttcctggtatggtttttatcgagaaaaccttttgtattgtttacaaacaagatcgcccatcttttctgatgcgcggtcttgttttaatttccactcttctgcgcttcaatctgttccgccagatcgttcagatacacccagcgatccatcttttcttccagctgtgcttccgcagcttctttttcccgcatgatttctgccagctttccggagttggtggcattcttgaccatatcatcgtccagtttttcgattttttcctctaacgctgcgatatcatcatcgattgtctcatattctctctgctctttataggtgaatttcaatttggttgggcggttctgtttccagtcctttccggtggatttttctttcttctctttttctccacccggcacgctggatatcgctcccgtctctccaaatctgcgctctttcgcctcccggtaatccgtataaccgccttcgtactggcgcagtgttccgtttccgtcaaattcaaagatgcgatccaccacattatccagaaaataccggtcatgagaaaccgtgatcacaataccggaaaatgcattcagataatcttccaggatcgtaaccgtcggaatatccacatcattcgacggctcatccagaatcaatacattcgctccgctgaccagcacagacaacagatacagccgccgtttttctccaccggagagtttggaaatcggggtgtactgcatatccggtgtgaataagaatcgctccagcatctgtgatgcactgattctgccgtctcttgtctgcacatattctccgatctctttcacataatcgatcacacgctgattgctgtctttgatcggcagctcttcctgtgccaggtatcctattttgatcgtctcccctacctctacacgaccttcatccggctgttccagtcctgccatgatctttaacagggtagattttccgcatccgttcggtccaacgattcccaggcgctgattgcgaagaaccgtataggtaaaatccttcaaaagcatctgatcgccatatttcttcgtcacctcatacagttcaatcgtcttcttgcccatccgggtttctacggaatccatctcaacaaccgcatcgctgaccggcgcttttccctgttttaagtcttccagtcgatccagtcgtgctctctgctttgtacttctggcacggcatccacgtttcgcccattccagttccatccgcaggatgctctgacgtttccgctcactggcaagttccatctcttccctctctgccttcagttccagaaaacgggaataattcgcatcatacccatacatatttccccggctgatctccagaattcggttggacactttatccaggaaataccggtcatgtgtaaccatcaccagcactcccttatatcctttcagatattcctccagccagttgatcatcccttcatccaggtggttggtaggctcgtccaacagcagtacatcaaaatcccccgccagcaccttcgccagcgcaagctttctccgctgtcctcccgaaagattctccacctcctgctccgaaacttcgattccaagcttcgtcatattactctgcaccagccagtccttatctccattcccgttcaacgcatacgaagataccgtagcacccttcggaaaatgtggattctgcggaagataagcaatcttcaacccattctgccggataatctgcccctcatccggctcctcctcccccgcaatcatccgcaacaacgtagacttcccggtaccattaatccccacaataccaatcttatccccctgctggataccaaacgaagcatcctcaaaaataaccttctccccaaaaatcttactgatatgctcaatattaataatattcattcaaaactcctcatcaatcctaaaatcataacagcactatcttaccatcttttctcccactttttcaagagtcccggctcttcttttctagtgtctgccaaaacacagctaggacacgggactccaaggtcggcaaacactttgtgggcgtttagggcaagctttaagatccgacgcttacgcaggctttcgcgagggtcagccgaccctcgtgaacgatagccgaagttagcggctagcttaaagttgccctgcccacgtttgccgaccttggagtcccgtgtcctggcgtcccctttgccaatacaaaaaaagaagccccacaagacctctgataaactcaaaaatcttgtgagactttcttctatttttctaaaaaggaatcctacccaatcttaaaccggataagccccattcttattatcagcaaccgtagcatcaacctttgtctgctgtgcttctctatatttgaagaagtctgtagcaacctgtgggaacagtgcataggacagaacgtcttcatcctgctcggaccactgtgccatctcgccacgcagagtatccagctcgtccggaatcagatctgcaggacggcaggtgatcggctgtttgtcaccgatacattttttctgaacctctttgttgaatggtttaacagttttaccatattcaccggagagaacagcttttgtttcttttgtaaccattttatatctctcgcccatcagtacgttaaatacagcctgtgtaccaacgatctgagaagacggagtaaccagaggcggctcgcccaggtcttttcttactctcgggacttcttccagaacatcgtagaatttgtcttctgcgttctgttctttcagctgagaagtcaggttggacagcataccacccggtacctgatacagcagagttttgatattaacacccaggttcttcggattcagcagaccgctgtccagagcctcgtcacggatcggacggaagtagtcagcgatttcagccagaagtttctgatccagacctgaatcatatggagtacccttgaaggtttctaccataacttctgtagctggctgagaagtacccagcgcaaatggagagattgcagtatcgatcacatcaacaccagcctcaacagctttcatataagtcatggaagccacaccggaagtataatgtgtatgcagctgaatcgggatcttaacagtctctttcagagcttttaccagttctgttgctttataaggaagcagcagaccagccatgtctttgatacagatagaatctgcacccatctcttcgatctcttttgcgatattggtccagtattccagagtataagcatcacccagtgtgtaagacagtgcaacctgtgcgtggcctttttctttgtttgctgcttttactgctgtctgcaggtttctcatatcattcagacagtcaaagatacggatgatatcaataccgtttgcgatagatttctgtacaaaatattctactacatcatctgcgtatggacgatatcccaggatgttctgtccacggaacagcatctgcagttttgtgtttttaaatccgtcacggaatttacgaagtctttcccatggatcttccttcagaaaacgcagggaagcatcaaatgttgcaccaccccagcactctacagaatggtaacctactttatccatagtatctacgatcggcagcatctgctctgttgtcattcttgttgcaatcagagactgatgagcatcacgcagaattgtttcagtaattttaattggttttttagcaatatctgtcatagtcttatcctttctttctattatacccgactgcggacatgacagcccgcagcgggatctgtggcttttgtattaccgtattatactccgaatacagccatgaaagttccggccgctactgcggtaccgataacacctgctacgttaggtcccatagcatgcatcagcaggaagtttgtcggatctgcttccgcaccaactttctgggatacacgggctgccataggaacggcagatacaccggcggaaccgatcagaggattgatctttccaccggacagtttgcacatgatcttaccaaagagaacaccaccggcagtaccaacacagaatgcaaccagacccagaagaacgatcttcagagtgtcaacattcaggaatgcttctgcacttgtagatgcacctacagaagtacccagcaggataactacgatgtacatcagtgcattggaagctgtctctgtcagctgttttacaacaccactctctttgaacaggttaccaagcatcagcataccaaccagaggagctgttgtaggaagaatcatacaaactacgattgtgataacgatcgggaataagatcttctccagtttggataccggacgaagctgttccatcttgatctttctttctttttccgttgtcagaagtttcatgattggcggctgaatgatcggaaccagggacatataagaatatgccgccacggcgatcggtcccatcagttctgtctgaccaagcttaccggcaaggaagatagaagtcggaccatcggctccaccaatgatagagattgctgctgctgcttttccgttgaatcccaggaagatagccaggaagtacgcactgtagatacccagctgtgcggcagcaccaaggataaaactcttcgggttggcgatcagcggaccaaagtctgtcatcgcaccaacgcccatgaagatcagggacggcaggatactccactcatccaggatgaagaagtaatgcagaagaccaccggcatgttcgatacccatagcatctacgtaaggatctgccataatatccggatagatgttaaccagcagcataccgaatgcgatcggcaccagcagcagtggctcaaatccgtgtttgattgccagatacaggaacaccaacgcaaccaggatcataacatagttaccccaatccaggttcatgaacgcagtctgttcccataagtttgacaatgtattcattatactcatgtttttaacctcccgttgttgaattcagcaagtcgtcgctgtttgggaatttacattgtctgcaaattcagtcttagtttaaggatgccagagtagcaccagcttcaactgcatcaccaacagcaacgtcaatgcttgcaacggttccgtcctgcggagcaacaaccgggatttccatcttcattgcttccaggatgatcactggatcaccggcttttacagcctgtccaacgcttgcttctactttaaatacttttccggctgctccggctgttacttttacagaaccagcggaagctgcaggtgctgctgccttcggagctgctgcaggtgctgccttcggagctgcaacaggagctgctgcagatgcaccgcttgtctgtccttcttcaacagttacattgtatacattgccattaacagtaatagtataagttttcatgtgatattcctcctatgctcaggctctctgccatttacttctgtttacttttttaatggaacgaaccacaaagctgtctgtggatgtgttctcagatgcagcgatcgctgcggaaataactgctaccagttccagatcatctgtcaggtcttcctcaacaggtgcagccggtactgctggtgcaggtgctggtgctgctttcggtgctgtctctttctgtccgatctttccaacatacttaaataaggaaataacgaaaatcaggaagatcagaacaacgaatacacagccaacacccataacggtattgacagcggcaccgtttaatttcattccggtcgtttcaacttcggaaatagtcatataagcaggaaccatctggtcataatcactgctgtaattgaatacaactttgatttctgcatcacctttgtcaaattttgccggaatatcaacagttacctgtccttcttcacggtcaatatctgttgtcggggttcccatttcctcatatttaccaagttcgttttcctggtccatccatgctgatactgcaagtctggtaaatgtgtctctgtttgcagtcatctgattcagagtttcatcatcgaaacctgcaagagattctactgcactctgagatacctctgcacagttgcttaccatatcatcggtaatctgctgataagcagctgtttcttcttttttaccgcaggcagtcagagaaaatgcacagattgtaaccagcatcagactggcaatttttttccatctctgcttcatttatgctcacctcattatactgttccgtgttttttgcttggacgatcctctctctttgtgtaaagcatttcgaaagcaccgatcacatattttcttgtatcctcagcttcgataatagtatctacatatcctcttcttgctgcggattccacgctggactgcagggttgcatattcagcagctttctcgttgatggtagctgcatcagaatctgcgtacatgatctttgctgccagttttgcatccatcataccgatttcagcgttcggccatgcataaaccatatctgcaccgatggatttgctgttcatagccaggtacgcgcttccgtaagcttttcctacgatcacgtttactttcggtacagtagcatctgcaaatgcataagtcagttcagcaactgcttttgccatgtttgcttcagagcatttggttgctttgaatccggtaacattggtcagtgtcagaaccgggatgttgaaagcgtcacagaattttacgaagtctgctgcttttcttgctcctcttgcggataatactgcatccatggtttctgtcaggtttccttctgcatcgtagatctctgttctgtttgcaacagcacctacagtggaaccgttcagtttgatgaatccacaaaccatatcttttgcatagtctgcttttacttcgaagaatacgttgttatcgctgatctgagacagtgcgatagaagtatctcctgcacagtttgccagatctttgcatactctgttcagatcatctgtgcattcttcgtaagacatatcatcttcgttgtttgcaggaagcatagttaccagcgcacggatctgtgccagaacatcttcttcgcttcctttgaaatctaccagacctgcttcttttgcctgatactcagctgcggaagtatcgcatttggagatttcatttccttcgatggcgtttggagaattgacaaataattttgcttttttctcttccatcagagtaaagtctgtcagtgccggaatcatagccattccaccgccgcaggttccgaagatacctgtgatctgtggaatcacaccgcttgcttttgtctgctgcatgtagatctcaccgaaaccgttcagtgcatcggttgcttcctgcagacgcatacctgcgcaatcgatcagaccgatcaccggtgcacctgttttcattgcaaaatcatacagtcttgcaattttctttgcatgcatctcaccaacagttccattcagtacggtagcatcctggctgtatacatacaccaggcttccgtcgatcacaccatatccggtgatgacaccatctgacggggtttcttttgcagataagttgaaatctgtacttcttgcagtaatctgtccaccgatttcaacaaaactgtttgcatcaagcaaagaggctatccttgtgcttgctgcgctttgtgctgtattgctcatacttcagccctccatttttataaaaaatttaagtgaaaacaaaatttcagccgattataattctactattttttgctttttttttcaataactttttgacaaaagccttcagaaaaacttaataaaggtataaatgtttcggaattccgttttcatagatcacttctgtttcgccgtggatcagtggtttcaggtattccatcatcttttctgtcacatcgtttcctgcttcattgatataatctgccggtacttttttctcctggttcgacacctcgcagaccggaaccgcagtgtagcgcacctggtacggatagctgctgattctttctaccgaagccatcagcccgctttttccctgcagggcacagcggcaggcggtcatgccaagcatctttgactcctggatgtcggtcttgcttgcgatatgggaggcgcatcgctgcatcagattcagttcaatggatcttactttgcagccgatttctcttcgcacgatatcttcgagcactctggcgcttcccgcgatatagctgtggccgaaattgtccacggctccgctctgtacctgctcggagatatacacaccgtctttgtctttgattccctcactgattgccaccagaacactgtcctgtttctctaattttccttttacatctgcaagaaaactctccactgaaaatgccggctcacaaagatagatcaggctcggaccttctgctccgttatttctcgcaagtgcggaagctgcggtcagccatccggcatttcttcccatcacttccacgatcgtgactgccttggtatcgtacacatggcagtctctttccagctcggaaaatgtagttgcaatatattttgctgcggagccgaatcccggacagtgatcagttcccaccagatcgttgtcaatcgtcttcggtgctcccatgacatgaatatcttctatttcgtgttctttacagtatgccgccagtttatccaccgtatccatggaatcgtttccacctgcgtaaataaagtacgcgattccatgtttgcggaaaatccggatgatttcctgaaactgactgtcgtcttcttccggatttttcagttttaccctgcaggatcccagtgctgctgccggtgtctggcaaaggatctccagttcgtcctcacccggtactttctcactcaggttgacaaaccgttcctccagaacgcctttgatgccgttgactgcaccatagatcgtatccacctgatcggatgcatgcgcttccatgatcactcctgcgatcgtcgcattgattgctgatgtcggtcctccggactgtgctaccaaaagatttctcattgatttcctccttaagattgcataaagaaggggatgttttctgcgtcatcgcaacatcccccttttttctcttgcctgtcagctgactttctcaaactgactattatatagattagcataaaatccgttcattgccaagaggtcttcatgatttccttgctcaataatatctccgtccttcattaccaggatcacatctgcatctttgatcgtagataagcggtgtgcgatcacgaaactggtgcggcctttcatcaggtaatccatcgctttctggatccgttcttctgttcgggtatcgactgaggaagtcgcctcgtcaaggatcagcagccggttatcggcaagaatcgctcttgcgatcgtcaggagctgtttttgtccctgggatacgttgctggcttcttcatttaacacggtgttgtatccttccggcagtgtctggataaaccggtgtgcatgcgcggcttttgccgctgcgatcacttcttcgtcggtcgcatccagtcttccgtaacggatattttccatgatcgtaccgttaaacagccaggtatcctgcaataccataccgaaacattctctcagatctctccggttaaagtcccggatatcgtgtccgtcgatcaggattcttccgctgttggcatcatagaaacgcatcagcagtttcaccagtgtggtttttccggcaccggtcggaccgacgatcgcgatcttttgtcccggttgcacctgctcggagaaatcttttatgatgatctgatccgggcggtagccgaagcttacgtgttcaaatgttacgcgaccttccacgccgttttccagtttcaccggatgctcggcggtctgttcttcctcctcttcctcaaggaattcaaaaacacgctcggaagctgccgctgcggactgcatcatatttgtaacctgcgcgatctgctgtaccggctgggtaaagtttcggatgtactggaaaaatgactggatgtcaccgacttcgatggctcctttgatcgtcatgaaaccgccgagaagtgccaccatcacatatccgatatttcccacaaactgcatgatcggcatcatcatgccagagaaaaactgagatttccagccggattcgtataactttttgttcgtctcctcgaaagtcgccatcacagcttcttccttattaaatgcctttacaatattttgtccggcatagacctcttccacctgaccgttcacatcacccagatatttctgctgctgctggaaatacttctgggaccgcttcatcaccttgccgataatgaacatcgagcacggcaggatcagcagggcacataaagtcatccatacgttgatactcagcatcatgataaatacaccgatcagcgttgtcaccgaagtgatcagctgcgtgatactctggttcagcccctgctgcagggtatccacatcgttggtgattctggagagcacctctccgtaagtccggctttcgtaatacttcatcggcagccggttcattttcccggaaatgtcttttcgcagggagtagctaacatcgttggagattcccgtcatgataaatccctggatgaaggaaaatgccgcactgcacagatacagtcccagtgtccacaaaaggatccgtccgatcttgtcaaaatcgatcccgccggttccgttgaccttcgctaccaatccgttaaacagttctgtcgtcgctttaccaagaatctttggtcccacgatgttaaataccgtaccggcgatggcaaagatcatcatgccgatcagccggatcttatatttgctcatataacgcagtaatttttttactgcttcggagaaatcttttgccttttctccgctcattcttccccgtcccataggtcctctggaggggcgtctgctattttcactcatgatccagttcctcctgtgacagctgtgactgtgcaatctgccgatatacttcgcaggactgcagaagttctctatgtgttcccataccgacaacctttccttcgtccagcaccaggatacggtctgcatgcagaatcgtactgatacgctgtgcaacgatcagggttgtggcttcctcggtttcttctttcaatgcttttcgaagagccgcgtccgtcttaaaatccagtgcggagaagctgtcatcaaaaatatagatctccggctgttttgcaattgcccttgcgatcgacaaacgctgtttctgaccaccggacacattgcttccgccctgtgcgatcgggctttccatgccttcttctttctgttcgataaattctgtcgcctgggcaatggctgctgccttctccagttcttctttcgtcgcgttctctcttccgtagcggaggttcgagtcgatcgttccggaaaacagtacccctttctgcggcacataaccgatgcgatcccgcagaactttcagttccatcctgcggatatccacaccgtccacccggatgcttccttttgtcacatcaaagaaacgtggaatcagatttaccagcgtactcttaccgcttccggtacttccgataaaagcaaccgtctcacctttcttcgcctcgaaggtaatatcagaaaggacttcctcttccgctcccggataggaaaaacttacatggtcaaatactaccgttccttcttcactttcttccggtttttcactggtttccggatcttcgatggaaagcggggtatccagaacctccaggatacggttggcagccacaccggcacgcggcagcataatggacatcatcgtgatcatcaaaaacgacatgatgatctgcatcgcatactggataaatgccatcatatcacccacctgcatattaccggcatcgatactgtgtgcaccggtgtagatgatcagtacactgattccgttcatgatcagcatcatcagaggcatcataaacgtcattgtacggttgacaaacaggttggtcttcgtcagtctccggttcgcttcctcgaaccgctcttcctcgtgtttttcccggctgaacgcacggatcaccggaataccggtcaggatctcacggctgaccaggttcagacggtcgatcagatcctgcagttttttaaatttcggcatcgcaatccagaaaagaacggctaccaggatcagtatcgctgccactgcgattccaaggatccaggtcatggatgcgtctgtgttcagcactttcagcacaccaccgacaccaaggatcggcgcgtataagacaatacggaacaacatggtaaataccatctgtacctgctggatatcgttcgtacttctggtgatcagagacgcggtggaaaaattatccatttctttgctcgaaaaagataatactttccggtacactttatttctcagatcatgaccgagttttgccgcgatccgacaggagaagaaagtcacacagacagaagcgaccatgatcagtgctgccagaagcagcatcttgatgccggaccacagcacatactgcatctggatctggtccagatcttcgcccatctcctgatactcgtttttcagatactggatggctccctgtgtcacaatggattccggcatatcctccagcttttcggtcatctgttccatcatctggcttctcgcttcatccggaagctgcgcgatcgcatccatcacatccaccccgtccggaagctgcatctgctgtgccagtgcctcctgcgtctcaggctgctgcaggctggtcactgccagcattgcccttccgaagatcgtattcagagaatctctttcttcatctttcagtttttcgtgggtataaacaccgtcttccagtatataatattctttgacttcttcctgctgatcactgtccatgaataaaaacagctgatccatggattcttcccggatctgatccggtacactgtccggaataccgccctgttgtacaccgacattgataatatccgaagtgtacgaaggcagtgccaggtcacagaatgcctgcccgaacagcagggcgaagatcagcacgatataacgataggaacccttcagttcccgaaacatccgtaacatacctattgttctccttccctaaaataacctttgatttccatacttccaggcattttttccagattttcctgcatctggagaatctggtctttcagatgatccacctcttccggtgtcatcccctgcaccatcactgcatttacttcttttcgtattttctccacttcccggtgaagctatctgccgtaatccgtcagataaattctctggatccgtttatccttttcatctgctacccgacagaccagagctgatttttccatccgctgtaaagatactgtcaccgtcgatggtttgatacacagtttactgcagatttctttctggctgagtccgtcctgctgatacaagagatttagcatcggcatctgtccggggtgcagattcacatgagaaagctgatgaaacgtctttgccgcatacacatgaagcaattttatcatcaggaactctgcggaatgctctttttcattcattcgttctctcttcctttcttattagttcgttgactaatctttcgtcgactaactaataatatcacttattttatgttatacaagtgtttttatacttttttcatatttttttataatgataccagggtataaagtacggaataatccggtatcaaaaaaatctcccgaaacagatccacatactttgtttctctgtttcaggagattcctgtttttgacttttctgttactgattcagattgtgagccttttcataggcggtgatcagtttcaggttctcgatctcgatcgagttcagatacgaattgtcaaactgatctgccgatacgcttggtgtgtaccagcttttcgatgcaaaatagtctgccagatcatccgacttgaagattctgccatgacgggcataaatttcatttctcgcgatacggatctgccactcggagagtccgttcagatctgcattcgtcagatatctggtactgctgtccggaatcacataatcgccgcttccggtatctgctcccgcgtcactggctgccgcttcgttctgttcctgaaccacaacctccggggttggttccggtgtcgcctgctgtgtcggtgccaccgttgctgcctccgcttcctgcgttggcacaacttcctgtgtcggttccggtgtcgctgtaacttccggtgccactgtttccggttcttcggctggtgcctgtgcggtctcgttatcatctctctcctgactcttctgcatatcttctttcatctgctcgttcagctgagaaacttttttcgtatcgccgcctccggcgccaaccagttttaccacaccaaatacgatcgcaactacgagaactacaatgattacgccgagaacggcaaaggtaatcttttcttttttctcttcccgctcccactcttcttcgtaatcatcctcatcgtcatcttccgaatcggaatcctcatctacccgatatccataccccataccggcagtcatacggttatcgtattccggttccggatttctctttctgatcttgggcgcttcatcctcctgttttttatagactttttcaggcgcagcttcctgcaccggtttttcatctaccggatgaccacatgccccacagaaacgatctccgtcatccagacggtttccgcaatatttacaaaacatgctgtttcctccattatctgtgttgctgttttctctttttacagcgtttcttcgtatggaaaaattatataccgaactttccgaaaacacaacaggcaaatgctgtctatcttcttacattttccatacattttcatttgtggtcgagattgcgacagcaccggctttcagggctgccacaatatcttccttctcgctgatcagaccgcccgcaatcaccggacagcgcacgctgtttcggattttttctatcacgcgcggcatcagtcccggaaggatctcgatcacatcgggacgataatccgcagtctgtctctggatgttatcgtacgccatcgaatcgatcacaaaaaagcgaagcacggtaaacattcccagttcttttgcacacctgaccagtgccggtttcgttgtaatgattccgtcggcacgggtataggttttcaggaactccactgccgcctcttttccactcaacccctggatcagatcgatatgtactaccgcaattttccctttttccttgatcttttttacgatctcgccgatgttacataccgttccatataagacaaataccattcccacatccatcttcaggcactcttccaggcctttttcatctttcactgccgcaattaccgggcagtcttccagttcttctgtcatttttctcatgttttcttcctctcaggcgcagtacgccgcacctacctgttccagacaccagtaataatctctcacatccacccgttctcccgcatacaccggatattcctgcagcagcttttctcccagaaaatactgcaccaccccgacctgctgtcccttcctgaccggagcttccagctgtgccggcagctgataacgaacggtaatctgttcatccttccgtaaaagcagcgacagatgcatctgctccatatctgccccgtattccagacgcgtcgttgccacatcgtcaatcgcagtcccttttttctgcccattgaccactgcaagtcgtccgagctccttcttttcaaagacttcccggtattcataattcgtcagcccgtaagtcatcagttttctggtatcctcccatttatatccccgattattcggccatccgcacgcaagcagagacacgatcagtgtttttccttcccactgtaaggctcccacataacagtacccggcattccccgtaaatccggttttccccgtcagcgctccgtccatcattcccagaaacgcattgtgatttgtgcactgatagacctgtgtcttgctgtagttccagaatgtataggacggcatccgcgtgattgccagaaaatcttctttcttcggagactccataatacaatatcgcagaatccttgccagatcctccgccgtggtactgtggatcccattttcattctccgcatccagaccgttcggcgtgataaaataagtatcttcacagccgatttcccttgctttcagattcatcttttccgtaaatccttccaccgatcccccgacctgctctgcgatcattaccgccgcatcgttatccgaattcagcatcagcgcatacagaagatcctgcagataaaactgctctcctgcttttgcgcccatatgtactttcggctggctcgccgcataggcagatacggtgaccagatcgtccatccgtccgtcttccagtgccagaatacaggtcataaccttcgtggtacttgccatcggaagcttctgctcgctgtttttagaatacaaaacacgtccggagtctgcatccatcagacatgccgaacgcgcataaagttctgattcactcaactgcataccatatcccactgccggcgttcccaccagcaggaaaagcagcaacaataatccccgctttattcttcccatatagtatcccccgttttttatcacagttttccaaagatactatatgcggctctttttcttttagaacctgttttttacagatccagctgtaactgaatctcttcttccgcctctgccttgaaatcttccagttttaccgggctgatcgtcggcagatcctcggtggactgcaccccgaaatttcttaaaaattcttccgtcgttccaaaaaggatcggtcgtcccggtgcatccagtcgtcccaattcctgtaccagattatattccaccagtttattgatcggatggtcacactttactccacggattttttcaatctcctgtttcgttaccggctgcttgtaggcgataatcgagagtgtctccagcatgacatctgtcagcactgcttttttcggctgcaatgcgatctccaccagatattcataatattcctgcttggtacacatctgaaatgctccgtccagttccaggattttgattccacgatctctggcattgtattttaacatcatattccggatgattttttccgtcgtgtttttatcctgcccgattgctttcgcgattcttcctgtctccaccgaatcacccgcggaaaataaaatagcctcaatcgctgcttccagtttctccatcttcctgctgctcctcatattttaaagatgtaatctgaatatcatcaaacaaatgttcctgttctatggtaatcacaccggttttcatcagttccaggatcgcaagaaacgtaacgatcacctgaatcttactcgactgtttttccagaagcccccggaaggaaaaatagcgatgtgttctggcatacagctccagatcactcatcttgtcttccagactgacttcttctttctcgatcttaccgaatttgcttcggatcggatccaccttgttttcctgtcgtttgatgatagaattgaaaatattctgaagttttgccagtgtcagatcaccgatcagttcctggatatccaccggcagtcgatattccagcacttctttcggcatgctctccgcccggtatacacaacgggaagcatctgccatacggtctcgcagctcgtaggacatatatttatacatcttatactccaacagctgctgtaccagttcttcacggggatctttttcttccccttcttcggttacttcttttggaagaagcatcttacacttgatatccaggagcgttgccgccattaccatgaactcactcatgatattcaggttttcttcctgcatctgccggatatattccatatactgttctgtgatctctacgatcggaatgtcgtaaatatcaatcttattcttttcgatcagatgtaaaagcagatccagcggaccttcaaatgcctccagttttaccggtattcccatgtttcttcctctttttcttttcgtttatacctgaatgtttattttacaggcattttccggttttgtaaagcgcagattcgaaggatcgtcagttctcttgggttatggatccgtaacgggatcgtatgctcccccagcccggcactgacgatcactgcatgttctccctttttgtggattcctccacattcgcccggaaagagccgaaaatccggagaaatcgctccccgtctcttcccgaacatcatcaccccgccgtggtaatgtccgcagaatgtcaccgttgcaccccaggaaagatactctttcttatagcgtggattatgcgccagaagaatcgtgatccggtcaggatccggttgtccgaaccgtttttccagttcttccaccatgccctctttccgacgccctttctcataaaatctttcgtccgtctccagcccgcagatggtaagcggtattcccttcttctccacctgcactttccggttccgtagccgcagtaatggcagttcttctactgctgcctcatatcttttcccgacctctccgtaaatctccggatgttcgacaatccgttgttcatggttgccgcttgcataatataccggatatgtttccgacagttttttcagaaaaccaaacgctttttctgtttcacatcccttttttccgacaacgacatccccgccgaccaacaccagatccggatgttgtttttcgaggagttgaaaaatccgctccccgtcctcacctgtgacctgatcatgaagatccgtcaaaaaggcaagtgtcagttcctgtttctcttttatataaggaaactggagtcgatactcccttactatcgtttttttcatcgttttgctccatattaaaaatccccggtctaaaactttcgttttacaccggggtgttgttgactgtcctcatcggtcgtcatctgcaaactttattttgcgtaatctacgacacgactttcacggattacactgactttgatctgtccaggatattccagttcagcttcaatctgtttggaaatatctcttgccagtaataccatatcagaatcattgacatgatctggcaataccataatccgaacctcacggcctgcctgaatagcataggatttgtctactcccttgaaggagtttgtgatatcttctaactgtttcaatctgttggtatatgtttccagtgtctctcttctcgcacccgggcgggcagctgagattgcatccgcagcctgtacgattccggcaatcagagattccggttctacatcgccgtgatgggcttctactgcgttgatgacaattggagattctttatactttctacataagtcaacaccgatctgaatatgggatccttccacttcatggtcgatggattttcctatatcatgtaataagccggcacgttttgccagacggatatccgtaccaacttctgccgccagaagacctgacagctgtgcaacttcgatggaatgctttaatgcgttctgtccataactggaacggaatttcatacgtccaaggagacgaatcagttccggatggattccgtgaacaccaacttctaaagcagcgttctccccctcttcccgaatcatggtctctacttctttctgtgctttctccaccatttcctcgatacgtgccggatgaatacgtccatccacgatcagtttttcaagagcaattcttgcaacttcacgacggatcggatcaaatccggataaaacaaccgcttccggggtatcgtcaatgatcagatccacaccggtcagtgtttccagcgtacggatgtttcttccttcacgaccgatgattcttcctttcatctcatcgctcggaagctgtacaacggaaatcgtagattctgccacatggtcaacagcacatttctgaatcgctgttaccacatactcttttgctttctttgcagcatcttcttttgctttgctttccagctctttgtaaagtttcgcagtatcaatttttacttcgtcttcaacagattttaaaagataatcctttgcctgttcggaggtcagtcctgagattctctcaagttcctgtactccctggtcatgtaattcgtcaacctgtttctctttcttctttaactctgcttcttttgctgaatactctgtttcccgtctctccagtgcatttgccttacggtctacagattcttcttttgccagcacacgcttttcatacttttgcagttcgctgcgtctctcccttgtctctttttccagttcgtttttggttttcagagattcttcttttgcttccagaagagcttcgcgtttcttagtttccgccgttttcagggcttcatctatgatgtttcttgctttttcctccgcagtgccaattttttccgcatcctgcttcactttcttggcaacggcaagcttgcaagccacaggaaccgctattaccagcgcaatgactacagcaataattggaattaatatattgattccgtctgccataggagcacctccttatttagttttcattgtacgtttacaacagtataattctataatgatttcacaaatttgtcaacggattccccattattttcgtagatatagttataatcctttattcttcccgtgaaaaatattcccggaataccgactggatctccgaagaggtaaatcccctgcgcatcagatagccgtaatgccgtcttttttctttttcatcggcctcttttggatttctgcagcgtttctccagaagctggcggatcatatccgtctcatccgcacacccttcttcatcctccatggcttcttgtccccgtcggatcagttcccgcggaatgcctttccgctccagttcaaactgcatctggcgtctgctctttcttccctgataggtggacagataccgtgtgacatatctctcatcatccagataatgatacgagcgcacataatccatggcgatctttactgcctgcggtgtatattcgcccttcatcagcttcttttccagttccgcttccgtataatccatccgcgtcagcagatgcatcgcccgcagcttcgctcttttgaccagaatctctttaaagatttcctgaaaagtctccgcaggaagctctccgttctctttcagtcgataacgggaaagctcgcccttatataacataaaggcgagctgttcatctgtcacaacgcggtacttcgcttttgtcacagggacaatctctgtgattctcatacttcctcatccggtgtatctttctgtgcaccggttgcttcatccgcttcttttgcgatatcctgcggttcgtcttcacccagtccgtaatgtgctcttacctggcgttcgatctcttctgcgatctccggattctctctcaggaagatctttgcattctctcttccctggccaatcttgccatcattgtaggcgaaccatgcaccgctcttctggatgataccaagattcactgccagatccaggatatcactctctttggagattccctttccgaacatgatatcaaattctgcttctttaaacggcggtgccactttattcttcacgactttgacacgggtacggttaccgatcacttctccaccctgtttgatcgtctcggttcttctgacatccatacgcacggaagcgtagaacttcagggcacgtccaccggtggttgtctccggattaccgaacatgacaccgatcttttcacgcagctggttgataaagatcacgatacagttggacttgcttaccacaccggtcagttttctcaatgcctgagacatcagtcgtgcctgcagacccatatgggaatctcccatatctccctcaatctctgctttcggtaccagggctgctacagagtccacgatgatgatgtccatcgcaccggaacgcaccattgtctcagtgatctcgagtgcctgttctccgttatccggctgtgaaatatacaattcatcgatatccacaccgatgttttttgcataggcaggatccagcgcatgctctgcatccacgaatccggcgattccgccgcgcttctgtacttccgctaccatatgtaatgctacggttgtcttaccactggattccggtccgtagatctcgatgattcgtccacgcggaacaccacccagtcccagtgcaatatccagactcagagatccggtcggtacggtctgtacattcatgttcttaccggaatctcccagtttcatcacggatccttttccaaactgtttttcaatctgtcccaaagccgcatccagggctttcaatttatcttcttttgccataatggtctccttttttcatgtgcgaacttatgttcgttttgctgtttccatactattacaaattacttttgttgtcaactggtattttcggtttttgaggggaatctaacaatttcggcgatctaccgggtaagaatcaaaattggttcactgagccaattattgatatacaatgcaataaaattaagaaaagaacaggaattttcgccgacggcagatccgccggcgttccctgctatcatacatatttttatattatttttatattattttt

SEQ ID NO: 2474 - DNA, 27620 bp, Unknown
  gut microbiota DNA sequence
gtattcggatcatgcagtttcgggaaaaattcttttaccggaagtccgctgcgcagttccagtgcattggcggaacagaaggtttccagacagccacggtttccgcagtaacataatggaccgtccggttccacgcagatatgttccagggaaccgctgtgcatggaaaatccctgatgaacgctgtggtttgtgatcaccgcaccgccgagatttcggtttaataagaagacaagtgcactgtccagttccggatgattccagagttccagatccgcggcagccttggagtcgtgcatcagatgacacggaaatgggagtctggaagcaaaatcagaaagctgcatccgtgtatttcccatgatagcaccgtaagtcacggacgaaccatccggggaaatgattccctgtgtggcgatagaaattccggagattttttccgccggatactgatttttttcgataaaatgaagtacctcgccggcaaatgtgtcgtaatatttcggcgtgtcttcgtaggcaagtggaatcgtctccatcgcgacggtctcaccgtacagatccaccgcaacgagatgaaacatgctctttaaaatcccgattccgatggcaattttcagatccggtacgatccggataatctgcgctttccgccctccggtggaggcaaaatatccgtttcgttcgatcagtccttctttctccagtgtggtcaggttttgactgactgtggaaagccccatgttcagatcctgcacgatctgaaatttggaagtttcccgctggcggtagatgtactgatagacggtgtgtttgttgatctgttttaacgtgagagttgtcacactttttttattcataatggcggccgctcctttgataatctgggcaattgttacttatgattgtaatacaatcaaaagaaaaaagcaacggaagtggagaaacgggatttgtattttgcgctgtcaggggaacagtggcaatctttcggcaaatatgatatatttacagttatttacgcgagtaacgagccaaagtccgcgtttgcatgagaacttggcgactgctgcgataaaacgttttggcaggatcttaccaaataaattatttctgtggtttgttgcatttttccacaaaggatctctcgcgtgccgtcagttccacccaggcagggcggtagccgcaggagataaagaggaaaacggatattgtttcaacccggaaacgacgatcggaattattttcggtgaactgacagcaccgtatcagagcgaacgtgtacaggcgatcgaggatctttttgcagataccgggctgcattaccgcgccacagaatatatcaaagaagaaatgtggtgcaaattccgtctgaatgtcggtaacaaccttccacaggcggttctcggcgcaggtgtaggctgctatcgggacagtatgcatatgaaagaaatcagtaacaaactccgggaggaactggaagcgattgcagcagtaaaaggaatcgacatccgtaaggcagatgattcatccagtcacggaagtgccgttccgccatccgcaagatattctacccttcaggatctggatgcaggacgtcacacagaaatcgatatgttctcaggtgcgctgatccgtatgggcaaagaactgggaatcccgacaccatataacgaatacacataccatatcataaaagccctggaagaaaaaatgacgggaaatttgattatcagaaagatgatgaaagcgtgacctgctcgcgataataggggattgcatatctgcgtgacaaagacagcaggtatggggctttttaaaaaattaagaagatcaggaactcgtctggcgttgagattcacagaaatctgtactataataggtatcagaaaaaaacgatgaaaatgggacaaaggaggattttaccatgaacaatgaagtattgaaagcaatgaaaacccgcagaagcatccgcaaatacaaaccggagcagatcacagacgagcagctggatgcgatcctggaagccggaacatatgcggctaccggaatgggaaaacagtctccggtgatcgtggtagtgcagaaaccggaactgatcgcaaaactttcgaagatgaacgcagctgtgatgggaagcagcaatgatccgttttacggcgcaccgacggttctgatcgtactcgcagatccggagatcggaacctatcatgaggacggttctctggttatgggcaatctgatgctggcagctcatgcggtaggtgtggattcctgctggatccaccgggcaaaagaagaatttgagagtgcagagggaaaagaactcttaaaagagtggggacttccggaaaatctggtcggcatcggacactgcatccttggatatcgcgactgtgaatacccggacgcaaaagaaagaaaagcgaactatattgtcagagtataggtagagctttcgtaactgtgaaggtactgaacagttacgaactttcataaaaacgtaacgtaactgctccgaacatgaacagtcagtgcgaaaataaaaagataagaaaaacagaaaacgggccgtgtcctgaagcgggcagaaacgggagagcttatatagaatgtttccgtgtgtcacaaaaggtatacagcccgttttataaaagttcaaaccaggaatcttcctgatgacctgttcatgggaagatttagaaaatgaggaatatatgtatcgaattatgatcgtggaagatgatgaagtgattgcaaatgcgatccggcaacacctggtttcgtggggcatggaggcgttctgtgtgcaggatttttccgatgtgctgacagaatttgccgcaaccggtccgcaactggtgctgatggacattcatcttcccttttttaacggttaccactggtgccaggagatccggaaagtgtcgaaagtaccggtgcttttcctttcttccgcttttgataatatgagcatcatcatggcagtcaacatgggcggtgatgattttatcgcaaaaccatttgacctgaatgtgcttactgctaaggtacaggcactgcttcgaagaacctatgaatttgctggagccacgaatctgttggagcacaaaggagcaatcctggataaagaaaatgggattctgacgtatcagggagaaaagatcgaacttacgaaaaatgagtggcggatcctgcaggtcttaatggaacacaagggaaaagcggtgagcagagacacgctgatgatgcggctgtgggagtcggacagctttatcgatgacaatacactgaccgtgaatgtgacgagacttcgaagaaaactggaagaaatcgggctttcggattatattcagacgaaaaaaggtgtgggatatctgttgacataatatgggatttatcatatggttcaggagattttcacagtgttactcttttgaaaagaggattctgagagaaggaagtcgtaaaacggagaagaacgatgcaggaaaagggaagaaaaaagaatcaggaaaaaagaattatccttgcatttttgcgggaagaggcggggatccttctctgggtggtgttttttatcggaattttttggcttttgtgtttcctagaagatattccacaggatgtcaccatttacacattgcaacttgcctcttttaccggtatcgcagtattgatcgttcgcttcatccgctatcggaagcgctgtaagacactggaactgctgacaaaggatcccagaggcaagatagaagcgttcccgaatccggacactctgtcggagaaactgtaccggcagatcatcgggcaatatgagcgggaactgcgaaaagaagaacagcagatggatgacagatatcgggagatggtggagtattatacgatgtggacccaccagatcaaaacgccgattgctgccatgcacctgttattacaggaagaagaaacaccggtttccaaagaattacagggagaactttttcaagtggaacagtatgtgcagatggcactacagtatttgcggatggaaaggatgaacacggatctggtatttgaaaaacaggaactggacgctctgatccatcaggcagtacgaaaatacgcacctctgtttatccgtcgaaagatcgcattgcaatatgaggatgtccattgtcagatacttaccgatgaaaaatggctggaatttgtccttgaacaggttctctcgaacgccctgaaatacaccaggaagggaaagataaaaatttatatggatccacaaagccctaagacgctggtgatcgaagataccggtatcgggatagcaccggaagatcttccgcgggtctttgagcgcggatataccggctataacggtcgcacggacaaacgatccacaggtatcggtctgtacctgtgcagacagatcatggaccggctttcccatacgatccggatcgaatcggagatgggtgtgggaacgcgggtgtatcttgggctagatacggtggaattataagaggatcaggacgaaaagccttttcagacacgctctagcgcgataaaatgagaatgctaccgggaaccttacacgaatgtaaggtttccggtatttttgtaagcagaggttaaggcagccggaagaatggattgctataataagcctgtaaataggaacagaaccgacagatttcgataaagaaacaggaaatagcgggttctggaaaacacagtacagaaaggacagaaaaataaatggtaattctggaagtagaacatctgaaaaaaacatatacgacccgcctcggaagcaaccgggtggaagcgttacgggacgttaatttcaatgtggaacagggcgaatttgtagcaattatgggagagtccggaagcggtaagaccacactgctaaatctcctggcggcacttgataaaccgaccggtggtcagatccggttaaacggaaaaaatctgggagatctgaaagaaaaagagatcgcggcattccggcgggagaatctcggatttgtctttcaggattttaatctgctggataccttttcgctgaaagataatatttttctcccgctggtgctggaaggcaaacgataccgggagatgaagcagaaagcagatccgatcgccagaaaactgggaatcagcaatctgttggaaaaatatccgtatgaagtgtccggcggacaaaaacagcgggctgcggtggcacgggcactgatcaccagccctcagctggtactggcggatgagcccagcggggctttggattcgcatgcggcagatgcactgatgcagctgtttgaggaaatcaatcaggagggacagaccattgtgatggtcactcacagcgtgaaggcggcctgtgctgcaaaacgggttctttttatcaaagacggagaagtttttcaccagctgtaccggggaaatctgggacgggatgagatgtatcagaagatctcggatacgctgaccattattgcgacaggtggtgagcgtcatgaatagtctgctgtatgcaaaacttgcaaaaacaaatctcagtaagaacagacagaatattcttccttattggttgtcgtgtatcggtacggttataatgttttatattatgagtacgctgtctttgagtgaaggccttaaaaaaatgatgggggaagccacgattcagatagtaatgcagtttggcgtatatatcatcggactttttgctgtgatctttctgatctacagcaacagttttctggcaaaacgcaggaaaaaagaatttggactgtttcagatccttggcatggaaaagaaacatcttgcaaaggttctgttttttgaaagtctgtatctgtggatcctgtcggttggaggtgggattttgcttggaatcctgtgttacaagctgctgtttctggtgctgttaaaactgacccggttccagggaacgatccattttgcttttaactggaaggctacaggaaacacggtggttttatttgccgtgatttttctgatcaattatctgaaaagcctccaccagatccacgcagctcagccgatagaactgcttcatggtgaacaggagggagagcgggagccgaaaacgaagcttcttaccgcatggatcggactgctctgtctgggacttggttattatctggcactgacctgtcagaaccctatggaggctatgggcaagtttttcggtgcggtgcttctggttatggcgggaacctactgtctgttttcggcaggtagtatcgcactgctgaaactgttaaaaagcaacaaaagatattattaccagacgagacacttcaccagtatctccgggatgttataccggatgaaacagaatgcgatgggacttgccaacatctgtatcctgtctaccggtgtgcttctggtaatctccaccaccagttgtctgtggtttggcatgcaggaaattatccagacaagatttccccatcagatagcggtggaagtcaacgacactcttatgtcggccaatggtgacggtactgcgctgacaaaagaagaaatcagttctgtgcgggaacagattaacaactatctggaggagcagcaggtgtcaaaacgatttgaacgggatgaaacctactggttagcagtggcagaaaacaaagaaaactgggtaggcctgacgcaggaactgaaagggtttgaggacggtcgcagcatgatcgaattcatggaagcttcggaatatgaacggatgaccggaaaatctgcagatctgaaaccaggccaggtacttgtatttaccagaaaagaggaaccatacaaatatgatacgatacagttcggagatacgatcagctgtgaggtaaaacatacggaaaatacacaggaagatatggtggaaaccacgaatgtaatatatgataccagaattatcgtatttgcagacggagaagaagcacaggcagcatatgtggcaatgaccggaagaacacctgccggatacagctggaagtatcagatagatctgattggggatacgaagctggagacgcggatcggacagggaattgagaagcttgtgaaccaggcacaatgtgacggctatgtggaagtacgggaaaataacaaggccagcctttatcagatgtacggcaccatcatgttccttggaatttttgtcggtactttgttccttatgggtgcagtgatgatcatttactacaaacagatttccgaaggatttgatgaccggaagcgttttcagatcatgcagaaagtaggcatgagccgtcaggaagtccgccagaccatccggtcacaggttgttaccgtatttttcctgccgcttgtagtggctattttgcacaccgtggtggcatttccggtgacgagacagctgatgacgatgatgaatttcccggacagtggtatttttctggtagctactgcagtgacgattgtggcgttcgctattgtgtatctgatcgtgtatacaatcacggcaagggcatattataagatcgtggaataaccggaaatattttgtagaaaagtaaaacaatctttttgcgtttttttctgttagtcgtgactttatctggtaagcgtggtagaataacaagtattctgtgggtgaggagtcccgcagggcattttgagagaaaatgtcggaaaagttaaaagaaagagagtggaaaagacgcagatgaataagaaaagaagcgcattttcagggaaaatcggctatgtcctgtcggcagccggtgcgtctgtcggactgggaaatatctggagattcccgtatctggcggcgaagtatggcggaggaatcttcctgctagtgtatatcatactggcattgacgttcgggtatacgatgatcgttgcggagtccgcccttggacgtatgacaagaaaaagtccggtgggggcatttcgaagctttgcaaaggggaaaaaggtcggctggctcagtttcggcggctggatcaacgcgattatcccggtactgatcgttccgtattattccgtaatcggtggctgggtagtcaaatatctgtttgagtacatcagaggaaatggcagcaaactggcggaagacggatacttctccggttttatctcaaatggaggagctacagaaatctgttttgtgatcttctgtatgttcaccctggtgatcatctacgcaggtgtacagaatggtatcgaacgtgtgtcaaagatcatgatgccgattctgatcgttctgtccgtaatcattgcgatttattcggtcacaagaccgggagccatcgaaggtgtgaaatatttcctcgtaccgaatgtgaaaaacttctcctggatgacggtagtggcagccatgggacagatgttctattccctgtccatcgccatgggtatcctggtgacctttggttcttatatgagaaaagatacctccatcgaagattccacaagaaacgtagaaatctttgatactgcgattgcgatgatggcaggtctgatgatcatcccggcggtcttcgcattctccggcggtgatccggatacgctgcaggcaggtccgtccctgatgtttatcacgatcccgaaagtatttgccaacatgggattcggaaccgcagtcggtatcctgttcttcgtgctggtgttgtttgcagcagtaacaagttctatcgccctgacagagagtgcggtatctactttcgaggacgaacttggctggggaagaaagaaagcaaccgtactgaccggtgtgatcatgatcgccctgggaaccctgtcctgtctgggatatggtccgctggattttgtaaagatcatcggcatgcagtttttggatttctttgacttcctgacgaactccgtcatgatgccgatcgcagccctgatgaccagccttctggtatcccgggtgatcggtgtggacaagatcgaagaagagatccgccacggcgagagcgccttccgcagaaagaaaatctttgtaatcatgatcaaatacctgtgcccgatctttgctttgatcattctggcaagctccgtggccaatgcatttggatggatatctatgtaagaggataaaaatgagaaagtcgttgttttcagataaactgagaatagcggcttttttcatatggttaatcggaagtatggcagttttttagagtaacatttctcagataaaaggaaagaaatatatttgttcggtattacagattcattagttgactggcagagatgatattctatataatgtaattatatatacggaaaatgaatttgcgggttgttagaatcctgagcgatttttcaaacatgtgtggagatgagggaagagccatgaggtggaaaaataagaaacagaaactgcaatatattgaaaaaatatgtgaagacaatgctcaagcgataaaacaaaaactcccggttcttttagaactttcacaggataagaacccggaagtcaggggaatgctggcggaaaatctggtgttgtttgattgcgaagaaacagaggaaatcttatacaacatgttatcagatcagaaccgaatggtccgcctagaagcagtggattcgattggcgttggaaggagccggaaatcaatcgagaaagttgccactatgttgagtgggcaatggtctctgattcgtatgtatgccgtactatcgctgtttgacctgcttacgaatgctttcggagcaaatgaggaggcttttaagcagtatcgggaaataaaagagaagcatttttctatggagaacaatccaagggtattattggcttactatagaaatgaatattatatggatcataaaacgggattgtctttgttggaaaatttttatacggatgcgatggatcaagagagatatgatctgatatggacggtattacatgtattggaagaaataaaaaacgaagagaaccagaccgaattgcaacggattataagttataaaaaagaaaaacttcttccggttcagattgcgtttatagaggaaatggagaagtgaatactgtcatacggatcatgaagaaggtgctccgatggcatagctgttaaaagtgaaaaattatgaataacaggaagagtgtaattcttccgggagatgatatacaaaatgagaagattatggacacataaaaactgggatatgtactttaaagaacccagaagagaaggaattcgtctgagatttgaaaaagatgtttgtccagagataagggaagaatgtatacagtttgtacaatggctgagaaaagaatatcaatttcccatgcgtgtagtaatttatgtgaagagcgctgaacaaatcaaagcgttgaatggagaaatggtgtcggcgacgttttttggaccatatgatctgatgcaggagccatacataaaagttgctacaggtgattatgaagaaaatgctgaaagatggggaaaagaggatgctttgagagcaaatttatgttccatagcgcatgaacttacccattactatcaatggctcaaaaggcatgaggaatgggcttctggggagcggacagattatttcgagcgtcaggcactttattatgcagagaagattgtggaagattatgaagaggaaaccaatgatttttttgcagtcagggatggatttgtatttgctgcgattcattatccgtgggacagatatgatgcaattgtgatacaggatgagaaggatggctgctatcaggagacagacatacctgttcatacggaagaagaatacatccgatatataaaggaaaagcagataaaaagcgcggaaataagaaaggaaaatctttcatttttgaaaaaatgtccatcgttaaggaatctgagtatctatggaggaaagcggatttccatagaacatatagaagaattgccagatttgcagtgtttatttttatcttatgcaaggaacctgagtgatatcagtgcgctggaaaaagtaaagaagacactgaaattactgtacatagaccattgcccgaaaattgaagattatacagtgttggagaaattggagaatcttcagacattgatgatttatggaagtaacaagatttccgatattcactttatcagagaaataaagagcctgaagagattttggttcagcgtcaatatagcggatggagatctgactccatgtctggaattagaagaagcagcatgcctgattaaccggaaacactataatctaaaagagaaagacttaccgaaaaatgatgaatgttcgtttggaagcgaagagatagacgaatggatgagagcagagttgtactgaaatacaatgaagggataccagccatgaataaagagacagaagtggaaattataaagaaattcattgtgaaaaacaaacaggagagaattatctggaaattacaaaatgccaaaaaacgaaaaaaggtgttctggcattttgatcatccggatattttcaaaaaagagattttatatccgtcaacctacaaggatgcggagcatttggaaaaagtattatatgaaatgagtgggacgagggaatgttatgttataggtgaatgttacataggaaccatgcagttacgccaggcatgcgaagaagcctggcaagggggaatttgtatcatatattgtggaaacggaatcggatactatcagggagaacaggaatatggagcaccaccgagatttctgttacatgcattgtaaaaatatcgggagtcgatgaaaaggataaatgctggatgaaaataaaaaaaaatacgttggtttataaaatacgtgtgtgggcaattttatatctgggagtgattcagacattgaactatattgtccttggagtaaagatgagaggtgaaggggcggcattgcgaacaatctgtgtgctgggaggattatcgtgtggtttatttgtgcatttagtgcgcaatgattttcagagagattcgcgtggtaatgggctgcttacggaaattgtaacttatctaggagctattctggcgataggggaatatttatcggagtttggaatggtaatagcaggaggaatagaaacaataatcctgttacttggaattgtagcagttttacagaatcaaaaaaatattaatgacgggaaaaaataaagaggaagaactgtgagcgtggtgatagacaggggatatagggagtggggatgatgtgattcatatatgatgaaaacagaaaaaagcttattataaatcatgaaaatacaatgttcaaaacatatacagaaattattggtaaatattcagcattgttcaaacagtatgagtgtgatctgaaaatcagtatatcctggagtgatttcaaggtcaaaagttctgactgccgattgccgtttcatacgggttatttctgctatatatcctgtgaagttcaaaaagaaggaaagacagtacgggtaaaggatacggagggagaggtagagtattattcggtggaggttgtatggcagatttcgtcaattgaaaggggaagtttgctaaaggagaagcgttttttcaagccagtagtcgaactttatacagatatagatgaggttgaagaggatatgcgaggattacttcaattgctggataaatttccaatgatgacaaatatggattaacggaagaaaaaagaatatgatttacaaaaaaagatactgtggctgagctatggtattttttttgtaaatcatgaaaattggcattgacaactataattgtcaatgatagaataaacacaagttgaatgacaaataaagttgtcaaaatgacaagaatacaagtcagaacagaaataagaaaggagaaaggagaagcagatatgccgctggaaaacaggttaaaggaacatcgcgccagacttggcatcaatcaggcggatatgggaaaacgggcaggagtgtcccggcagacgatcagtctgatcgagcgaggggattattcaccgtcggtaacgctggcactgaagctggcaaagatctgtcaggtaaccgtggaagatattttcagttatacggaggaagagaatgatgaataaaccaaaaaagaaaaatgtatatgtaaaatatgcggtaatcatgtgtatcagcggtgcgctgggaggaattctggggggtgtcatggaaatgggacatgtgcatggagttctgacaggtattcaggagggaatgcaattcttcctgaacagtgtccgcacctggatgcttccgctgatggcaatctgtggagtgatagcgctggtactttgtgagcagtatatgggcagactgaaaagagcgggcgaagccatggaacaggcagaagatgaagcgtatgaacggctggattacgagctggaagctgcgggaagtaggggaatgatcgtaagctttgccggaagtattgcgatgattctgcttctcgcaaccggatattccacaaaatatattgaaagtctgaacggttctgggataatgtggtttctgcttgaaattcttacatttattgcactggaagtgtatctgaatgtatggcagattcgctatgtccgcgtgatacagaagatctatccggacaaaaaaggagatccgacttctttaaaattcccgaaacagtggctggaaagctgcgatgaggcagaaaaggaatgtatctaccaggcaagctacaaaggctatcagaccgtgatgaaatgggcgccgatcctgacgtttgtggcgctgatcctgcatatgttttttgatacggggatccttgccatcgtgatgccgtcagtgatctggctggtaacatcggtgacatactgtagagcgtgtctgcagaacaagggagaaaaactgagcaaataaaaaagataacatcctgtacggagagaatgaaaagcgtttttttcgtacaggattttttgtgtaaaaatactgaaattaaacacagatacagaaaaatatggtaaaatttgcagtaaggaattctgtgcaaaaaaagaaaatgatatttggcacggaaggggatttttaacagcaacataccaaggaggagaagaaaaaatatggacagagcgcaggcaagaaaaaaagcagaagccctggtagcaaaaatgaccatcgaggagcgggctggacagctcaaatacgatgccccggcgattgaacggctgggaattccgacttataactggtggaatgaggcacttcacggagtggcacgtgcaggtactgcaacggtatttccacaggcaatcggttgtgcggctatgtttgatgaagaggagatgcagaagatcgctgatgtgattgcagaagagggcagagccaagtataatgcattttccaaagaagaagacagagatatttacaaaggactgactttctggtcaccgaacatcaatattttccgtgatccgaggtggggacgcgggcatgagacgtatggagaagatccgtttctaaccgcgagactcggtgtggcgtttatcaagggcttacagggtgatggtgagacgatgaaagtggcagcatgtgcgaagcattttgcggtacattccggtccggaggcgatccgacatgagtttgatgcggtagtttcacaaaaagacctgtatgagacctatcttccggcttttgaggcggcagttaaagaaggcggtgtggaagcagtgatgggaggatataaccggaccaatggagaaccaagctgcggaagcaagacgttactgaaaaaaattcttcgggaagactggggatttgagggacatgtggtatcggactgctgggcaatccaggatttccaccagttccataaggttacaaacggaccgaaagagtccgcgcagatggcactggaagcgggatgtgacctgaactgtggatgcacctatgcatatatcatggctgcactgcaggacggactggtgacggaagaacagatcaccgaagcctgtatccgtgtgtttaccacccgtttccttctgggaatgttcgacggaagtgaatacgatgatattccatatgaggttgtggagtgtaaggaacatcgaaacctggctgtggaagcggcgcataaaggaatggtacttttgaaaaatgacggtatcctgccgttagataaacggaaaatccgtacgattggcgttgtgggaccgaacgccaacaaccggatcgcactgcaggggaattatcatggaacttcttcccgttacgtaacggtgttggaaggtatccagaaagaagtggaagacgactgccgggtatattatgcagaaggatcgcatatgtataaagatacgatggagaatctggcctggaaggatgacaggatctcggaagcggtgatcacggcgaaacagtgtgatgtgacgatcgtggtactgggtctggatgaactgatggaaggagaggaaccggatcagagcaaccgaggacaggcaggagacaaagcctctctggaattcccgggctgccagcagagactcctcgaggcggttgtggctgtcggaaaaccggtgatcactgttgttctctccggaagcgccatggatcttcggtatgcggatgcccatacgaatgccatcttacaggcatggtatccgggagcggagggtggaactgctgtggcggatgtcctttttggcagggtatcgccgagcggaaaactgccggtgaccttctataaggatacctccgacctgccggaatttaccgattattccatgaaaaacagaacttaccgttatatggaacaggaagcgttgtatccgtttggctttggtctgacttatgggaatgtgaaggtgtcagcagcagaatttgccgaacagccggaaaaagaaaaaccgataaagattcgctgtacggtgacaaatacggggaaatgggatacagaagaggtcgttcaggtttacatcaaagactggaagtcaaaatatgcagtccgaaatcacagcctgtgcggattccggcgcgtgagggtgaaggcgggagagagtatcgagactgagcttaccatcgatccgcgggcatttaccattgtggacgaagagggaaaacgttatgtcgatagcaacaaattctctctgtatgtagcgaccgctcagccggatgccagaagtacggcgctgacgggacacgaagcagtggaactgcgggtagtgtttgcatagcagatggaggtgtcgggatgcagatgacatttcgctggtatggcgatgggaacgatgatattacaccggagatgatccggcagattcccggggtgagcgggcttgtctgggcactccataacaaacagccgggagagatctggacggtggaggagatagagaaagtgcgcacgcgcatcgagggtgcgggttttcacatggatgtggtggagagtgtcaacgtccatgatgatattaagatcggtctgcccacacgggatcaatatattgaaaattataagacaacattgaaaaaccttgcaaaattcggtgtcaaagtagtgacttacaattttatgccgatctttgactggacacggacggatctttttcatccgctggaagatggatccaatgcgttatattatgaaaaaagcaagatacaggatgattataaggagatggcggagtatatcctgaaaaatctgcacgggaaaacatttccgggctgggagccggagcggatggcgaagctggatgaactttttgaggcgtaccgcccggtgacgaaggaaaaactctgggaaaacctgcagtattttctggaagccatcatgccgacctgccatgagaccgggatcaagatggcgatccatcaggatgatcccccatgggatattttcgggattccgagactgctttgtgataaagaatctataggaaggtttcttcatatggtagatgatgaatacaactgtctgtgtctgtgttccggatcgctgggtgcgaatatggaaaataatgtggcagatatcattcgaacctactgtgaccggatcgcttttgcccatatccgaaacctccgacactacccgaacggagatttttcagaagtttcccacagagactgtgacggtgataccgggattctggaaattatgcgagcctatcacgactgtggttataccggctatgtacgcccggatcacggaagacatctctggggagaagaagcccattgccgaccgggctacggactgtatgaccgggcactgggaatcatgtatctgtggggatgttgggatatgctggaacggctggatggaaaaatctgaggtaaccgaaaacagtcaaatattgtatgtctcgggattttgacatattcatgtcaaaacacctcgcgggacagtggctactgaatagttacgtatggctgttctatatacctgtaacgctcaaaaacattcgtaatatgcacgttttactttggagaatggctacttactcatgtttttgattctaatatttcgtataaaagaaaaatatatatattgaaaaatagaaatggaacctgacaattcaaaaaatgaatgcctggttccatttttttgcattgcatgagaccttgacgactgccgcgccaacgagtcaaattcgcgaagcgttcaacgattaagcaaaggttttaataaagcctccatcctctgtccatgccttccattcgtccttcacatcttcattcggatctccctgcttcataaagctcgtccagcaggtcaccatttcctcagccaatgcatgatcctcatcggtcatcgggcgccagcaacggttcagagttccgaaggtgtaccacaattccgaagagtggaaagcaccgtcatcactacccggcagatcgtggcagaattcgtagagatataccggaagatcctgtttccggcaggcatttgcaaaagaaacggcagcagtgaagaaaccaccctctctgtgggaagcaccttccggaataaacagatcgtctttggtaacacccatcagataagggatacgggccatgcctccttcttttgtcagaacatccggagtatccggaagtacatgaccgtcgacgaccggacgaaacggaagggatgggtacagagtcatcagctcatcggatctgtccagcagatcttctgcggggagcccgcgtaactcttcaatagaagaaacaccgcacagttcatagagcttatccgttaccgcctgcgcctgtgctttggtaaataccattggagacggaaaaccggcaatgcttccgctctgaaggatagcctgatggatcatcggtgtggctagcggagaaaatgtgagtacatgtgaactcatggctccggcggactggcccatgattgtgatgttatccggatttccaccgaaggcagcgatattttcatagatccacgccagtgcggcaatctggtcgagcagtccctggttgccgctgcaaccaagttcttcttcctgtttcttatcataaaggaaaccaaacacgttgacacggtaagaaatagtcgccaggatcacacctttttttgcataagcttccccatcaaactccagttctgtggaaaacccatgttcaaagccacccccgtgaatccatactgctactggaagtttttcagaagcagtatgtgccggcgtccagatgttcagatacagacagtcttcagaaatcggaaaatgaaagtccgggttatcatagaattctttctgatataaaccgtccgggtcggtgaaatgctgcatggggatggaacgaaaagtaaacgcatcataagcttctttgaagctttccggtttttgaggtggtgcaaaacgaagagcacctgtgggaacctttgcaaatggaatgccccgaaaaacagaatatccatctttctgaataccgttaatagttccataattacttgatacagttgttaaagttgccattggataacctccttgttatctccgttacgttattttataaaatgaaatgattcaatatataaattaatcataggataaatcggcaaaaagtaccagtagtaaaaatacacaaagatagaaattgagaattggaaaaaagctgtataaacaaggggcaattgaatagtgaaataatttagccagcagaggaatgaaaatttgaacacatattgatacctggagatatgcgaaaaaatcaaattgaaacccatagattttattgattgattcatataaaatgaaacggttcaaagataaagaagataaaaactaaataggaaaatggaagaaaaggtaaaaatgcacaaaaagtaaccggtaactttgatgaaaaatcacaattgctttgtgcaagatgttgtagtatagtaaatacaacgaaaggaactacgaagaaacgaaaatgaaccgtttcaaagtagcaaagtgcataaactattttaggaggatatctgatatgaaaagaaaagtagttgcagcagtattaacaatggcaatggcaggaagcctgctggcaggatgcggaagctcttcttccgatgactcttcttccaagagtgaaactacaacaacagatgaaagcgcatcttccgatgacagcaattccgcagacagcgcacgtggagatttcagcggcgtatccatcaccatgctgaacacaaagagtgagatcgaatctcagatggaagctgccgctgaacagtggggtgaactgacaggagcaaaactggaagtttacaccatcggtagtggtacaccttctcaggaagtatctgcaagatacgcagcaaagaatgcaccaacactgatcatgtgtgacccacaggacgttgcttctatctgtgaagaaaaaggcgtagatctgagtgatgaatcctgggcagcaaatggtggtacacagtatggtatcacaggtaatgacggaaaactgtacagcttcccattctgtatcgaaggcagaggtatggtctacaacaaaacagcaatcgaagatactctgggagaagactgggatccggcttctgtaacaaacatggatgacttcgaagcactgctgaaaaaactggtagacaacggtatggaaagcccggtggctctgaaccaggaagactggagcaatgcaggacattacttcacacaggtatatgaagagcaggacggaacactgaccggtacagaaaagattatggaagatctgagaaacggaagcgtagatctgatgtccaacgaaagatttacttctctgatggatacctacgatctgctgatgaaatataacatcaataaagcagatccgctggctgctgattacgatgaaaacgctgcagacctggcagaaggtgatgtggcattctggttcaacggaaactgggcatgggcagagatttctgattacattgaagacgatactgaaatcggaatcatgccggtaccgcagaacggaacagaagaaaatgctaacgtaaatgattacatctgtggtggtgctaccaaacaggttatgatcgataaagaatgtaacgatgaaaaacagcaggcagcagcaaaagatttccttgactggctggcaaacacagctgaaggaaacaaagtactggttgatgattgctctttagtacctgcattctccaacatcacagaagaagctacaaatatgctgggacagagtatccagagatacacagtagaaggaaaactgtttgatcagccttctaattatcctggagatcactggtcagaagttggtgcgttcatgcagaaatatctggacaaacagattgaccgtgccgaattcgcaaaagaagttcaggattactggacaaatctttccgaataatcaaaaaggcagatacataattggttgctagttaagaagttgccgggcagagtaatgcatactgacccggcaactttcactaaaagagggaaagaaaggcaacgagatgaatagtaaaaaagaaagcttatggagcaaagtttccacgttcctggtatttgcaggtcctgcaaccttcgcattcctggccgtggtaatcgtaccattcttatatggtgtatatctgacatttacaagctgggacggcgtatccagcaacaaaccttttgtaggactgaaaaactatgcggcagtagttgcagacagcagcttctggcagtccctgggactgacactgctgtatgtggtagtttccgtaatactggtaaacgtgatcggatttttactggcactgctggtaaccggaaaaatcaaaggaaagaatttcttccgtgccggattctttaccccgaacctgatcggtggtatcatccttggttatatctggcagttcgtatttaacaaagttattgtttactttggtgatgcactgaacgttaccgttctgcagaaatccatgctgtcaggaagtgcctctgcattcgcagcactggtactggtaacaatatggcagttctccggttacatgatgttaatttatatcgcaggtctgaccggtgtatccgaagacctgaaagaagcagccaagatcgatggctgtaacgaatctcagacaacaagatatatcgtacttccgctgatgagagcatctttcacgatctgtatgttcctgaccatcaccagatgtttcatgatctacgatgtgaacctgtccctgacagaaggtggtccttacggatctactgttatggctgccatgtatgtatatcagaaagccttttctgcaaaacagtatggtgtcggacagacagaagcaatcatcctgtttatctttacagcggttattgcagtatctcagacaatcatcaacaaacggaaggaggttgaagcataatggaaggacaggaaaagacagtaagaggcatcaaaacgttcctgaaaacactggtaactgtagtgctgtttatcatctatatgttcccgttctacatgatcgtgctgaatgccttcaaacacaaacgtgatattatcaaaatgccactgagctggggtggtaaaaaaggttttacaacagataactttgtagatgctttccaacagatgaacttcatgaacatcctgaagaactccctgatcattacctgtgtgagtgtgttcctgatcattttgttctcctccatggcagcttacattttcgtaagaaaagcatggaagatcaatcagatcatcttcatggtaatgctgttttccatggtaatcccgttccaggtagttatgatcccgctgatctctatctacggtggaacatttggaatcctgaaccacagagcaacattgatattcatgcatctgggcttctcggtatctatggcggtattcatgttccatggatttatcaaaggtggggtaccgatctcactggaagaggcagcacagattgacggagcaggaagattgagaacattctttcagattgtgttccctctgttaaaaccgactacagcaacactggttatcctgtatgccctgtctctgtggaacgattacctgctgccgagcctgatcctgacagataaatctctgtacacgatcccgatcgcaaccaagctgttccagggaacatacagcaatgatatggatcttctgatggcggcactggttatggcaatcatcccggtaatcatcctgtatgtcgcattacagaaatatattatcgctggtgtagttgccggtgcagtaaaatcataataaagcggtactgaaaggtgagtgtatctgaatctgataaagaaaagatacactcaccttttcttatataaacggaaagctgttggggtcaaaaggtattttgccctctttgataccggattgatccgtacttcgtactctcacgaccctggtatcatagaaaataaagtacacaacaatacatagacaatatgagaaaataattctataataaaaataaatatagccttttcaggtcccgatgaaggacgcgtcttgtcagaaacttgctgtgtcgaacttgagtatctgataggaaggtgtggaggaggaaaatcaaatggtaacaatcaaagacgttgcacgggacgccggtgtatcggtgggaaccgtgtcgaacgtactgaatggaggacgtgtcagtgaagcgaggagaaagctggtagaagcatccatagaaaaactggggtatcaggtgaatactctggcaaagggaatgcggatgcagaagaccgattatgtggttgtcattctgccgaatctgatcaatccgtattttgcactgttgctggatgccctggaaagcgaattgtcagcagtcggaaaacaggtactactatgcctgtccggtgatgatgccgaacgggaagtggcatttatggatatggcaaaacaaaataaagttgacggaatcattggtgtgacttacagtaaggtagaagaggaacggatcgaaaacatggcttttgtttccatcgaccgtcattacaaatcacacatcccatgtgtggcaggagataactggcagggcggctggcttgcagcagagaatctgcataaaagaggatccaccaacctgttgtgctttatgacaatgtcatccgtagacagtgaagtacgaaaaagaagagtcggttttacggaatattgtatggaacatgatctttcctgtaacagtgtggaaatgtcagaaaaacagattgtttcggtctatgaatcctacggatccagaaaactgatccacaatatgctgcgggcttatatttccccgtccctgggcgaacattccatcgatggaatctttaccagttcggatcacctcgcaacgattgtacgggaagaactcgaagagatgggaaaacgggttccggaagatatccagattatcggatacgatggtctgcagtttttaaatcaggggaaaccaatcgtatcgagcattgcgcagccggtgcatgagattgcaaaagaggctgtaaggtgcctgaacgaactgatcgcgaatggaaaaacagaaggaaatacaaagattccggtgagctttcaggagggaccgacaacgaaaacgcttgtgacagaagaaaaataatggaggacttgagatgataaagtggctggaagatgcagtgttttatgaggtatatccacagagtttccgcgacagcaacggagacggaatcggggatatcccgggaattacagaaaaattagagtatattcaggaactgggctgtaacgccctgtggatcaatccctgttttacctcaccgttttacgatgcgggatatgatgtggaagattattatagcgtggctccgcggtatggaaccaatgaagatctgaaaaaattatttgaagcggcacaccaaagagggatgcacgtacttctggatctggtgccgggacataccgctgtgacacatccgtggtttcaggaatcgatgaaagcggagaaaaatgaatataccgaccgctatgtatggaccgacagtctgtataaacgaatggaagatgtcaaaggaatcgtcagtgtcctgcgtggcatctccccacgtccggccagctgcggcgtcaactgtttttccacgcagccggcgctgaactatggatttgctaatattaccgatgccggctggcagcagccgaccgatgcgccgggaccgatggctaccagagaagaactgaaaaacatcatgcgtttctggctgacacttggctgtgacggtttccgtgtggatatggccggttcgctggtgaaaaacgatgaagataaaaaagagacgatccgcctgtggcaggatgtgcgggcatttttgaataaagaattcccggaagcggcgctggtatccgagtggggaaaaccggaggtggcactggaagcgggatttgatatggacttttatctgcattttggagataccggttatatggatctgttccggggagatcatccttattttggtggagatccggagagtgatatctctgtatttgcagggatctttgcaaaaaatcaggagaatctgcgggggaaaggcatgatgtgtatgccaagcggcaatcacgatatggcccggatctcttatcagctggatgaagagcagatgcgtctggcctatggatttatctatggttttccgggagcaccgttcttatattatggcgatgagatcgggatgcgttatatcccggatatgatctctgtggaaggcggttacgagcgtaccggttcgagaaccccgatgcagtggtcgaagggagtcaacggagatttttccagtgcaccgtcccggatgttatatatggcgatggatccggacaccgaccgtccggacgcggaaagccagatggcgcaggaagacagcttatatcactggatccagcggctgatcgtactcagaaaagcgtatccctgctttggaaatgacgggtatgcggaatttgtcaaagcggaaaaaggatgctctccgatcgtgttaaaaagagaaaaagaaggaagctgcggatacgtggtgctgaatccgttcgatcagccactttttgttgaagacttcggcatcgatcagaccgaacagctgatctgccgtggaggggcaccgaaaaagacagaagatcatcagctggagatcgctgcaaagagcatggcctggctgcttgtaaaataaaaggaggaatgaaatatgccacagatgcactgtaattttttttcctactccctgggacacggagtagatcttacgatcaccctgccgggggtaagtccctgtgatatggatgatccggctttattaacacatcagatgccggaaaaattcccggtgttatacctcttacacggccatggaaatgattatctttcctgggagcgttttacctgcgtcagccgttatgcggaagagtaccggatcgcagtagtctcggtatcggtaggaaataccctgtacatggataccatctacggagaaaaatactatgaatttatcggaaaagaggttccggaattcgtgaaggcatatttcccggtcacagaccggccggaacacacgtatattgctggtgcgtccatgggcggctacggagcacttgtccatgcgatgaaagataccgagcagtatcgtgcggtcggtgctttttcaccggcaacggtatgggcgaaagatctggaagaaaaagtaggccataagttcccggaaccgatggatctgtaccagatcatccgtgacgatgtggatgcgggtaagaagctgccggatatcttcttctgtgtgggaaacaacgatttcctgattgaatcggtggaccgttttgaagaatatctgaatgaattaaagatcgaccaccgctttgaccgggtggatggttatgaacatgaatggagattctgggagctggaactgccggaattcctggactggctgccgcggaccgacagttacgcgaaaatgggtaaacataagatgtaaaggataccaggggaacaatccggtatcatatgacaggaggaactttcatgaattttgatgtattcgagaaaaaagcaaaggaactgggtgttctgggaatcgttgtgacgaaagacggaaaagaaatcggcaagaaactgtgggatgagcagtgcagaagaaatgtatattctgcaagtaaaagtttcacttccacagctgtgggaatcgcagtaaaagaaggtctgctatccctggatgaaaaactggtggactgttttgacgaagatcttccggaaactgtcagtgagaaccttgcaaaggctacggtaaaagaccttctgaccatgtgcctcggacaggaaaaagcggaactgatgggtgcacagcgcccggtttatgaggaagaggactgggtgaagatgagtcttgccctcccgtttgtctacgagccgggaacaaagtttgtatacaataacgtaggtccgtatcttgcaggtgttctggtagaacggagagccggatgtgatctggtatcctacctgtatccgcgactgttcaaaccgctgggcattgcccgtccgacctgggaactggatccatatggtcatgtcttcggtgccggcggacttttcctgacaatggatgaactccacaaactgggacttctctatctgcagaacggaaactggaacggaaaacaactggtaccggaaagctgggtaaaagcagctaccagcaaacaggttgaaaatgatgcagacagcttcggttacggttatctgttctggggcggcagagaaaacaccttccgcgccgacggaaaatactgccagtggtccatcatcagtcgcgagaaaaacgcagtcatcaccgttgtcgcagaatgccgcagaagcccggaactgatggatgcggtgtttacggaggtatttccgcaggtgtaaacggatagatatggaaaatgaaaggaagcaggaaaacggatagcgttttttgcttccttttgaatatataatagaaaatagaatattgcgtagctttaaaaatgcagttatgataacaaaatggtagtatccacagattcttttcagacaaacaaaaatatctaatcaacatatctagatcacatatctaatactcaaagtcctgagaaaagagaaaatatccgatgtatgagtaaatgaatatagaacataatacggatgtttttttatagagtttgaaagaaagttgtttcttaaacaaaagacattcgccctgaagaaaagtgtgatactataaaagaaaggcaaggggaaaactccggaagagattgcggatatg

SEQ ID NO: 2475 - DNA, 23150 bp, Unknown
  gut microbiota DNA sequence
aaaagaagcattattgcatggcacagagcagttttttatggatgacacaagtagaaatggcgaagcccattatgggatgggactattttttgcaaaaactgtggctgaaaaatatggtggaggtattaaactttcaaattctgaaaatacaggtggggcgagggtagaaatatttttcctgagtagtcaggaaacaagctaaatagaccgcaattaagctatgtaaaagaaattttacatgcttttatctaatatgtaaaagccttttgatagacattactactacgtttgctgtaatctcatggaagaaggaggcatacagaattatgatagctgataaaattaaaaatgctcgtactattctttattacataactatcattatagttgggattatatgcacatgcttcttgtcgttggctacatcatattaaaacgctttttacgttaaaaaagtgctgtggtatagcagacatgaagaacaacatcgaagacctgaatggatggctgtatagaaggatacggatgtgtatctggaaacagtggaaactgccgaagatccgaaaacggaagctgataggactgggaatgccggaatgggtagcctgtgaaggagactacagccgaaaagcttattggagaatgtcaaacgtaggtgtggtcaaaagagccctaacaaaagaaagactgataaactggggcttttatgatttagccacagcctatcagtcaatgcacgtcaactattgaaaccgacgtgtaccgaacggcacgcacggtggtgtgagaggacggcggttagtcaccgcctcctactcgattagacatctatttatttgtgctgtctgcatcaaccacagactgaatctgcttcataagggtatcatagttgtcctggttatcaattccgccgagcattggttcgcctacaatattgccatttctgtcaacaagtatagttgttggaaatgccatgatctctgaggcatatttaccggctgcactggaggagtcaattgacagattacgatatttgacaccctggctttcaagaacagaggcagcctctttgatagctgtcttatttccgtcgaaggtctcagtgttgatgccaaccacttcaccgcccattgatttgatagcatcatttaattcgttaagcttagataactcagcgacacatggtttgcagccggtaaaccagaaattgacgactgttactgcattaccggaaaacaggctgtcatccaccttattgccatcaaaatcctcaccggaaaaatcactgaatacagatgaggattttgagctgttcttctggttgtcgtctgatgatgtgcttttgctttcaagctctgctatctgttcctcgatttttcgtatggtttcaatatcctcattaagagttttaagctcatcgtctgtaaatgaatccttgtttgattctatggtaccggcgagataatcggcataatttccgtttgaatcggcgtcacttttactcatcatgccaaataccttgttccacgcatcagagtgatctgcaaaaagctgattttcctgctgatataaatcatcaagcgtggaatctgatttgtcggatgcttctgagccggcttcagtctgagtgctcttagaagctgtgttggaagctgtgttggaagcttgctttccgccgcatgctgtaagtgataatgccatgcagagtgtaaaaatagaaataaatgataatttgtttttcatgagtaatttctccttttaaaataatagtaaaatgtttaatagttatctgttgtcatttttttgacatgattttcccataaaccggtagcagatggcatccttcggacaggcctttatgcaggcaccgcagcgtatgcactcggggtgatctggtgtcttacacacatctacatccatcttacatgcctttgagcattgaccgcatccgacacatttgctgttatcaacagtgattttgagaaggctgaccttattaaataatgagtagattgctccaagaggacaaatccatttacagaaaggtctgtaaaataaaatacttagcacagtcactgtaattaaaatgatgcatttgaaagaaaaaagctttcctaacgccgaacggatagcagcatttccaatagataacggtatagcaccctctaaaacaccctgaggacagatgtatttgcagaagaacgggtctcccattcctatagagttcgttacaagcatcggaagaagtataacgaaaacaataagaatgacatattttaggtacctaagaggctttagtttggctgtggataatttcttcccgggtattttgtgaagtaaatcctgaaaccatccaaatgggcacaaaaaaccacatataaatctgccgagagttacaccgagtaaaataagaaatccggttatgtagtatgaaaacttaaattttgatgatccgacgactgcctgaaatgcccctattggacaggctcctgtcgcggcagggcaggagtagcagtttaatccggggacgcatactgtttttgcattgccctgatatattttacccttaaataaattcggaatgtgaatattggtcagcagcgttgctgcggcctgtatccatccacgtatttttgccagctttcttgatagtgatttcttttccttatccaattccgacacactccagacatagttttattgctttaccaagcacggcagccgcctcacctctgactgcaccatagcttaccatggatacaccaaggataagcagaatgatttgacatgttttttggtatttcaacataatattgctcctttttgttgtattgttgaccagctgactttagtattatacaatataggttgtaaaattattgttaagaagcaggagaaaattttgagaatattaattgttgaggatgagaaacaaatatgtgatatggttgcaaagagtctgtatgctgccggttatgaggtggataccagttatgatgggaacgaggctcttgaaagtatactgtcggagaattatgatctgatagtgttggatttgaatctgccggggatggatgggatggagcttcttaaggagcttagaaaatacaatgatgaaactaaggttttgatattatccgcaagaggtcagattgctgataaggtagaaggattggatgcaggagcaaatgattatatggaaaagccattccatctgcaggagcttgaagcacgtatcagaagcctgacaagaaggaaatttgtacagaatgatatatgtcttacatgcggagaaataaagtttgatacgattaaacgcgaggcatatgcaaagggagagccggtttcactgacaagaaaagagaacggtattttggaatatttacttattaatataggcagaccggtaagccaggaggagctgatagagcatgtgtgggatgctgcggcagacagttttagcggagcggtcagggtacatatgtcttcacttagaaaaaagcttaaggcgaagctgggctatgatcccattctgaacaaggtaggcgaaggctataaaatacgggaggagtctggcaaatgaaaaaaatgtcgttgcagtggagacttacgtgtataactacattgtgcattgccattatatgtggctgcctgactatgtttgtctataaaaatggtgtgcattacattgattcgctgcaggatgcggtagagtcacagggggatgaaaaaggaaacaaatcagatgaaatatatatcagcataccggacgataagtgggatgagtttacggatgaattttcggttcaggtgtacaataataaggccgactataaaagaaacagtctgataatcacggttttgctggcgcttttgggaggcgtcgtcacttattttataagcgggcatgcactcagaccaatcaggaagttttcagataaaatcgaagaggtacaggctcagaatctgtctgattcaagaatagaggaaaacaatgttaaggaactgaaccagcttggcatttcttataataagatgcttgagcgtctgtcggatgcatttgagatacagagacagtttactgcaaatgcagcacatgagctgcgaactccattagcgttaatgcaggtgcagcttgatttatataattctgcctctcacccgggaaatgatgcagacactttgcagaccataaaaatggttacggaacaaaatgataaattaaacaggatggtaaagactcttcttgatatgagtgagcttcagacggtgggaagggatgataaaattatattggatgctattgttgaagaggttttggcagaccttgaacctcttgcacaggaaaaaaatataaagctgattggaaaatgtgaggatgccactatgataggcagtgatatacttatttacaggcttgtatacaatttggttgaaaatgccatcaaatataatcatccgctcggacaggttaccgtaaccgcatatcagagaaaaaagcatgtttatctgtctgtagaagatacgggaaacggaataccaaaggagcttagggagagagtgttcgaaccgttcttccgtgtggataaatccagaagccgggagctgggcggcgtagggctaggacttgctcttgtccgtgaaatcgttagagtacatgatggcagtatttgtattaaatcaggcaagactggaggaacgattttcgaggtgacttttgcacagtgttcaatgtagcgtttgaacctgaagtaaaagaacaggcagaacaggaaaacgaatagaatgagcaaatatgattcgctatgggaatatgtgagagataatggtaattcatctttaaagatgacatttgaacaaattcaacagattacaggaataccaatcgaccattctttttttgaagtataaaaaagagcttacggaatatgggtataaggttgagaaaatatctatgattctcagtgagaacttgaaaacctgataaaaaacatatacaatcccatcttcggcagttgaagagtaaaaaaacggttgcaaagccggtgcgggattttgatatcgagtaccggctttattgaggcagcggaaaatccgttgcctccttttgatataacgataattaattaatccagttcagcccccaactcatacatccaatactccgatgcctcatactctctgggttctgagagtaccggtacggtaaagagttcaattagaacaccgagtgttgatgcgaagagtttcataagatcctgaagttcaaatacaacataaaattcttcttgtgtcatgtaatagttcctcctttgttttgtgatagttatcgttcaaaatcttatgtaactattcagtaacacgcttcgtgcggtatgtctcggtttttctgtgaccttcgctcaccaaaaacaccttgtgggatatatcagtgaatagtagcctttatacaacagttgacaacagtactatgctgttatatactgtttacaacaggggggaatatatgaagattataatcaataacacatcgatggtaccaatttatgaacagatcatggagcagatcaaggcgcagattatctccggacaattaaaagaaaatgatatattgccatctgtgagaacgatggcaaaggagctgaagatcagtgcacttactgtgaagaaggcatatgacaatctggaagcagagggaatgactgtcacagttcatggaaaaggaacgtatgtagcggcttcgaacatacagctgatggaagaagagcgcaggaaagaagttgaggcggatctggaagcggcgattcagaagggaaggcgctgcggaatgaaaggggaagagatccgttcattgtttgaactcatcatggaggatgaataagtatgttagaaatcaaaggagtaaagaaaagctacggagaatttcagttagactgttcgttaaatgtagaaaagggaagaattaccggtctggttggagagaacggggccggcaaaagtactctgtttaaggcagtgctcggactcatttcatatgatgccggcgagataaagattctgggaaaaacacaggaagagttaagtgaaaaagagaaagaaaagctgggagtcgtcctggcagaagccggattcaccggatatttgaaaggaaaagatgttgaagcagtccttgccagattgtatccaaagtttgaagcagaaaaattccatcagatgtgtgaagaatatcagattccgttgaataaatttataaaagagtactcaacaggaatgaaggcaaagctgaatctgatcattgcattgacacatcaggcagaattcctgatgctggacgagccgacagcagggcttgatgtcggagcgagggaagggatgctggatattttaagagcgtatatggaagagaagccggagagaagtatcctgatcagctcacatatttcttcggatctggaacatctctgtgatgatatttatgtgatccacaaaggaaagattgtgctccacgaagagatggatacgattctggaaaaatatgcagtgttgaaagtcagtgaagaacagtatcgggcaatggataaaaggtatcttttaaaagagagaaaagagttttttggaatctcctgtcttacgaacgagaagcagtattatatagaaaattatccggaaatcgtagtggagagcggatcactcgatcaggtgattcttatgttaacaggaggcgagagatgatgaaaggaatcagagggcttttggaaaaggatgttcggttgtttcttcggcaaggtggcaatctttttctggtattagcagttgtagcaatcttttttatactcacgggaaaaatgggagctgacttcattgcagtgtatattccatctgttatggcagtatattcaggtaatacgatcagttacgatgaaaatggtcatggatacacatatttgttttctttacccgtaaataaaaaaatatatgtcagagaaaaatatattttatcttttattatgacagtatgtggatggtgtatgggggcaatctgtgcaggaattgccgtgctcataaatcctgaagaggtggtaaatccggaaatgctggcaatggagctgatcgtattttttgtggttcaggcagttgcgggaattatgattgcgatccgactaaggtgtgaaggagagaagggacgaatcgtgctgccgatcgcaattttaattatttttgcaatttgttatacaattggttcttttctgaaggctaacctggaattaaaagaaagcattctgaatgtgataggaggaacaggagatcttgaaattgcgattgcacttattgtgttaagtctgcttgtatggtatgcttcgtataggtatagtatgagagtgatgagaaagaaagagttttgagatagaaattggcaaaaacgaaaaaaacattgaccataaataccaatggaaggtgtccttttatgaaggaaaaagatacttttgtaacagatggaatctttggaaatgagtatccggagcagttttgccaaatgacatggcaagttatataaaatcgtgttacaatggcttttgtcaagctacctgggactatggaaaataatgagaaaatgagagaaaaacaggtagcatagaatctgcggacattaaataaaaaacaaaggaaagtggggggattttttgaatgcagagagcaaaacacgaatgacggagggaagcatctccaggaaaatcatattttttgcgattccgctgtttatcggaaatctgtttcaacagttgtataatacagcagactctctgatcgttggcaattttcttggcagtaatgccctggcggcggtcagttcctcgggaaatctgatctttctgatggtcgggttcatcaacggaatcgcgctgggtgcaggcgttgttatcgcgaggtattatggggcgaaaaataaggaatatttacagaaagcgatccacacgacagtagcgtttgggctggcggcaggtcttgcattgacagcgatcgggatgtttctggcgccaaagattctggtgctgatgggaacaccgtcggaggtgcttcctcagtcgatcgaatatttccgtacttattttgcgggttctcttgggtttgtcatgtacaatatttttgtcggcatcttacagtcggtcggtgacagccggcatccgctgatctatctgatcgtgtcctcgtgtatcaatgtggtgctggatattttctttatcgcaggcctcggcatgggagtcggggcagcggcgctggcaacggcgatttcccagtttgccagtgcgattttctgtatgattcacttgatgcggacaaaagaagaatatcggttacagatcagcaagatcggttttgacgggctcatgatgaaacagatcattcagaatggtgtgccgtccggttttcagaactccgtgatttctatcgccaatgttttcgtacagaccaatatcaatgcttttggaaaaatggcgatggcaggctgcggttcttattcaaagattgagggctttgcatttttgccggttacatgctttacgatggcgctgacaacctttgtcagtcagaatcttggtgcgaagcagtacgaccgtgcgaaaaaaggtgcgcggtttggcatcctgtgttccatagtgatcgcggaactgatcggtgttctgatctatgtggcggctccgacgctgatcgctgcatttaacggagatccggaggtggtacattatggagtgatgcaggcgcggacgattgcgctgttctattttctgctggcgttttctcactgtattgcagcagtccttcgtggctccggtcatgcagcagttccgatgatcgtcatgctctgcgtctggtgtatgttccgtgtcagctatattactgttgctgtgcattacattccggatatccgtgtgatcttctgggcatacccgctgacctggagcatcagctcagtgattttcctgtatctgtttttacgtggaaaatgggtatatggattcgagaaaaaaagataaaacagatagttttaccacaggtactataattttcagaattgaggaagaatgttcgtatgctaaataaaaaagaattcttaaaatacgcatcaagattagcctttccgattatgatccagaatctgatcggaacactggtaaatatggcagatacagtgatgcttggatatgtgagtcagacggctatgtcggcatcctcccttgccaatcagtttacatttattcttttctgtttatattacggtatggcagcgggaacatcggttttatgtgcccagtactggggaaaaggtgataaaaagacagtagaaaagatacttggtctggcggaacgaatctcactgattgtttctgctgtattctttgccgtctcctttgccatgccgactactattatgaagatttttaccaacagtccggagacgattgcttccggtggtgaatatctgagggtgatttccttctcgtttgtatttatgggattctctcaggtttttatgagtgcccttcgaagcatcgggaagatcatgctgccttctgttacgtatgtagtttctctttgcgtcaatgtaatctgtaatgccacttttatctttggtttgtttggacttccgaagctgggtgttaccggagttgctcttggtacggtgattgccagaatcgtagaggtagtgatctgtctcgtttactcgttacatagttccgatgtcagattccggataaaatacttctttgccaaagcaggtgttctgttccaggattttatgaagatcgcaacgccggctgtgatcaatgatgttgtctggagcctggccacttcagcatttgcagcgatccttggtcatatcggcgatgatatggttgcggcaaatgcagttgctgtcatggtggtaaatattggtgccatcgcctgtcgtggcttctccaatgcaactacgatcattgtcagtcaggagctgggcaaaaacggtgttgacacagccagagaatacggaaaacgcatgctcaggatcacaattgttgtcagcctgatcggatgtggtgttattctggcgattcgaccagtgatactgaatttctatcgtgacaaactgacagagaccgccatctattatcttggtgtctttatcattatgacaacctggcgtcttatgggggaaagcatcaatacctgcctgatatgcggctgcttcagaggtggcggtgataccagatttggaatgatcacggatacgatatttatgtggcttgttgcagttccccttacttacctggcagcatatgtattcaagctgccgccgatctgggtatactttgtaatgaccctggatgaattcgagaaaatgccggtggtattcgttcattatatcagaggaaaatggcttacgaatattaccagagatttcgagtgatcagggaacggaatcattatataaaaggaacagtacaatgaaaacgggctgaatggcatcttctgctattcagcccgttgcttatgtatcgttttaaaaaattttgtggaaccaggggcatgtttcaggaaaggatgttatccatgagctgcgatttattcgattctttcctcgtctgcccccgttggcttcttaaagtggccgacaattatttgtacaagaaccctgcctccgataaatgtaagaagaaggcctgccggaattcctatacaggccagaaggaacgttaaagggtcgtcgtcacctttcattttgtatttgcctcttggtgtcagataaacttcgacatttttttcttcgcctatgctgacttcccggtagtaggtacgtttccctgtatattttattccatccacttcatacgaaagcttcgtcacatactcgtcgtaatcgtcatattcgtcgtccgaactctttatgtcataatcgataacacgggctgtgaccgttcgaacatccgctgatttcttatattctatgctggatacaattctgttaacactccataaaaacaaccctacaactgcaaacaggaataaaagacctattagtacctcacctataaagtgtcctgttttcctcgatttgtttttcatacacaatccccctctcagcttacataatcctgtagtacaccgttatctatgattatattaccggaaaaacagaaaagctgcactatcacttgtgtcaggataatttttccgcgccatctgaaaatttatagagtcctatttatgaaataactaaaaatttcaataacttatcaaaaaaaattctattttttttcaagactcttgtgattataatgaattcatcagccgggaacgaagcaaatccggcaaaatcaccaaacaggaaaacgggaggaacaaaaatgaaaagaaaagcattagcagcaattatggcggcagctatggcattatccatggttggctgtggcggatccacatcagagtccacagactctacaaaaacaacagaaaaaacagaagcaacagaagcaacagattctgctgcatcagcagacggaactgtagaaaacaaagataaacctctgtgctggttcaaccgtcagccatccagcagtgctaccggcgaactggacaaagaagctctgaacttcaacgaaaatacttattacgtaggtttcgatgcaaaccagggtgctgaactgcagggagagatggttctggattacatcaaagaaaatgcagacactatcgacagaaacggtgacggcgtgatcggttacgttctggcaatcggtgatatcggacataacgattctatcgctcgtacacgtggtgttcgttctgcactgggaacaggtgtggaagcagacggcggagtagattccacaccggctggaacaaacgtagatggaaaagcaaaaatggtacaggatgcaactctggaagtaaatggaaaaacatatacgatccgtgagctggcttctcaggaaatgaaaaactcagcaggtgcaacatgggatgctgcaacagccggtaatgcgatcggaacatggacagcttccttcggtgaccagatcgatgttgtagtttccaacaacgatggtatgggaatgtcaatgttcaatgcatgggcgaaagacaacaaagttcctaccttcggttacgatgcaaacagcgatgctgtagcagcaatcggtgaaggatacggcggaacaatttctcagcatgcagacgttcaggcttatctgacactgagagttctgcgtaacgcactggacggtgtagacatcgatacaggtatcggtacagctgatgaagcaggtaactgcctgacagaaggtgaagattacagatacagcgaagaagatagatcttactacgcattaaatattgctgtaacagccgataactacaacgatttcacagattccacaaaggtttatgacaaagttgctaaccagctggatgaaagcaagagcccatccaaaaaagtatggctggatatctacaatgcatctgataacttcctgagttctacataccagccactgctggagaactatgatgatctgctgaacctgaacgtagattacatcggtggagatggacagacagagtccaatatcaccaaccgtcttggaaacccaagcgagtatgatgctttcgcaattaacatggttaagaccgataatgcagcagcatacacatcacttctctccaaataattcagagacagaataaaagcgtaaattgatgaaattacagaggggtgtcagcgatgatacccttctttactaagaaaaggaagcgcagctatgaaagaagataagaacaaatatatcttatcgattaacggcatgagcaaatcattcggtagaaataaggttttgaaacatattagtatgaatgtcaaacctggaaccattatgggactgatgggtgaaaacggtgccggaaaatcgacaatgatgaaatgcctctttggaacctatcagaaagatgaaggaaccatcgtactggacggaaaagaagtaaacttctccggaccaaaggatgcactggagaacggggtggcaatggtacaccaggagttgaaccagtgtcttgaaagaagtgttgtagacaatatgttccttggaagatacccgaagaattccgttggggttgtcgacgaaggaagaatgaaaaaagaaacatcagacctgttcagaaagctgggaatcacagttgatctgacacagccaatgaagaaaatgtctgtatctcagagacagatgtgtgagattgccaaagcaatttcttatcattccaaagtcatcgtactggatgagcctacctcatctctgactgcaccggaggttgaaaaactttttaagatgatgcgtcagctgaaggctcagggaatttctctgatttacatttcacataaaatggatgaaatatttgaaatctgtgatgaaatatcagtactgcgagacggaagtctggttatgaccaagccgagtacagaaacagatatgaatgaactgatcgccgccatggttggacgttctctggataacagatttccacctgtagacaatacaccgggagaaactattctctcggtacagaatatatcaacaaaatatgcaccaaaactgcagaacatctctttcgatatcaaaaaaggagaaatcttcggattttatggtctggttggtgccggtcgtaccgaacttctggagacgatcttcggaattcgtacaagagcagaaggaaatatcatatatgacggaaagatgctgaacttttcctctccgaaagatgctatggatcacggatttgcgctgatcacagaggaaagaaaagcgaatggtctgttcctgaagggtgatattacattcaatactaccattgcgaatatgaatcattataagagcggaatcgcattatcacatgataagatggtacgtgcaacagctgaagaaatcaagatcatgcatacaaaatgtatgggaccggatgatatgatcgccaatctttccggtggtaatcagcagaaagtcatcttcggtaaatggctggagcgttcaccaagcgtattcatgatggatgatccgacacgaggaattgacgtcggagcaaaatatgaaatctatgaactgatcatcaatatggcgaaacagggaaaaacaatcatcgttgtttcttccgagatgccggaaattcttggtattaccaaccgaatcggtgttatgtctaacggacgccttgccggaatcgtaaacacaaaagaaacaaaccaggaagaattattgagactcagtgctaaatatctgtaacaggagggaaattggaaatggcagaaaacagcgttattatttcggctgaagaagaagcaaaacttttgaaaccgatcgatgaatatgtggaaaagatccagaaaaaaatcgatgcattacgcgtagacggatctgataaagtgaacgatctgaaaaaccagatcgctatcgcaaaagaaaataagaacttatccaaaatccagagagataagattattgaaaacagtaaaaaagagctggaaagtgcaaaaaaagtagaaacagccaacaaagaagaaatcaaaaagctggttgcagaagctgaggactatctggcgaaacactacaagaaagattactacgatgtagtaaacaacagctgcaaagctgcaaaagcagaagaaaacagcagatatgagaaagtcaaagcagatctgaagagcgagcaccagaaaaagattgcttctctgaaagatgcagaagatatcaaggctgagaaatatgtgttcaaaaacaaactgtttgacgcacagatggctcacgaatccaaaattcaggagatcaaagacagaagacatgatgcattcatgcataaatatcatctgatcgatctgctgagaacctccaagttcacattccttcagcagagagaacagaaactggaaaattacagatattccttcaatttatcccagttcctgtacaaaaatggtctgtatatcgtaatcatcctgatctttatcggactgtgtatcatcacaccaatcgtcaaaaatacacagctgctgacagttaccaacatcctgaatatcttacagcaggcatcgccgcgtatgttccttgcacttggtgttgccggtctgatcctgttaacaggtaccgacctttccgtaggacgtatggttggtatgggtatggttacggcaaccattatcatgcataacggaatcaatacaggtgccgtattcggacaggtatttgatttctctaccatgccttccacagcgaaagcactgttcgcactgttgatgtgtgtaatctttacaactgtattttccatgattgccggtttcttcatggcaagattcaagatgcatccgtttatctctacaatggctaacatgctgattattttcggtctggtaacttatgctaccaagggtgtatctttcggtgcgattgattctgcaatcccgaacacctttattccgcagatcggcaaattcccgaccatcattctgtgggcagttgcagcagttatcattgtatggtttatctggaacaaaacaacatttggcaaaaacctgtatgctgtaggtggaaacccggaagcagcagcagtatccggtatctctgtatttaaagtaactatgggagcatttattctggcaggtatcctgtacggatttggttcctggctggaatgtaaccgtatggttggttccggtagtgcagcttatggacagggatgggatatggatgctatcgcagcctgtgtagttggtggtgtatcctttaccggtggtatcggtaagatctccggagtagtaaccggtgtattgatctttacatctctgacatactccctgactattctgggtattgatacaaaccttcagttcatcttcgaaggtatcatcattctggcagctgtaacacttgactgtctgaaatatgtacagaaaaaataataaaatatattgaaacagacagaatataagacagcccggtcatccgatggatgacatgggcggtcttttattctgttttggcaaatttgtaactattcagagccatgcgaaatggaagaaaaattgcgaatcatgtttacatgaatgagctatttttctgaaatttcatatggcgagaagcaacatcgagatgcagcgtaagcggaatcgagatggggctctgaatagttacaaaatttttgtaactattcattcagcagagagcaatcttctgctataatgaaagaacaataatatgctccggaaaacaggaggataaggatggaacaatataaagtgattcttgtcgatgatgaagtagaggtcatcgatgttatgaaaaaaaagatccgttggaatgatctgggatttgacgtagtgggaagtgccaccaacggcgtgaaggctttggagctggtggaaaaacttcagccggatgtggtactgacggacattaaaatgccttacatggatggactggagctggcaagaaaactgaaccgggactatcccaatatttatattatgctttgcaccggctttgacgaatttgaatatgcgaaagaggccgtccatctggagatcaaggaatatatgctgaaacccatcagcgccaccgagctgtcagaaagcctgatgaagctgaaaaccacactggacagggaacgggaagaaaagttaaatgtaaaaaaactggaagactatttccaggaggtattaccaaagctgcagtccaatttctttatttccctgatcgaggggagagtcagagaagaggagtatgaacgatttcttttggactatcgggtggatatgaagggacctttgttttgctgcatcatttttcatacgtcggaaaatgatgtgccggatggcatgaatcccttattgttatccatgtccgtggagcgggagatcaaacagcggctgatggagaactgtaattgccaggaattcatctatatgggtaataccattctgattatggaacttcattcagaagatgagatagctcaattgacggacaagtgtgaccggttctgccgctgggcatggagaattatgggggcggcggttaccgcagggatcggaaccgtctgcaacaatctgtacgatatcagtatttcctacgaaggagccagagaggcggtatcctaccgtgtcctgtacggaacgaaacgatccatcaatatcgcagagatcgttcccaaagagtcaaaaaaggcggttcccttagaagaaacaaggatgcaggagctgtttcgtgccatccatgtaggggatcaggagaagatccggaaagaagccatcaaagagacagaaaagctccataagaatgcagccaccatcagccagtacaatctggctaccatggagattgtcagcggatttttcaaattctgtgccaataattccatggatctcaatgaaatttccggaaatgtacagaacctttatgaaagagtgactcagttggatgaaagttctatgagaaactggatcatcaatatgtctatggctatcagtgaaaaactgagaagcaccagatacagtacctcaagacggatcatcaccgatgcgcagaacatcgtaaaagacagatatatggaatcggcgctttctctggatgatgtgtgcgcagatcttggtgtgtccaattcttacttttcgtccatttttaaaaaggaaaccggtcagtccttcgtctcctatcttaccgattaccgaatggacagagcagaagaaatggtgctgaacaccgatgaaaaaagctataagatcgcagaaaaagtgggatatcaggatgccaactatttcagttatgtattcaaaaagaagttcggtgtttctccttccaaatacagagcttccgggaaacaacaaagcgaaaagcagaaagaatgaagacataaaaaaggtacgaaatatatagagacaagggaatagatgaagaggaacatgtatgaaatataggaaaagagggttggattcccggaaaaatatcgtatttaacatacagtcgatcattctgtctgtccttatggcgatttcgctggttacgatcattgtaatgggattgttgctttaccatcgattcaagctggcattggaaaagacagcagtggacaacacggaagctaccgtggaggctaccgtggaccggttaaatgcagacctgctggatatccgccagatcctcaatggggcaaactataacgtagtccagcagtttgatatatccagccgggaattttcggagcagttcagtctgctctatgagaccaactctgataagattcagagtgtggcgctgtatgatcaaaaaggaaatctgatcgcatcggagccggtggcagcagaaaagaaaaatgtaagggtacagacgcaggaatggtttaaaaatgcggaagatgtcattgaaaatatacatttttccacaccgcatatccaggaactgtttgaggatggatcctatcggtatcaatgggtagtttccctgagcaggtatgtagatgttaacaagggagagataccggaaaccggtatccttttgctggatatgaaatattctgtgatcagggacgtaatgaaacagatcaatgattgctccggcggaatctactattatttgatcagtcaggacggagagatgatctatcatccaagaggaacggaattaaaccgcggattatttgaagaaaatagcctggaagcggaaaaatatgaggacggaacctatgagatccgttctaatggtcagaatgagaccgtgatcgttagaagcgtagcctatacaggctggaagatgatcggtgttgtgccggagagcgtacaggtggcaaactataagaactttcgctactatgtatttgccaccattttggtacttctggtcatgctcttggagggaaaccagcttgtgtcccgaaagatatccaagcctatccgggagctggatgcttctgtcaagacctatgaggcaggaggaaagccggatatctatatcggcggctcatccgagatccgccatctgggacattcggtacagaagtcttatgagcagatcgaagaactgatggatgagatcatccaacagcaaaatgaacgaagaaaaagcgaactggacgccctgcaaagccagatcaatccacattttctgtacaatacactggagtccatcacatggatggtggaggcccaggaaaatgaagcagcggttcgcatgatctctgaactggccaaattacttcgtgtcagcctgtcccggggcaagaccatcattcccatcaaggatgaactgcagcatagcagaagctatatgaatattcagctggccaggtataaagagcggttcaaaacagaattccggattgataaagagatcgaaaattactgcatcgttaagttggtgattcagcccatcctggagaatgccatttattatggtgtcggcaacatggatgaggatgatgacggtatgatcattgtcaccggagaaaagagggacgaggacatcctgatcactatcgaagacaatggcatgggcatgcgggaagaagttctggaaaatattctgacggatagcagcaaggttccgaagcatggctccggtgtgggtgtgatcaatgtacattccagaatccggttgatgtttggggaagaatatggacttttcatagaaagcgaaccggacgaaggaacaaaagtcacgattcgtatccctgcaatcccatacacgccggaaaatgcagaaacactggaattacaaaaatatatacagaggagacaggcagatgaaaaagaatagaataaaatttcttatgattgagtttcttttgctgatgctggcagtattctttgtatggaagattttcgatcagaacgtagcagagaccaggatcgctgtgattcttccggaatccggtgacaaacgctgggatgccctgatcaatggtatgaaacagtctgcagcagagaacaacgtccatatgatcatctgtaacacggaagagatcgacggaccggaggtggaaagggaatttatcagagaacagaaggacaacgacatcgatggctttattatatatcccgcacctggtcatgagaccgaaaatatgctgaaaaaagaatgtggaaataaaccctatttactgatcgcagacagtctggcggtaaaagaaggagaaactgcaagtcccacgatccagccggatcatcgggaaatcggaagacggctgggagaacagctgaaaacaaaaaagcagaagatcggaatcatagccgactggaaaatgtccgaggctgtacaggcggagatcagcggattgactgaggcgctggaaggcagcggaagtgagatcagttggtgtatttaccggagaaaagagcagaacattacggagcggatgaaggaggaaacaaaggcggatgcccttgtcatactggatcccggggtactggaagagttcggagaacaggcagaacatgggaaatacaagggtgcggaactctatggagtaggttacaatctgaagacagtcgcgcttttggataaaggaaacatccagggccttgttgtgccggacggatatgagatcggctataaaagtgtgaaagaaatagccggaaagatagaacataagttttataaaatgaaaggttacacaacagaatatcagatattcagtaagaaagatttctctatggatgatgatttagaaaggtttttatattcctatgaataaaaagaaaagaaggctggcagtagtattagctactgttacagggagtgcggtgctcgtgctgtccgggtgttccgggaagtcagaacagacagaggaaaccctgcgggtcggagtgataacctacagtcaggatgacccctttatcaatggactgaccgatgagctgaaagtacagctgaaagccatggaaaacaagcagcgacggattatcgtgtcgacaaagagtggaaatgacgatcaacaggaacagaatgaaaaggtagaagagatgatcgatgcaggctgtgatgtgctctgtatcaatcttgtggatcggacagctccgtccaggatcgtccggatggcaagaaacgaagatattccggtgatcttctttaaccgggaaccggtgagggaagacctgatgcagtgggaaaagctgtattatgtgggctgcgatgcagaacagtccgggattatgcagggggagatcgcagcagaatacatcaacagccatccggaagtagataaaaacgaggacggaaagattcaatacgtgcttctggaaggagaagcaggtcatcaggatgccatcagcaggacggagtattccgtaaagacattaatgaagaatgatgtcatactggaaaagctaagttatcagttagcggactggaaccgtggacaggcggagaaccgtatgaaccgtctgatcagccagtacggaaaagagatcgaactcgtcatatctaacaacgatgagatggcactgggggctgtggaagcctatcggacagtaggttatgcccgtgaagactggccggtgatcttcggaatcgatggtctggaagatgcactgaaagccgtaaaggcaggagagatgcagggcagcatcctcaatgacagagtagatcaggcaaaggaaatggcaaaaatggcggtgaaactgttcgagggagaggattttgatcaggaaaacctgaaagaagaccggtattatttttcagaatatcagaaggtagacagcagcaatatagatgaatatctgagtgcagaagaggcaattgcccactcagaaatgtaagcgggaagactgcatgtacagacagaaagaaaaagtggatgatgcatatccacttcacagaatgaggaaaaaacagatggaacatacatggaccaaagaattttatcaggaaacagatccggcgaaacggcagcagattttaaaggaacatatcggagaggaggaagcctgggaagaagaatacagaacccggctctggacagcccgatacggacagcgcaggctccagaaggatgagtttgtcagatgtctgatggaactgaaatatctggcggaaggaacctctctggatcccggtggcgacagaaggaagatgggagccaggatcctctccacgttgtgcctggcagaagccatgcagtcagagaagggataccagaagattcttgaggatgaactgtacaatgtattcctgaaatttattcaggtcagcagagggggcagaggatttacctctctggtattcggtatgggtcagttatctgaagaaggaatcgcaaaaaagatcgccgaacagatcagcgtgatcgcctttaaggcgcctcgcctgctccgcatggaaaaagaattcacactgctccgggaagccgccctccgggcatatcggcaggagtatccgaacagagagcattttttgaacaaatagtaacgagatgagtattctgtgttttcgggcaaggggatcgggttacgtttccggtaaaaaggaaagcgcatatgcaagagagtcgtcgagatgagatttcatcatctcgacggctttttcgattcgtaataaccgggtggctgatcggcgggattggttaccagataggaaaaatctaccgaaaatcatgacaattttaccagaaaatataacagctattaaatctcttagaacaggtgaaatctcaatcgaaatttaagtaacagactgtatagatgaaaagggaagtttttttacagcccctttttccattaaaaagtgtgggaaatgtctaggaaatcaaaattaataccaaaaaatgaataattttaaaaaagtgggaatagaataatgacagaaggcacagagtgtgataatatcagtctgtaaaatatattaccgaaaaataaaaataattctaaaagtgggaataggagatagtagtatgcagcttatcgtaagaaaagagtatttaaacgaactgattgaattgtatgggacaccggatataaaagtaattacgggcatcagacgaagcggtaaatcagtattgctgcaagagtttgtctcttatctgcagtcattagaggaagcggtaaatattgttatgataaaccttcaggaattagagtttgatcattt

SEQ ID NO: 2476 - DNA, 7850 bp, Unknown
  gut microbiota DNA sequence
ccattttcaaaccgatttaataatcgttctctgtcaaactcgtgctgaaaatctttaagatcttcctcaggtatggtcaatgcccatgcatctaccagactctgtaagcttgaattttccggcaaacctaattgttcattcagattatatttttttccattaactacctgatacatggaaccacgtacaatactctttgtgagattgatcacgcagtatccatcggcaatagcaaataccgactcttccaaaaaacgattattaataatatcctgactcatgtttatttatctccctgtaaattctctgatacagattatatccttatccaaatatatccgtcaacgaagagtttttacattgtagaatggaaatttacacgctcagcggtagtatatgtaggtgaaaaaacaggaacatttcataatttttcagctatatggcaagccaggaagtcgggagaatagcaattcagtaaatgtactgaaaaagagtggggtgagtggagatagttgacaatatggggatgtccttgctgttcagctatacatttcccactacctgggcatgttcagaactttcacctgcgagagcgcgagagtcttagttgcagttaatgcttagctcagctgtgcgttaccagcgggtgtctgattttctatgtgaggagccaaggttcgtccgttcgtccgttcacccatttactcccccacaaccttaatattcctgaccgccccaaaactctccggcggcctccggtccgtgagaatcaccccacgttccagcgaagcaaacgtcaccgaactcacattcccgaacttcgagtagtccgccagcacaaaaacctgtctggcctgttccactgccgtctgcttcaccagcgcttcactgtaatccggcgtgctgaacccggccttgagccccacaccgtttgtccccagaaacgccttcgaaaaatgcagcttttgcagactcagaatcgcctgattccccacaacagcctccgtcgtccctttcagctccccgccgatcagatacacacggtagccctgcgcagccagccgctgcgcgtgagaaaccgcattcgtcacaaaagtagcactcttctccttaatgaaatcaatcatctgccccgtcgtcgtccccgcatcgagatacacaaaatcatccctctcgatcaaagacgccgcataccgggcgatggctgtcttttcatccttgttgatctccgctttctgcgccaccgacggctccgctgtggtaaatccaccgtcagccgccactgcaccgccgaaaaccttgatcagtttccctgctttatcaagagctgccagatcccttcgtatcgtagactccgagatccccagcaattcctttatttctgttaccgtcacactgttcttttcatttaaaagattcaaaatgacttcatatcgtttttccgtcagcatactctctcctgatactttcgtaactgttcagtaccctcacagttacctattttctgtatctgtctccagaatgatcttacggatcggaagaatacttcccggtgataccgacagctcgtccacgcccatttccagaaattcttttgtcaggctggtgtccgctcccagttcaccgcagatacctgcccagatacctgctttgtgtgcattttccaccgtcatacggatcatggaaagcactgccggatgatgggcatcgtaaaacttatccagctttggattctgccggtcgattgccagcgtgtactgggtcagatcattggttccgatactgaagaaatccacctcttttgccagttccccgctcatcataaccgctgcaggagtctcgatcatgataccctgctgcggattgccgaattccagctgctctgcggtcagttctgccttcacttcttccacgatctctttgatccttttcacttcccacaggcttgtgatcatcgggtacatgatcgccagattaccgtaggcactcgcacgaaacagcgcgcgaagctgtgtcttgaagatttccgggcgtgtcaggcagatccggatcgcacgataaccaagcgccggattttcctctttatccattccgaaatactcacactgcttgtctgcgccgatatccagcgtacggatgatcacccgttttcccgccatcgtttccaccgctgtcttgtagatgctgaactgctcttcctccatcggataattgtccttttccaggtaaataaattcactccggaacagtccgattccgccggcatcattctgtattacagttgcaagatctttaatatttcctatattagcatacaacatgatcttctttccgtccagcgtaacattttctttgcccttcaaaagctgtaacagctctttcttctcctgctctgcctgctggcgtttctgcatctcttcgagtgtctgtgcatccggctccacgtagatctttccgttcagtccgtctaccaccgccagttttccgtctaccgtattgtcaagcggcagttcctccgttccgatcagtgccgggatcgccatggttcttgcgaggatcgcagtatgggaattgaccgaaccgtgaaccgtgacaaaagaaagtaccatatctttttccagctgcacggtttctgacggagccagatcatctgccacgatgatcaccggttcatccgtcacaacttttctcttctgaccgccatgtaatacggaaagcacacgctccgagatatctttgacatccgccgcgcgctctctcatataatcgtcatccatagcccggaacatctgtgcaaaattatcgccggtcacagctactgcatactccgcgttgaccttctgcgtctcgatgatattttccacagattcgttataatccccgtcatccagcatcatctggtggatctcaaagatcgccgcatttgcttcgcccacttcttttaacgctttctgatacagttcctgaagctgttctaccgctgctgccttggctgcctcataacgcgccagttctcctttggtatcttctgtccgaacccgctttacctgctgctcatttttcttgtatacactgatctttccgatggcgatgccgccaaatacactctttccactatatacctgcatcctgtgccccctcatacttttctctctcttactttctgtatcggtgactagtacatcgttttcaaaataactgtattattcacaaaacgatgtactagtgacttcctttttgttaccgtacttctgaagttacctgtctgtacacatcttccacctgttcacgaccggccagatattcggaaaatgcactggcgctgccggttgcaattcccatatggaaagcctcacggtaatcctgacgtttcagccatccggtcaggaatccggccaccatagaatctccggctcccacaccattgaccagttttcctttcggtgccggtgccaggtagacctttccgtcagctgcagccagaaccgctccttctcctgccatagataccagaacgttggtggctcccatctcctgcatcttcttcgcataaggaatcacagattctctgtcctttaattccacaccgaagatttctcccagttcgtgattgttcggttttaccaggaatggatgatattccagtacgttcaccagcagattccccgtggcatccactgcgatcagtattccttttccatccagacgtttcaggatatttctgtaaatgtcatccggcatcgatgccgggatgcttcctgccagtaccagaacatcgccttcctgtaactgatccagcatctcaaataactgctgtgtcttttccttgctgatcgccggtccctgtccgttgatctctgttccttcaatattctgcagcttcagattgatccgtgaaatcccctcgtccaccggaatgaatcttgcgttcactccgatctcttccacctgtctttgaatctcatctccggtaaatcctgccacaaatcccagtgcggtattttccagtcccagattcttcaatacgatagaaacgttgattccctttcctcccggaagcatcatttctgtggctgtccggttggtcatacccagctgaaagttattgacggaaacgatgtagtccagtgacggattaaacgttactgtataaatcatgttcttccctgccactcaaaatgtgttcaaatatactcaaacacatcgagaaattaaagtccttgcggatacttcttactgcttcgatgtgtatgctttggcgattgtaaacaatacgctactcacaagttcgtgtacactccacagtcgtaaattcctgcgatagcccgcagtacatacttacgtttgcgtttattatgcaacttcgtaagttaaagcatctcttagattaagagcagcattgaaatccctatcctcgacatagccacaattacaacggtatattctatctgaaagattcaaatctttcttgatagcaccacagcaatgacatattttggatgatggataccatctgtctacgactcttaattcaataccgttttcatcacattttgctttaagcttggttctaaattcataaaacttctgtgacgcaacagcttttgaaagatgtctgttcttcatcattcctgatacattcaaattttcaatagttatataagatggtttggttttcactatctcggctattgatttattgatataatcagtacgaatatgatctattttatgatgaagtctttgtactttgagcttttgcttttgtatattcttttgagtggactctcctttctttaagttctcatattttcgtgagaggcatctttgttctctacgcagtttcttttccaattttttaattcttgctgacttattgatatttttataagttttaccattggaaacaatcgccaagtcttttaagcccaagtcaattcctataccaccattgctattattggcaatcttagcgtcgggaatttctacaagagctgacacatagtatctgcctgctttgatggatactgtaccgcttttgattttccatccgtctttagttgttggtatataacctttttctttaatgcgtacccaacctaaagtgggtatgttcaacctatgtctctcacatctacagtctttagtattgttctttacgaaatacatttttacatcagatttacctttctttttgaaattaggaaaagcactttgatgtttaaaaaatcttgtaaatgcagtacatccatcttcaatagacttttttacagcttttgaatatgcttctttaatccatattttatcaggattattaggaatatactcattattaagccatacgttgaaactcttgccagtcataaacttttcaccgttatcgtgtaaagttttgttgtgatcgagatagaagttgtagacatacctacaagtgccaatagtcttgttaatcttgattttttgctcgaccgtcggatttatttccgtcttgaagctctttagcaatttcctcatccctttctatttgttttttatacttacgaagtccatacaacctgcaagagaacacatgaagtatagaaacaatatcctgtacgagttcttcctgtggtgatagttcttcgttgttcactaccacaatgcttgtattaaacttcatacagaatttttcaaaccaatcgtaaccaaatctgataaatctgtctttatgagttactattatggtttttattttctgttccattacttcatttaataattcattccactttttacgattgtaattaagaccacttccataatcctcaatacactgatcgataataatacctttagcattacaaaactgtcgcaaaaatgcaacttgattctgtaaattatctttttgatttcttgtagacactctggcataaataactacctgacgtttatcattttcaatatttatgcctttgaattgaaggtactggtcataagtataataacgcctatcagttggagttcgatttgcctttaaagttccttctctgtcccagcgttgcaatgtcttaacagacacacctaacagttcagcaaaatcttttggcttataatttgtgatatttgatgtattcataataatttactcctttgagtatatttaaacacatttaatcacatttgacaatatattcaattacttattttttcctcctgcttttctcagttcttttctatgtatgtattatataatcatattcattcaaatccaaacaaaaaagatgccagctgcggattcttttccacagttagcatctttcattttctttatcttatactcgcttttgcgattttatcaccttcgtctactgaattccacgcatggacagaccgatccgctttttgttcagatccacgctgatgacttttacatccacaacatctcctacgctgacaacttccagcggatgtttgatatatttgtcactgatctgggaaatgtgtaccagaccatcctggtgtacgccgatatctacaaatgcaccaaaatcgatcacgtttcttacagttccttttaagatcataccttctttcagatctttcatatccagtacatcggagcgaaggatcggttttggcatatcttcacgggggtcacgtcccggacggccgagttctttgatgatatcatgaagggtgatctcgccgattcccagttcttctgccagtttcttataatctttgatatagatggcagtcggtccgtcaccgaagtactgttctttcgtaaatccctgtttggcaaagagtttttccactgcttcgtagctttccggatgtacactggtcgcatccagcggattctttccgccctggatacgcatgaaaccggcacactgttcaaaggctttcggtcccagttttgctacttttaacagttctcttctgtctgtgaaacggccgttttcctcgcggtaagccacgatattttttgcaatcgctttgctgataccggaaatatactcaagcagagacgcggaagccgtattcagatccacgccgactttatttacacagtcttctaccacgccattcagcgcttcgcccagtttcttctggttcatatcgtgctgatactgtccgacaccgatggctttcgggtcgatctttaccagttctgccagcggatcctgcagacgtctggcgatggaagcggcacttctctgtcccacatcgaagttcgggaactcttcggttgccagtttacttgcagaatacacggaagctcctgcctcgttggtgatcacatactgtacctttgtcggtacttcttttaacatatccacgattacctgctcagattcccggcatgcagtaccatttcctacagagatcagatcgatatgatattttgcgatcattttcttgacggtttccttggctgctttgatcttggcttcggtggtcggtgcggtcgggtatacaaccgttgtatcgagcactttaccgatctcgtcaacaactgccagcttgcagccggtacggaatgcaggatcccatcccagaacgacttttccgacgattggcggctgcatcagcagctgttccaggttctttccgaatactttgatggaactgtcttcggctttctcggtcaggtcgcttcggatctcacgctcgatcgccggtgcgatcagacgtttgtagctgtcttccacaacggcttccaggatcggagtggtgttcggattgtcgttacggatcacctggcgttttaaccaggacagaatctcttcttccggtgcgttgatcttaacggtcaggatcttctctttttctccacggttcagtgccagtacgcggtggcctgc

SEQ ID NO: 2477 - DNA, 7813 bp, Unknown
  gut microbiota DNA sequence
aaatccttgcataatccacgccataaggaagtgtcttatcgctagcaccaaacatcgtcagtaactgtggcgcaaaagtaaagaatatcaccgtcaaagctgcggccataagcatgaggattgcaaaacagtttccaagaatcttttcagctgtcttattatctttctttcccatagaaatcgctgcacgcggtgcacctccggatcctgccagcatagcgaaggcattgatcagcataagaattggtgtaaacaatccaacgcctgttaatgctgcggcaccgacacctggaatatgtccgatataaatacggtcaacaatattatataaaaggttgatgatttgagccacaacagccggtattgcaagccgggccaaaagacgtgatattttttctgtttccatagcttgtgcgtttgacttactgttcatatctgtgttctcctaaatattttctagtcatctcaatataatcaaattacttatgcagtctctcccctgagtgttctggtattctggctaatgtatcaaacaactgatataaccatcattatagcacacaaaccaattaacagatcctgctttaaatcagctaccgtcagttttggcagaggcacaccatcccatgttcttccctgcgtttttaacactcatcctgccatgattctttccactctatggattgatgttctttttccttcatatatccatcaactttccaaattactacttgtccacttccgtaaagaagtattccaatgtatctacaaacatatttgcatcaaacaattcttttatctgttcccgattcatccaagcaacctgtgtcacttcgtccgttgtagcattgcccaaatcaacctctccatcatactcaaacaaccaaacatccataatatcattaaagatttttccctcaatgatttttcgtgtctttgtaaaaagcacttgtccattttccggcattaaatcaacgccaacctcttcctttgcctctcgaattgctccctgcaaactatcttctcccttcacaaccgaaccgcctacacattcccacatcaaagaatatgttggcttatttgcggaacgctgcgagataaggtactgtcccttagaattacgaatccagacatgcaccaccagatggtatccgtctatcggtaactgttctcctctgatatggtctttcccaagaagttctctattctcgttatacaaatcccatatttctgcgtctggtacatactccacaatatccccaaaatctgcatgtaaagttttacagattttgctaagaattgttaggctcacctcttcatcacggcgaagctttgtcattgtattaggagcaatttctgccttcttacgcaaatccgatttgctcatttctttatccactaataatttccataatcgtttatatgatacagccataatagtatctcccattttatttcctatttcggttacccaaccaacttatccaacatctcgataatcttttctttctcgccactaccattagtcataaatctcagtaatggaacttcatacaactccattatatgattttttaacaaatctcttgaagcctgaacggtatcctctttatggtattcatatccgtcaacttcaatcgccaacacaggctttttaccaattctgttataaatcagaaaatctaaatgtgttgctggattcattgcatactgacattcctgctcatttaatagttctggattcttaatcaacatattcaacggaaaatgacaaacaacatccaggcttgaatacttgttagcagagataatgtcctctatcaatgaatacatcagattttccgaatcatattctgatacttttttgtgcttctgcaagtatacccttctttcctcagtatactgcttgtaaaggtaatcaaaaatcgaataaatcttgctttcagtaacctcaaaattattatactgaatgtaatctatcaattctgttatattacgctctcttgattgctcgtttccagttacaaccagcatcaatttctttttcgctcttgatacagcaacattgattaaatacggatcatctgcaaaatcagatatctcatcatccacagtagatataataatattctctttctccttgccctggaacttatgcactgtagcagcatcaatatctgtaatctccttgcttaaagcttctacctgatttttgtatggtgcaataattccggtttcttccggatttgaaacatattttggtataatctcatttttaataacatctatctggcgctggctataatggttacgctcatgatttcccgctaccgtttttactaccgataaaacatcctcttcacccttatccgttgtcataataatcaattcaccacgatagaatttctggttacagaaattgattatttttgggtgacacctataatgttcccgcaacaatgcttgtgttacatttggcataacatccaaaatggattgcagaaaactgtttgtatactgatatccttcactcacattaaagctgtcaaatatagcttttgctttggcttttatatcatctgtaacaacattgggaagttgcttggtatcccccacaataacaacattccttgcacaggacaatgccaacgcacccgttgcaatatctacctgtgatgcctcatccatgataaggtaatcatacaccacatctgaatttaggctgtttcttgatgaaaatgttgtacttaatataaccggatactcagccaatacatcgtatggttccttccacaaattatcttcactaaaagttttcctactactgttaccttcatatttccttgccagtttgtcttttagaacaaccattgactgattgcataaatcctcaagcaaattcttattaacactatttaaatacttttcaatatctgcaatttccgcagacaactccgcctgctttgcacgataatacattgcttgaaaggttgtaattatttttgaaagatcttgtttatagaaattccaatcgattactccatattttaataagacttttatcttaaaccagaatcctattgcctttttttcttctgaaatcaactggcactcctgccacaataccatccaatgttttgaagatagttttttcttaaactttatattgtctgtttcaacatccgattcttcaacatattgattgaaatattcctgttcagtaaccaactgtgaaagttcctgccttaaacacgccagtttttcctgcttatcaaaaacactttttaactgactggattgctctgctattctcttctgcaaaatacttggatcttctttcgttttccacgacgaaaaattgggataagtggcttcctgatgctcaacaaataatttcttgtttttagaacttcctaatgttgcagcaataaaacccaaattgtatttgggagaagataatttttcatatacgttttctgttgccgaattattattagatactatctgtaccgttttcccttgcatcaatatattggcaataatatttaatatcgtctgtgtcttgcctgttccgggaggtccctgtataacactaatttgattctccattgcatttttcacagccttatactgactgttattgcatccaaacgggaaaattggaatgtattcgcgttctgttcttttcccttgcaatgatgatggattcaaatactttgctaaagctacatcactacccacaaaagaaatcttgtcaaacttcttagacaataatttttcaccagtctcttcattcttaagattactcaaacctgcaatttgctttatatattcaaatacatttgatgactgactctgggcaagacatgactctataatatgcaagtcgttccgacgataatctctttcactaccatcgccaaaacaaatgtgccaataagactcacttccgcttctaaatacatatattgcattaacatcaaagaactctcgtccttctctgctaatccgatacatgttaggattcaaaacctccggatcagtcaacttttccacattcaaatatgcatacgagtatgtttttccattattgaactttacatcccatttttgggtatttctattgtaaccacatgacattatttcggatgtctttatttcacccttgataatgaccatataacatcgtgtattcatttattcctcactacttcttatctgcacgctgattgcccttgaattccttctccacatagcaatgttcatgtttgccaaccagcttatcgcccatatctaccttcaattcttctgcaacagtatgtgctattctctttgccaagttacttttgatttcatcgtttcgtcccggccatagttttacaatcacatgtggcctattttctccctcgcaatctaatgaaatctaccattatcaaccttatccccaaatgaatccgatgccttcccacgtgttgcaattgtgacatcatgaactgcggttaaaagctcattaaccatatgtataccaaaaaatcttgttccaccaatgactaaaatattcattgttatgcctccttgtctctatatttcaccactttcaaacgcctttttcacctgttccaaatcggagtacttaccttttattatctgcaaaatttcttcatccggttgccacaaatccggaaccatgattggcttacatcccgctctgtaagccgatagtaatccgttttttgaatcttcaagagctatacactcttcaggattttcatttaacatttcacaggcttttatgtaaatgtccggcgctggcttagatttttcaaccatatctccacaaataattgcggaaaagcaatctataattcctgcgtcatttagatgtttttccacttcccaacgcggtgatgaagaagcaactgccaacttggcatttgcatttttcaaatactccaacaagacatacaatccttgctttaaaggaactttattattttcataatagttttttagaaattcttttgtgtatttacgcaattcttcctgattataccgatcaccaaactcttcgttccaaatctcataagaggcaacaatgctcatgcctaaagttttatagaccatatatccggctttcccaataccaagccttgcaccagcataatcccaagcctttataaacactttctctgtgtcaaacatcagtccatccatatcaaaaataacattcattttctttacctccttttaaagttctatcaatccggcttcgtcaaaataataaatattctctttcttataaccatactttgaatctggaaatgctatgtgtggctcaaatgtaaaatattttacatcaccaatcttcgtcttattctctttttcaatataaattctgtcccctttagttttcacaatggaatgtcccaggttgctcataaaatcaagattaacaaatccattttccactatgaactcattcatatgatagtacaattcctcaaaggttgtttcctgcgaagcaaaacataacaattctgtatgtaatttctcttccatatggagaccacgtttccattctgggttttcaatcagtcctatatcctctacaaccttgccattctcaacaacaatggtccttgcataatctccccagatattacctgcctgcgggcttaaatcaatggttattatatcgttgtttcctataactctatccgaagtcacatactgcttaccagatatagaaacggttgtttcatctcctgcaaagacaaatgctccaacatcccaataccagaacgagtctgcacccaactctaacagtttttcctcgcataacttccgaatctcgagtaaattcattcccggtttgataatattctttatgtattctatagtctgttttgcagccagctgtatctgactgtaatattgcctttctatctgcagatacttttcaatcaatttaggctgaatcatcggatatgtccagctttcaggcaactcatccataagttcaaccttctctatctcactttccagcttaccagaaaattccgttatttccgcaaaacatagtaatccaaatgtttcctcatcggtctcatttacactattcttacccgtaacggaataaacacatattggcttaatatcaaactgtatggcacctgtttcttcctgaagttctctcttagcagtttccaaaatatcttctccaacctcacgatgacctcccggagcctcgtaggtatctcgttccttatgtttgcaaaatacccatttgccattactctgtgaaataatgactgcaaatttcaatagtgaatcatctactgtatcataaaattttacttccaacatatcacttttctccttcccattctgctaaaaattctacaaggtactcctccataacagcttgtctatgctcagctattttctttgcagtctcagtatttatcatatctttaagcagcaagagcttttcataaaagtgattaatacttgtagaattatggttctgatgataatctgccttattcatattagtcatttctaactattcaagtcggttcctcattgcagataattttgccagattccccgttccatatagtaatttcattttattattacctacaaccctttcaaatcctttacatcacaatctcactatcaaaatactgttcctgaaaatgaatctgctcacagatttcttccttggtaaatgccataccttccggtgcaacaacccatttttcttccacatcatcattcctatgaacaatagcgataatcttacctgtgaacttttctatcgcttcatccacacctaatatgtaaacatcctgctcttctccgtccggtgccatgatgccttccacatacccataatttattggataatacatattcttatgttctgggtggtaactgcccaatggtctgtcaacagttacggttactgttctaccaataacagaactaatttctgcatactcgataatatcatgtctcattttctattcttcctttagcaaatccgcatatacctttgctacaatgctattcgcatccatttcacaggtaataagctgttccttaagaacagcagagaaatctttttctctccatcatccgcgcatatgttcctcaccaaattcttggcttttactccttgtttgatgtcgtcttatcgtctcctcaaatgtaatatcaaaataatacgaatatacatttgaaccatataattcgttcgccaccttaaacaagggattgtaccattcctcgtacataattccttccagaataacaatatcactatgctcatatccatatttcaaaagttctatcataagcggtaatgctttagtatctatgccatctttaacccacaatatattccttctgatttcatcttgcgaaatgagcattgtattgtaaccaaatttcttttgtaattccttagccaccgttgtctttccacttcccgaattccctctaagtataattagttttcccatatcctctccgttactcaaaataccattatcttaatcaaagcataattttcacctacaaactccatttcttccagcatatcacatcacatattctccttcaataaactttcgcattttcttgcgattgtttctcaattagtagtatcaaaaactccactagactaattcaggtgctatagcccacgccatagcacccaaatcattacaactatctgctattcctatttcgctcgcccttcttctctcgcatgccctgtgtgttaggatagttgtcagtgaaaaat

SEQ ID NO: 2478 - DNA, 4667 bp, Unknown
  gut microbiota DNA sequence
cgggaaaagaaatctgctatgaaaaataccggtatctgctgcttcacaaaccggcgggttacgtgtcggcgaccaccgataaccgggatcagaccgtactggaattgttgccggagggacttcgcaaagacctgttcccggtgggacggcttgacaaagatacggagggattgttactgctgacgaacgacggagatctcgcacaccggctgctgtctccgaaaaaacatgtggacaagacctattatgcaaggattgacggaaaagtggtagcagaagatcaggaagcgtttttacagggcgtggatatcggggatgagacgaagacactcccggcgaagcttgagattttagagagcgcggatgtttccgagatcctgctgacgatacatgaggggcgttttcatcaggtgaaacggatgtttcaggcaagaggcaaacaggtaatctacctgaaacggatgacgatgggaccacttgtactcggcgaggatctgccaaaaggcgtttaccgggaactgcgggaagacgagcggaaagcgcttggaattcattgatacagaacagaaagagtaactattcagtaaggtatattccgcgagatgttttggcatgaatatgccaaaatccagagacatacaagccaaaatgccatcaccgaaggtgattttcattgcattttgattcgtaactgtgaaggtactgaatagttataaaggattattatatatgttagaaaatatcaaagcagtgctgtttgatctggacggcacactggtggattcgatgtggatgtggaaggacatcgatatcgaatatctggggcggtatggatatgaattaccgtcggaactgcaaaaagagattgaaggaatgagcctctccgagacagccgtgtactttaaggaacggtttgccatccaggagagtctggaagaaatcaagagcacctggatggatatggcaagggataaatatacccacgaagtgccactgaagccgggagcaagagagtttctggtgtggctgagacagcaggggatccgtacaggaatcgcaagttccaacggaatcgagctggttgagactgtcctgaaagcacaggggatccgggaatatctggaatccgtacatacctgctgcgaagttccgaaagggaaacctgccccggatatttatcttatggtggcagagacactgggagtaaaaccggaagaatgtctggtcttcgaggatgttccgatgggtattttggcaggaaaaaatgccggtatgcgcgtctgtgcggtagaagataccttcagcgccaaccagcgggaagaaaaggaaaaacttgcggattattatatagaaagttatgatgagataccaagagaaaggatgcagccatgagcggacagtttttgccggtgacgatggaagaatgccgggagagaggaattgaacagccggattttgtctatgtgtgcggagacgcttatgtggatcattcttctttcggagcggcgatcatctgtcgcctgttagaaagccggggatactcggtgggaatgattgcccagccggactggaaagatccggaaagcgttcaggtgttcggcgaaccgcgtcttggattcctcgtatctgccggaaatatggattctatggtaaatcattataccgtatccaaaaaacacagacaaaaagactcctattctccgggtggagagatgggacaccggccggaccgggcagtgatcgtctacggcaatctgatccgcagaacgtataaaaagacgccgatcatcctgggcggtattgaggcgagccttcggagactggggcattacgattactggtccgatcaggtgaaacgaagcgtactgctggattccggggcggatctgatctcttacggcatgggagaacattcgatcattgagatcgcggatgcgctggcttctgggctggatgtgaaagatatcacatttatccggggaacggtgtaccgctgcaagagtgtggaacatataccggaaccgctgtatctgccatcctttgaagaaatcaaagaaaagaaagagcagtatgcaagaagcttcggtatccagcatcagaacaccgacccgtatcaggcaaaggttctggtagaagattacggcaatcaggggtatgtggtacagaatccgccggcgtatccgctgagcgagcaggagatggacgatgtatatcatctgccgtttatgcggatgtatcatccgatgtatgaaaaaaaaggcgggatcccggcgattgaggagatcaagttcagtcttaccagtaaccgtggatgttttggcggctgtaatttctgtgcactgacctttcatcaggggcggatcgtgcaggttcgaagccacgaatcgctgttagaagaagcagtcgagatgacgaaagatcctgattttaaggggtatattcacgatgtgggcggtcctacggcagatttccgtcagccggcgtgtaaaaagcagctgactaaaggagcctgtacgaaccgtcaatgtctgtttccgacaccgtgtaagaatctgatcgcggatcattcggattatcttaccctgcttcgaaagcttcggaaggttccgaaagtgaagaaagtatttatccgttcgggcatccgttttgactatgtgctggcggatccgaagagccatttcttacaggaactggcggattatcatgtgagcgggcagttgagggtggcaccggaacatgtggcggacaaagtcctggaaaaaatgggaaaaccatcccataaagtctatcaggaatttttaaaacagtattatgcctgctgtaaaaaaagcgggaaagaacagtatgcggttccttattttatgtcttcccatccaggatgcggactgaaagaggcggtggaactggcagaatatatccgggatatgggatttatgccggagcaggtacaggatttttatccgacaccgtcgacgatctccacctgtatgtattatacgggactggatccgcggacgatggagaaggtgtatgtaccggtcaatccgcatgagaaaaacatgcagagggcgctgatccagtaccggcgtccggagaatcggaaactggtggaggaagcgctgatcaaggcaggaagacaggatctgatcggattcggtccgaagtgcctgatccgtccgtatgacggcagacgggcacagaaggttgaaaatctgaaaacacagacaggccccgcaggaaagaacagaaaaaatggaagaggaaatctaaatcagagtcaacagccgaatggcagacagcaaaagcagcatgcgggtaagaaaaagaccatccgtaacgtgcataaaaaacggtaacagaaaggatacagcatgaaaaaagtaaaaaaaggtgattatggatacattcgatatgagaagaaaaaacgactgttgacaacggtaattttgtttctgattcctctggcggcatttctggcagcgtttctcatcacgggaaccaagaaaaatattattaccgtcattgccatggtaggctgccttccggcgtgccgtgctctggtgaatatgatcatgatgtggctgcagaaaccgatggatgcgaaagtctataaaaagatccaggcacatgagggtgagctggaagtgacttatgagacttacctgaccacttatgagaagagtgtatttgtggaaagctttgcggtgtgcggcaacaaggtcatcggctacaccagccatatggatggttccacacagtttatcgaggatcatgtgcggggcatcctgaaacagaacggttataaagtagaagtgaaagtgttcaaagaactgaaaacctatctggaacggatggattatctgaacgcacacaaacaggaactggagcagaatatttctttcaaaccggatgagcggtatccggatctgtccagagatcagctgatcaaacacacgatcctggcgatttctttgtaagggaaaagaaaatatatgagagatctgacaatcggaaaaaatgaagccggtcagcggatggacaaatacctgaaaaagtattttccggaagccggttccgggttcttgtataagatgcttcggaagaagaatattttgttaaatgaaaaaaaggcagacgggaaagaaatgctgaaacagggtgactgtatccggctgtacctggcggaagagacaattgagaagttccgcgggacacagaaaacaccggcggtctcccgaaagaaaactcccggtgtgaaactggatgtgatctatgaggatgaacatgtggcgatggtcaacaaaccggcagggatgctgtcacagaaagcaaaaccgtcggatcagtcactggtggagtattttcagaggtatctgctggatacgggagcaatcagtgaacaggagttagagacttttcatccggctccgtgtaaccggctggaccggaataccagcgggctggtgctgtgcggaaagagccttgcggggctgcaggcattatccgaagcactgaaactgcgaacgatgaaaaaatactatctggcactggtgctcggaaaggtcgatcagccggggcatcagaaagcatggctgtgtaaagatacaaagacgaatcaggtgaaagtcagcaccaggcagatgcccggaagttctccgatcgagacc

SEQ ID NO: 2479 - DNA, 8412 bp, Unknown
  gut microbiota DNA sequence
catacaagccaaaatgccatcaccgaaggtgattttaaatgcattttggctcgtaactgtgaaggtactgaacagttacaaaacacaaaataatacataaatacacaggaaacagcaagaggaggtatcaaaagatgaaagtaggagtcatcggatgtggcggaatgggaactacccattatctgtcgttaaaagcgctgtcttcccagatggacgtggaagtggtcgcactggcggactgccgggaagaatttttacagaaagcagcagcagaatttcccgaagcgcggacgtatacatatggaatggaactgatcgaacgtgaaaatctggatgcagtacatatctgccttccaagctacctgcatacagagcatgccgtagcagctatgaaaaagggcatgaatgttctggtagaaaaaccggtctgcctgaccagagaagaaggagaactgcttttggagacacagaaagaaacaggagtgaaagtcatggtaggacaggtggtgcgtgcctttgacgaataccgctatctgaaagaagtgtacgctaacaagacactcggaaagcttaaatcgatcgtgatgcaacgtgtgagcggcaatgtccgctggggatttgagggatggttccatgatgagaaaaagagcggttcggtcgtgctggatcttcacatccatgatctggatttcctaagatacatgctgggagagccggatgattttgaagtgcgggcaacgacatttgactccggtatgatcaatcaggtaattaccacctatgagttcggcgatgtatttgccacggcggaaggggtatgggatgtgtctccgacaccgaagttccaggcgggatttcgggcgtattttgaggacggaaccatttactttaatcaggcaggacagccgggacttgcggtatacaaagatgacggaacagagatcattccggaacttcatccggagtatgagggacagacgaataccggtatcaacatcacgaacctcggaccatattatacagagatcaagtattttctggaatgtctgcaggatggaaaagaaatcactctcgcgccgcttcaggaaggcgtaaaatccgtagaacaggcattggaagagtgggaagctgcgaagctgtatcttcgtgagaaaaaagaaatgtatatctgagaaatacaggagggaacatatgcgggtaggagtggtcgtccgtatggaagcggacacagatattgatgaaaaatttgcggaagtccgtgcgatgggcatggagagctgtcagctggtatgctgggagcggaaaattatcaacgatgagaaggcagcggaagcgattctggcggcagccgaaaaacacgggattactatcagtgcattctggtgtggctggggcggacggaaagtctgggatttttatgatggtcagctgacactcggtctggttccggcagattatcgggcagagcgcgtgagaatgcttctggaaggttccgattttgcaaagaaactgggtgtcattgattttgtcacccatgtaggctatatgccggaaaatccatatgatcctaattatcagggaacactgaacgcctgcaaagaagtggcagaacggtgcaaaaagaacggacaggtcttcttattcgaaaccggacaggagacgccggttacattgaaacgtgcgatgcaggatattgaaaagagcgtgggcaaaggatgcgtgggagtgaatctggatccggcgaatctgttaatgtacggaaaagccaacccggtggatgcactggatgtcttcggggaatacgtgcgcggtgttcacggaaaggatggaaaatatccgacggatggacatttcctcggagaagaagtgtcgatcggacagggaaaagtcaattatcctgtatttattgcacggttaaaagaagtgggatacgatggagacatcaccattgagagagaaatctcaggagaagaacagaaaaaagatattctggcaggaaaagaatatctggaacaactgatcggataacagagaagaaaagagaacagccggtgcggaggttctcttttttgcggaaagaggaagaatctttggttcttcctggcgattttcgtgatttatattgacaagaagtgacagacttagtattattactaataagtagagatgaattaattaaaactacttataagaaaaactaataagtatttatgagcaaaggagacaagcaatggctaaagtaggaattgttatgggaagtgattctgacatgccggtgatgagcaaagccgcagcaatgttggaaaaattaggcgtagattacgagatgacgattatttctgcacacagagaaccagatgtattctttgaatatgcgaagagcgcagaggagaaaggatttaaagtaatcattgcaggcgccggtatggctgcccatttgccgggtatgtgcgctgctattttcccgatgccggtgatcggtatcccgatgcataccacttctctgggaggcagagattccctgtactcgatcgtacagatgccgaccggtattccggtagcaaccgtggcaatcaacggaggagccaatgcagcgattctcgcagcgaagattcttgcaacatctgacgatgcgctgctctcccgcctgaaagcatatacacaggaaatgaaagaagaagtagaagcaaaagacgcaaaattaaaagaagtaggatacaagaactatacaaaataaaagtggccgcagggcagatggaggatcaagatggattacaagaaagctggagtagatattgaagcaggttacaaatccgtagaacttatgaaggaacatgtaaaaagaaccatgagagaagaagttcttggcggacttggcggattttccggtgcattttctctgaaaaagatcaaagagatggaagatccggtactgctgtccggaacagacggatgcggaaccaaagtaaaactggcgatgatcatggacaaacacgataccatcggaatcgatgccgttgccatgtgtgtgaacgatattgcctgtgcaggcggagaaccattattcttcctggattacattgcctgcgggaaaaactatccggaaaaaatcgcacagatcgtaagcggtgtggcagaaggatgcgtacagtccgatgcagccctgatcggcggcgagacagcagaacatccgggtctgatgccggaagaggaatacgacctggcaggatttgccgttggtgtctgcgacagaaaagagatgatcaccggcgagaacctgaaagacggagatgtactgatcggtatggcttccacaggcgtacacagcaacggattttctcttgtaagaaaagttttcgatatgacaaaggaatccctggatacctattatgacgaactgggaaccacactgggagaagcactgctggcgcctacaagaatctatgtaaaagctctgaaaaatgtaaaaaatgcaggtgtgaccgtaaaagcatgcagccatatcaccggcggcggattctatgaaaatattcctcgtatgttaaaagacggtgttcacgcagtgatcgaaaaagacagctatccgatccctccgatctttaccctgatggcaaagaaaggggatatcgcagaacagatgatgtacaacacctacaatatgggtatcggtatgatcgttgccgtagatccggcagatgtggacaagaccatggaagctatgcgtgcagcaggcgatacgccgtacgttgtcggtaaaatcacagaaggtgaaaagggagtgaccttatgttaaaaatggcagttctggtatccggcggcggtaccaatcttcaggcgatcatcgacagcatagtaaatggaaccatcaccaacgcggagatttccgttgtgatcagtaacaatgccaacgcctacgcactggagcgggcgaaaaaacatggtatcgaggcaagatgcatctctccgaaacagtatgagacgcgagaagcatttaacgaggcgcttctggcagcgatccagtcttatgatgtagatctggtagtcctggcaggatgtctggttgtgattccggagatcatggtgaaggcatatccgaataagatcatcaacattcatccggcactgatcccgtctttttgcggaactggctattatggactgaaagtgcatgaaggtgtgttaaaaagaggcgtaaaagtaaccggagctaccgtgcattttgtagatgagggaacggataccggtccgatcatcctgcagaaagcggtagaagtgaaagagggagataccccggaagttctgcagcgaagagttatggaagaggcagaatgggtgatcatgccgaaagcgattgatctgattgcaaatgataagatagaggtagtggacggactggtaagatccagataggaggaaaaacatgaacgtactgatcgtaggaagcggcggaagagaacatgcaatcgcatggaaagtagcacagagtccgaaagttgacaaaatctactgtgcaccgggcaatgcgggaattgaagaatatgcagaatgtgtcaacatcggtgcgatggaatttgacaaactggtggcttttgcaaaagaaaaagcgatcgatctgaccgtcatcggtatggacgatccgctggttggcggcgtggtagatgcctttgaggcagagggactgcgtgtattcggaccgagaaaaaatgcagcgatcctggaaggctccaaagcattttccaaagatctgatgaaaaaatacaacattccgacagctgcttatgaaaactttaccgatccgcaggaagcgcttgcctatctggaaaccgcaaaattcccgatcgttttgaaagcggacggactggcactgggaaaaggtgtactgatctgtaatacactggaagaagcacaagacggtgtcaaagagatcatggaagataaaaaattcggcaatgccggcaatacgatggtaattgaagagttcatgaccggtcgtgaggtatctgttctgacttatgtggacggaaaaaccatcaaaccgatgacttccgcacaggatcacaaacgtgccaaagacggagatcagggactgaataccggtggtatgggaaccttctctccaagcccgttctatacggaagaagtggatgcattctgtaaggcacatatctatcaggcaacggtagatgcgatggcagcagagggaagagagttcaagggaatcattttcttcggtctgatgctgaccgcagacggtccgaaggtacttgagtacaatgcccgtttcggtgatccggaggcacaggttgttcttccgagaatgaagaccgatatcatcgatgtgtttgaggcatgtattgacggaacgctggatcagatcgatctggaattcgaagacaacgcagccgtgtgcgtcgttctggcatctgacgggtatccggtatcttatcagaaaggcttcccgatcaaaggactggatgcattcaaagaaaaagaaggttactatgtattccacgcaggaaccgcaaagaaagacggacagatcgtgacaaacggcggtcgtgtgctgggtgtagtagcaaaaggagacgatctgaaacaggcgagagcgaatgcgtataaagcgattgatctggtagagtttgataacaaatattatcgtcatgatattggaaaagcgattgacgaggcgtaaaagataataagaataaaaaataacaggggcagaagacgaaagaatcgttttctgcccctgtttttctgtgttgcatatcaatacttgattcagtggatcaatttaaaattacgcgagcaacgagccaaagttcatgcttgcatgaaatcttggagattgctgcgataacgagtaaaatttgtgaagcgtattttatctcgttatataagagatttaagtagtatgaaagttgtataaatactgcaaaaataataagtatttatcaagcacttgttttttataggtgcaagatgtttctaatgtgcatatttgtgtatagccgcggtcaggagtgaaaaatcagtgttcttcctccggatacgtcatcccccagtctttccggatcgaggtcatcatatccatcacatcgattgtatagtcgagatgcatccgatccgcttctcctgcaactgccgcttccatatctgcaatttcatattccaacgcccggtcggtagaaccggcggatatcacttctttgtgaccgtcttccgtataagtgatgatggcttcctcgccccgcggatactcgaaaagttcgatgtaagccttatcaaaagaaatggttccccgtttcggctgtttggcgtgcaaagataaaatgacggtagccatctcctcctctttgtttttcagcagaatggatgcttgctcgtctacgccggtaggcgcgtattttacctgagagagaatctgatccggctttgaggacataaaccagcgaaggaaagatagcgcatacacaccgatatcaagcagtgctccgcccgcgagattccggttgaaaaagcggtttttcatgtcatactctttgtaacttccgaagttcatctgcaaaagccgaagttccccgaattccccggcatccatccggctgcgaagttccttgtagattggcatgtggaaaatcgtcatggcctcggctaagactacatgatgttcttcagcgagacgaaccgcttcttccagttcttcagcgttgagggtaatggatttttcacagagtacatgttttccggcacgtaaagccttccgaaggtaggaaatatgtgtgttatgcggagtggaaatatagataatgtccacctcatcatccgaaaatacatcgtcaatctgatcataaactttatcaattccatatttttcagcaaaagcaactgccttttcgtgcgtacggtttgctacggaatatagtttccgtccgtttgcagcaaacgcctgtgccagctgattggcgatcacgccacatccgagagtagcccatttatattctttcataacggtgtcctttcttactctttctataagattttgtcatgtatttattatagcgaagagaaaagaagggtgcaagtgggaagtattgtgttgacagtgactggaacggttcagatcattactttgctcctgttcacagtaacattaccttttagaaacacagggaaaatacagaaaacatttgcagaaataaggtaaattgtgtatgatataactaaaaataaaaagaaaaaagggggtatccgatgacgttgcaaatatatccttttttagcatccgaatcaaagattgatggattgcgtattattaatgtaaaaatggtgacggatgatcgaggcacagtgagagaactctatcgtgagagcagccattcagaagttttaccggaaacactttcttcgtggaaacagataaatttaacacgtacaaaacgtggagcggttcgcggtctgcatggagaagccatggcaaagctggttacagtggcaaccggttccgtatttggtgtgtatgtggatacaagaccggacagtaaaacatttggtgcagtagaaacagtacatattacacctggaatacaggtttttgttccacagggcgtgtgcaacggatttcaggcgttggaagaaggaacagagtatttatatttctttgataacgagtgggctccgggaatgtcaggaacagcattgactcctttagacaatgaactgggaatagaatggccgattcctattgaaaaagacaatcgtgaacagctttcggagaaggatgccaaagcaccgacacttcgggaattgaaagaaatattaaaatgtgaataatgtgattttattctaaatattacaaaagaaccttagttggaaaattcaaatgagcacttgcaaaaacaagtgctcaagtgtataatctaattagaaaggtaatcggatatgactccgatttgccctctgttaaaaactattaaagaaatagcatcctaaactttgggcggtagaggatgctatttctttttgcgtttctttttacgcttatgtttctttttatgattgtctatgtaagacagagcctcaaaaactactaacaataaagtaagaacttccattgcgttcatagggcatcaccctcctttcataagatcagagggcataaaataatcagaaatcacatcctgctttctatccgattgtacaaatgtagtatattacattgcaaacggatgttcaaatggaaagtattccgtatgaatagaataaaaattaaaacgttactgttcactccgtgcccagcaacacgctgtgcgatgcacagaatttatgctgttcgcataaattcgcgcgatatgtctcgggttttctgtgaccttcgctcacaaaaaacacctcgcgggatattaccagtga

SEQ ID NO: 2480 - DNA, 1301 bp, Unknown
  gut microbiota DNA sequence
cagaaagctacgatctcatagagaccacttttcttcatagccggaaggtgttttccgttggcgattcctccgcatcctacaattcctgcttttaattttctcatggtattatctcctttttattccgtagtaactattcagtagtcactatcccgcgagatgttttggcatgaatacgccaaaattctgaggtatacaagcaaaaatgccaacaccgaaggtgatttcatatgcatttttgcctgtaactgtgaaggtactgaacagttacctgtagtcaataaattttatattcaagcggatattcgcaatccgcttcgcagtttattcgatcaaatcacgaactgttccagatatctcttgctgaggatcaaagaattctcaaccttttccttggaatcttcaaaggccttatcctcgatctcgatacaggtataaccgtcatatccgatgtctgtcagtgctgatacatattttccccagtccacatctccaagtcccgggatcttcggtgacatgtattccagcggatatgccatggtgccgcaggattccagtttgtctttataaatcttgatatccttgtagtggacatggaagattttatccttgaactcataaagcgggcggatataatcgatcatctgccagataaagtgggatggatcgtagttgatgcccagatggtcactgtccaggatccggaatacttctctccagatcggcggtgttgtcatcaggttctgtcctcccggccactggtcctctccgaaaagcatcgggcagttttcgatggcgatcttcacgtcacattcttcagccagttttatgatcggcggccagatctcttttaccagttccaggttctcctgtacatttttggtctggtcccttccgataaatgtggtgaccatgcccacacctaatttcttacttgcaaggatcacctgcttcaggtgttccacagcagctttgcttttctctttgtctgcagccatcacgtttggataataagccagtgctgagatctccactcctgatttctttgcatatgctacgatatgctctgcatatgcatcctcccggttgacccgttctgcatcgatatggcttacccccgcatatcttctttctgctttttcctgtggccagcatgccacttccacacactcaaatccctgttcggatgcaaagtccatcatttcttcataggtccagctgtcaaggatggctgtgataaacccaagtttcatagaaataccctcctgtttcttctgtctctgctatatctttgttaactg

SEQ ID NO: 2481 - DNA, 1520 bp, Unknown
  gut microbiota DNA sequence
gctatgcagaccggatggctggcacacagcaagtcctggtattatctcgatggaaccggtaaaatgacgactggatttatcaccgtaaaaggcgcaacctattatctgaatggaagtggtcagatggttaccggatggctccatctgaataatgactggtattatttcgcaggaagcggtgcgatgactaccggatggcagaaagtcggtaattactggtattacctcgatgaaaatggaaaaatggcgaccaacacctggatcggcaactggtatgtaaacggttccggtgcatgggttcgcagcagataacactttacaggcgtagccgtcaatgtggctgctacgccatttttatctccccgcctctcctttcattgcattttttctctccttatattacaataaaatgcaggaattatttctctattccaccaaaggagtaataacttatgaatgcacgagccatgttagagcaggcggtcgcagagaatgcatccgatattttcctggttgccgggcggccgctttcgcttcggaaaaacggcgccctttccctggagaatgaggaacggcttttgccggatgataccgccgcttttttaaaagaaatttatgaacttgctgacaacagggatatcaaacctctgctcgatcacggggatgatgacttttctttcgctatcccaggcgtatcccgttttcgtgtcagtgcttataaacagagaggtacactctctgcagtgatccgtgtgatcaccttccggttaccggattatcatatgctgggaatcccggatgcgatcattaatctcggtcttggcggcaaagggatgacgctgatcaccggtcctgccggaagcggtaagtcgacaacacttgcctgtatcattgaccagatcaaccagacgcaggaaaaacacattatcacactggaagaccctctggaatttcttcaccggcacaacaaaagtatcgtcagccagcgcgagatccatgtggataccgacagctatgtcgccgccctgcgcgctgctctgcgccagagtccggatgtgattcttctgggcgaaatgcgtgattatgagacgatccatgtggcaatgacggctgccgaaaccggacatctgctcttttccacactgcatacgatcggtgcggcgaacaccatcgaccgtatcatcgatgtatttccgccaaaccagcagcaccagatcgccgtacagctttccatggtgttaaatgccgtggtatctcagcagcttatccctaccgtcgacggcggtgtggctccggcatttgaaatcatgaccgtaaccccggcgatccgcaatatgatccgcgacaataagatcccacagatcgacggaatcctctattcttccgccaaaccggatatgatctccatggacaacagtttgcttgccctgtaccgatccggaaagatttcaaaagaaattgccttgacttatgcgaccaacccggatatgcttattaggaaattgtagttttatataact

SEQ ID NO: 2482 - DNA, 19963 bp, Unknown
  gut microbiota DNA sequence
attcgtcatagaacgtttcctcagccattttcattttctttttaaaatccttcttttctccgctgttttcttaacctatatcgtttttctccgccttcccattctgccctgtcattttccgactcgacgatcagtcccgggaccggaatcgggtgatggtgttcatcaacggctaccattaccacatatgcacggttgatcaccttccggataccgtgacgactttctacatatgtgtccacacgtacttccatcgaagttcttcccacatacgtaatctttccccgaagaactactacatcatttacagtagctccctctttgaaattcaggttatcgatcgccgctgtcgtgatgtccgcctcgcagtgacgcatcgccacgatactggcaatttcatcaatccagcccatcagctgtcctccgaacagatttccataacagttcagataattggggcgcatcagatacgtctgctccgtctgagaatccattacccttttacatggtctctgtgtttcttccattgtaatatccttctttcttccattacacaaatcattgctgttctattcttcattaattacagattcattatctgtatagaaaacaaagcaaagctggcgttctgtacagaatctaccagccatactcgaattactttatttcagggaaatcccattcctgtctttatcggaatactttcaggatccgtagcactttcaccacataatttcccatcgggaaccgccgcatctgttccaccgttgttttcgtaacaatcacatacaaaatcagatataccagtgctgccagaattacagaaacacccagacacacgatacggatcggcaccagaagatgtagtccataatatacgatccatgccacaacacccatacctgctgccgctgccagtggttttccgtaaccattgacaaaatcgttcttgtgacccagatattttttcaaggacatggcattcaatacacacatggcgactgcaaataccagactggcgatcaatacagagaacacgcccatctgtggagctgcaaaagaacataccgccacagtgatcacattcagcaccagagaaatcgcagagtttcgaagcggaattctcgctttaccgattgcctgcaacactccgttcgtaatcgtagacagtgcggagaaaataaccgttatggaacctgctaaaagcagctgtcccgacagtgttccactggatggaaacagcacttttgtgattggaaacgccagcacagccaaaccgactgctgccgggatacacaaaaacatcgtcagctggattccctcgttgatcttttcatttgcctctttatactcatttttgataaatctcgttgcaatctccggcatcatcgcagaggaagtggcacttgaaagtgccagcggaatattgatcagcgtaatgtagtaattactgtattctccccactgaccactgactacttttgcagcgatgcctttcatattcaggatatccgagaaaatcttggaatccaggtaactgctggcattgtatacaaaagtattgaaaataatcggcgttaccatcaggaaaatgatcttcataacgcccaccatggactcttcctgtgtatgtttatctctggcgatctttttatggattgatttccggtttgccgcatagacgatcaacataaatgccagaccggtcagcacaccggctccggtacccatcgcaccaccggctgcaccataaattgcatgcgtctcctcgtccactgcaaacttcttgatcaacaaccatgccgccagaatactgacgatcgcattggcgatctgctccagaatctgagagatcgaggttggcatcatcgtgctgtgcgcctgaaaatatccacgcataacgccaagaattgctgaaaagaaaattgtcggcgccagcatccgcaaagccagaagtgcctgctgctgattgaccggaagcagataattaccaaagaaaaaggcaaccagagctgccactccacccacgatcattgcatataataacgccccatgaaagactttctgggcatttcgatattgtttcagtgccagacgttccgatacgaccttcgatactgccatcggaatactgtaggcagaaatcagaagcaaaataacatacacgttattcgcatatccataatatccaagtcctaccgttcccagcacaacccccagagggcttcgatacaaaagaccgatcaccctggagatcaaagtcgccatcatcagaaatgaggcgtttttcactaatccatttttctcactcatcatttactcctgctttatctctttttcgatttttccggctttcatggaaaaatcccggcaaatacctgatctgtcttctatagccggactacctattctcgatctgccagtcaatcggctccagaccatgtgctgtcagataagcatttgtcttactgaacggcttacttccaaaaaatccccggtaagcggatagcggactgggatgaggagcctccagaatcagatgtttgtccgggtcaagcatggattttttactctgagccggtttgccccagaggataaaaaccatcgggcgatcctgcgccgccaacacccgaatagccgcatcggtaaattcttcccagccgatcccccgatgggaatttgcctgatgagcacgtacggtcagaactgtgtttaacatcagaacaccctgtcttgcccatttttccagatatccgttgtttgggatataacatcccagatcatcttccagttctttgtagatattcaccagtgaaggcggaatctccacatccggttttaccgaaaagcaaagcccgtgcgcctgtccgtctccgtggtacggatcctgtccaagaatcactactttcacctgatccagcggtgtaaaatgaaacgcattaaaaatatcatctcccgccggaaaaatctgatgggttgcatattcttttcccacagtttcaaatagttttttataatagggtttgtgaaattccccttccagggcttttgcccatgctcctgaaattggaggcatacgccctcctcctctcctgtgcgtgcaatggcaatcttcctgtatccggattttaccggatttccacgcacacttgtattttcgtagctgtgaaggtactgaacagttacgtattttcttatatttccgatatctttacagacgaaccggaagtcctctgtcccgaagatattcctttacttcccggatctccagttctttgtaatggaacagagacgctgccagtgcagcatctgcaccgccctctgtcaatgcgtcataaaagtgctccagcgagcccgcaccaccggaagcaataaccggaatggatactgcatctgcaatcgcacgggtcagtttcagatcgtatcctgcttttgttccatctccgtccatactggtgagaagaatctctcctgctcccagagcttctgctttttttgcccattccacagcatccagacccacatcgatccgaccaccgtttttatagacattccatcctgagccgtctgcacgctgctttgcatcaatagcaactaccacgcactgacttccgaactttaaggctgcttcatgaatcagttccgggcggtttatcgcagaagaattgatggaaatcttgtctgctccttcccgcaaaagcaaccgaaaatcatccacagtgcggataccgcctcctacggtaaaaggaataaatacgttagacgcaactttccgcaccatatctaccactgtattacgatgatccgaagatgctgtgatatccagaaaaacaacttcatctgcaccggcctcgtcgtacgctttcgctactgccaccggatcacccgcatcctgaagattgacaaagttcacgccctttactactcttccattatttacatccagacatggaataattctttttgtcagcatcttatcgtcctccttttccttccagttttgcaaaatttttcaaaatctgcaagcccacatgggaacttttctccggatggaactggcaggcaaacagattgccactttccacagaagcatggatatgggtaccatattcggttgttgcagtcacaattttttcatcctgtgctttcagataataggaatgtacaaaatacacatatgcatcttccggaactcccgcaaacaaccgtcctttattcggaaatcggatattattccagcccatatgagggatcttcagcccttctgccgcaggaatccgaagaatctctccctttaagatgccaaggccctccacgcccggactctcctcacttttttcaaacagaagctgcagtcccagacagattcccaaaaacggagtctgctcctgaactacctggtgaatcacgggtaccaacccgaaatggtgcagattttccatcgcatctccaaaactacccacacccggtaacaccactttatccgcagccagaatctctttcggatctctggtcaccagcacatcctctcctatcagctgcagagctttttccacgcttttcatatttcccgcatcgtaatcaatcagtgctatcatgtcttcactcctcatctgtttttctgacactgccgctactccatcacagctgtgtctgcgaccttttagatcgattgttttatcaaatcataaccgtaatagatacaactacaaaaactgacaaaacattacagtttagtttatcataatttcaactcgaattccatatctattctgcataatataccagtgctttggattaagtgttactgttcactccgttcccggtaacgatgaatctttctctgtaacctgcaataattcaattattttcaggaatcctgctgcatcgctgccggaagttttctctcctttgcagtaaattctttcacatcaatacggattacattcacaattgataccagtttctcatcaaaggtaaaatcctttcccgtctgctgtttcatcaacagggacagtgctttttccttttcttccacatccgccaccagggttccatatccgcgtcccatcacgctccggtatgccatcccgtactggcaggctacctttccctcaaacggaatcatatctgtctccagagcaaatgagacttttggattcttctccagaacatcaaatttgtaccctttggtggcgccatggagataaaatgtcagctttccgtccacatattcatatccataattcatcggcaccacataaggccatccctcatcagacaaacccagatgcaggatctttgtttcgttgatgatctgtaatatatcattgatatcagttacttctctttcccgtcgtgtcataatttttctccttcaccgtaatctgattctctctattccccaaaatcagctgcacagatcttcagtttttcccggatcggcaggtggtatggacagcgtggttcgcatttgccacagccgatgcaggcagaagcttttacttttaaggtactgtatcgatctctggcccactgctccagatcataacgttgcagataaccagcaaacaaaaaaacacttggaatctggattcctacgctgcaaggtgcacagtaattacaacgacgacaaaaatccgttcccagctggtcacggactgcctgaatcttttcctcttcttccttcgtcagcggttcctgattctcacaggctttctgattctcttccagttcccgaatctctgccataccaggaatagttatcgtcacatccgggttggaacatacatagcggagtgccagagttccgtcttcgatggcacctcctgccagtggtttcatatcaataaatccgatgtttttctctccacaccgacgaatcagttcagccccctgctgctccacaatattataaggaaacataatcgtctccacccagtccagggtcagcgcacgctcaaaaacttccgtggaatgcgccgtgattccgatatgtccgatctttccagcgtttttcgcctccagcagtgcttccagtgctccaccttctccgatcacctgatccagctgttccatactcggattatgtacctgatacagatcaatatagtctgtgcggaaattccgaagactcgtctcgatatctgctgccatcgcttcttttgttctcgccatggattttgtcgccagcacgaactgatcccggattccttccagaccgtagccgatatactgttcactgacagtgtagccccgtgcagagtcgatgtaattgattccccgctttaccatatcctgcaacagctttcttgttccctcttcatcaatcttctgaatcggaatcccgccaaatcccatgcgggaaacctttaatccggtttttccaagtgttttgtattccatttatatttctcctttttctgtgacatatgatctgatttttcatgagatacattataacatcttatggggcggaatgaaatctaaaaagagccagtattcttatattttgataagaaataccggctctattgaactgactgattacactcaggttttcatcaatccacttagtcatttctcagtgccgtcaccggatcactctttgccgctttcttcgacgggatcagtccaccgataaacgtaagaaatacactcagcacgatcagtataagtgccggaatcaccggcagggatgcactgacagcagtggtatctgctagtttgtgaatgagggcattgcccgggatcagaagtaacagtgtcagaccgatacctatcagacctgcacacagaccaatgatacaggtttccgcattgaacacctgggaaatatttcctttagacgctcctattgcccgcaggataccgatttctttccggcgttccagcacactgatataagtaatcactccgatcatgatcgaagaaaccaccagtgagatcgccacaaacgcaatcagcacataactgataatatcaacaatatccgtcaccgaggacatcagcgttccgaccatatctgtgtagctgatcacctgctcgtcttttccttctctttccatcttactgttataatcatccagcagctgcacgatctgttccttactctcgaagtttttcggatagatcgagataccactcggttctgccttatctgcatagccgagtttctgcaggttcgaatcatacgttgtacttccggtatttcccatggacatcatcagttcggtcagttcttctccatccatgcttatatcaaatgctccggtaaatgcatccgcatcaatcgaaaatgcattctgcagattctctcccagctgacgcatcgtctgagtcatgacttgttccatccctccggcgatctgtgtcattatctgccccatcgctttcgaaatctgcgtccccagtgcctgtgacagagtatttccataagaagaaaatgcactctgcatataggtttcgattgccgtggatatctgttcttccactcccttcgtgtcgatcatcttcataagacctgcggaaagttcctgcttcgcgctgtctgttcccagataatccataaagtactcacccattttcgccggatccgggtaaccgttttcctgtacataggcttcatatccttccaacagctctttcgaaagtttttccagctgttctttcgtgatattcacatcgccgttgatatgaatatttttctctgcccaggcagtcaggatctgctggcattcttctgtctggagatattccgtcaggtatacatccagcttcgtcatatccgtatagcccttttcctgaacatacttctggaatccggtcatgatatctttgatcagctgctgtagttcttcttttgatacttcgacagaaccgctcgattcgatgatgtctttgatattatttttcaaaatttcctgtgctttttctgtattcagataaccaataaagttctcacccagaccggaataatctgcttccggatgttcttttgcatattcctggtagccctttaacaatgcagcagcaaggttgctcacatcatcaccggacgcctggatcttgattccactcatcagattaccgagcgacagatccggtgctttcggaagcgaaatattgatggcactcagatccagcatgcccgaaagatccagtgtattcggatcgacggaaaatgcatctgagagatccgcgcttcctgccattgcattggccatggcattttcatcaaatttaaatgcattttgcagtttatcctcatcgatcttaaagagggatcccatatcaaaatcattatccgattctttaccaaattcttcattggtaaagacatcaatatcttcatttttcatctgagcttttacgattttactatttttcgcttcctcgatcacatgatcagtcagttctgccggataatagataccggttcgaagcagggctccgttggcatcctccgatggttgcacgataccgaccactttcaggtcttccccgtttttcaccaattttttcatatatttattattatccgatttgtctttccagaccttgtattcactgtcatagctgtaataatccgaagcattgaccagtttaaaggtggttcccagaatatcctcataacggtatgtgccgatattatccggagtatccacatcttcatccttcataaactgttcgatcatatcgtcaagttccatagcatctctgagtcccagtgtgtacaagagaaaatcgctgatacttccgtccgcagtcataactaccacacattcgtcataactttccggccagcgacctgcttttacatcatactggtttttatacagattctcctctctcggcatctcataaaacacatctgtgctcatcatcgaggacatcatactatttgcactcgacgaagaaccaagccccagagaagcaaaggatttgtccggattaacctgacgaatcttatctctatctttgtccagtcgaaagatctgcggtgttgcgctgtaactgtattccacggattttgcgtatttgctgactttcttttcatgatcatccagatattttttcagcgatttcaggtcattggagtccatcgtggagaacatatttgtgatcatctgcacgacattgacctgatcgtcgtcttctttctccgcgtctttatcatctgtccccatgttcatcgtcatcatggaagtcagatcaaacccggtactctgaatctccagtggatattccgataacgtttcttcttccaccgactggatataagcattgacaccatttgacagtgccaggatcagcgcgataccgatgataccgatcgatccggcaaaggaagtcagaagggttctggcctttttggtctttaagttattaaaactcagtgccagagctgtcagaaatgacatcgaagattttcccatatttttatgttccggcggagacagtgctgcctcatccacctcatagggatttgtatccgaacggatctttccatcccgcagattgacgattcttgtggcataaagttccgccagttccgggttatgggtaaccatcacaaccaggcggtctttcgccacctcccgcagcagatccataacctgtacactggtattactgtccagtgctccggtcggctcatccgcaagcagaatctccggatcattgaccaatgctctggcgattgccattcgctgcatctgtccgcccgacagttgtcctggtcgtttttcaatttgttctcccagacctactttttccagggcttctttcgctcttcttcttcgctccgcttttcccacgccggagatggtcagcgccagttcaacattggcgagtagtgtctgatgcggaatcagattataactctggaagacaaatccgatcgtatgatttcggtaggaatcccagtcccggtctttgtattttttcgtggaaatcccgttgatgatcagatccccgctgtcgtaacgatccagaccgccgataatatttaacagtgtggtctttcctgaaccactgggcccgagaatcgcaacaaattcattatccctcagattcagactaacatcatccagggctttctgaaccagttttcctgttttatattcttttcgaatgtgttggatttgaagcatgttcttctttcctttcttttgcttcgctgttttcatgataaaccaccataaaacatacggcgccaacaccaagatcatccggtgtcaacgccgattttcgcagatgattatatactaacataaattttgcggggtgaaaataaaaagaatctaaacttctgtaaaacatgtctaaagaaccgggcaaatgcaagtgctgacatctgtcctgttctgttttctacatattttttaaggatgataaagcatgaaaagactattgttagctgttactgtttaattcgaactcatggtaaattctacagtttcctgttcactgtccagtgcctcatctacacccataccactctgtgctgtgagaaatcaatactactgtctgtaatatcgttaaaacctcatttcagtcttgtccgtagctgccccatgttcttactcttacaatacccgtacattatcagataatgtctacgctgttaacacccggaatctcttccaattgttccacatatgtacttttgtatgcagtaggtaaccgcagagtcaacagcagagcgcatggtgttttcttcgtttttccctttatcacatccatagtatctacctgtatctgattctcctgaagtttttccaaaaattcagaaatgcttccattggtttccagttccacatagacagataaatatttactgcgccgaaaaaaatatttttccagacgtggaagcacgtgaagggaaatcagtacacacaccgtaatgataactccaccatccagaaacccgatccccactgcaagaccaacgcatgcacatgcccataaacttgccgcagttgtcagtcccctcacctgatgcccggacacaatgatggttcctactccaagaaatcctaccccgctgatcacctgcgatgccatacgcgaaagatccgattttccaggaaaatatacctccatatactgcgccgtcaacataaccagcgttgctcccagacatacgatcgtattcgtctttgttcctgctccacgttttttcaatcctctgtccagaccgatcacacatccaagtatcatggaaactacgattctaatcaaaacattgggaattgtccattccgcacatgaaaaaccaaacatgcgattcctccttataactttttattctcgtatttcttttattatactatatcatatttttatatgcttttttcaaacatttcaatatactttatttattatacttaatttcaatacatattatttttaactttactgtaataaaataatcgtatctttcttctgccagtaagctgattcttacaaaatgtcattttttatagaaagacagaccaggtcggatatccggctctagtctgtcttttcacacttttattctttttcagaaataatcttctccataaagatccccggaatcagatagtctttttcctctccggtgtttccaatcagtttatccagcatacgctccatcgcacactgcgcaatattctgctcgtcctggcggatatgtgtcagtttgtactgcccggattcgatgtggttttcatccatgtagcacacttctattctgccctttaacgcttttgcttccagaacagcctctgtctccatggcaacactgtactcaccacatacgataccttcgagttccttgctgtacctctcaatatactctgcaatctgttttcgatagatctctccgcggacttccaccggattatcataggtaatatacgggagactacactttccgaccggagtcataccatattcggagattccctgataaaatccttcactacgttctccaagtgaagacgttccggtttcttccattgtgataaatcctatttttttcttcccggtttccgaaaaataccgaaccagccgcgacatgctctgcacattgtccgtccgtaccgaatccagtgaaattccatctaattttttatcaataagtacagtgggatatccgtcaatcaccagtcgaagaatctcggtattataatacgatccatggcatggcattacaaacattcccttcgcaccgataccgcgcagatagcggattgcctgtgtctccagttcccggtttccgtaggaaaaacatgggtacagatggtatcccgcctttctggccagctgctccagttcatacatgatctgcagaccatagctggaactgatatgttcaaaaattactccgagaacaggttcccctgtctgaataatctctgatttttccggtaatgccaatttttcttccacctcaatcctgccaacttccgggtattccatgacaaaactgccttttcctctgatcctgcgaatcctgtgttcttctgccagaagattcagtgctttttttactgtgatcgcgctcactccgtaatgtgcaatcatatcctcctccacctcaagtttatcacccggtttcagatcaccacactctatcttctgtttcagatcattatatacattttcgtatagaaaccgcttcttcgccatgaatatcctccgttttttctaattctgcctccagtttttccaccagatccagcagttccagtggtttgtggataatataatccggcacttcttcctcatttttcggctccatcggatacctcggactccatttgataaatacagaagtaatcccaaaacggttggcacccacaatatctctctccagattattccctaccataataatacgttttttatcttcatcggtcagatgcagcagtttcatcgccgtctcaaacatcgcctgtgacggttttttttctcctacttcctctgagatcgttctcgcatcgaaaatatttttcaatccatgctgaccgtaagaattatcaaaagactgtgtatatccatccgctaccagttcaatcgtataccctctttctttcagagtaagaagcatctcttttgcaccgtcgatcaattcacagctttgtacgatcggtgagccttcgtttctgtactcggttccttcatttaccaaagtgtctccgctgtctataaatacgattaattttttgctcatgattttctctccatctatgttttgctgtcattttctgttttcgtattcttattttaacatattaaatatattttgcaacggcttaaagtatatttaatatggcttttcatatattttacttatcagtagttatgttaagatataataaagtacaaaaaagtgatatagcatctgtttgtcagtcgccataccatttttttctgttatattttttatttttcttcaaaactgcacagcgccttcacctgtgccccatagatcgaatgatttccattgatcatatatgccagcaggcagaccacaaccagagggatcgcattctggcttccaaagacttccagtccgatcagaatcggtgcaattaccgtgttggttgcactgccaaatactgctgcatagccaagggacgcgcagatgaccggcgaaattccgaacacagaaccaagcaccacacccaatgacgcaccaatggaaaataacggtgttacctctccaccctgaaagccaatcgcgagtgttgcaatcgtcagcaaaagtttcaggatccagtcgtatcggtagatggtatcgccggtaaaggatgccgtgatcaggttggttcccagtccactgtatcttgcactgtgtaatgccatcaatacaattgcaagagggatcgcaagacatccgatccgtaccagtggattgctgattttgtctcctgccagcttcttcgtcttctgcaaaagtacagaaaaacaccgcccggtcagcccgaacgccagaccgagaattaccagaataactacattttttatatttccaatctgccagatttcctgtacatccaccgcgaatttttccagtcccagcagatgtgatgtcgtggatgctgtataggacgcgatcagtgccggaagcagcgcatcatattccacataaccggaaacccccacttccatcgcaaaaaatactgctgccagcggtgtctggaacagcccgccaaatcccgctgccataccggcaatcagcatcaccggttttgtttctttgatatggagccgtctgcccgtctcatgcgagagcgtcgcaccaatctgcaccgccaccccttcccgtccggcactgccgccgaaaagatgcgtgatccacgttccgatcatcaccagcggaacgagtgccagcggtatttcttcccgttttttctgtcccacttcgaataccagtgtcatccccttcaggctcagactgctgaaacgctgatacatccaaacaattgccagaccagccaccggaaggatcgggagcagataacgataatattgctcacgaaaatccgaaattgtcagcaatcctcttccgaaaatcgtgtcgacgattcccacgcagatgcctactaatacggcaagaatcacgtattttccttgcagaatccattgttcctgtttttctgcggatattcctgttttcttctgtttcatttcgttttctctttcctccatgttcttctgatttatttctcccctgaatgagataaaatacgcttcgcgaatctgactcattccctgcataatcaaagttgaaccgccgaactaataactgatagttcctgtagcaaaaaaggctgatactcccgtgccatgcacagaagtcatcagccttttggcggtttcgatcaaaaatcgtgggagaacctcattcccgttctggatgaaagtataacagtttttccgcacgttcgtcaaggcaaaatctgttacatccacttctccctcttatctgtttgtatcagaaccccctctcaatttcccggttcttccgcatccgccggaacaccccttccgggattgccacgcagagtccgccgaggatcagcagtacaccgatcagttctctccacgggtacacaaatctgaaataaccaacccggcttttcatcaccacagcaacaacaccaagcactccacttcccactgtcagtaccaaacccccgacgatcagtccgtagaaaattccttccatccgcgtcatgttcttcagctgccgggttgtcatgccgatgctttgcatcatggaaaattctttttgtcttacggtatatccggttacgatcacatggaaataattcatcaatcccataaaaagcagcaccagacagagtccgtacattatgattcgactggacgcgatataggatctggcagcggacaacagttctgatttgcttaccagcatcagtgtccgcgaatccgagatataatctccatggctgcttcccgtcacgaactgcatattatagctgtccacggatttttctacagattcccggatcatcggctccatcgaccgtttgacatccatctccagtacaaaggtctgtaccggcagctgcatccgctccatccccttctcgctcaccagaaaatacacgatccccggtccgttccaggtcgtgtcgagtgccggagcccctttttccttgaagttcaggtagccgcaaaacttcatatccgccgtcttttctccctgcaccgtataagtggaaaatgtctctcccacatcctctctgcctttttgtgcctcgattctcgagaacagattatagtggagcatgattgctcccgttcctgcctccacactgtcaatatccagacccagatctttctcttcattaaacactttcagttcttccagataggtatcactgacctgttctgccacaaattcataaagttttggagcggtttcttctctattttccgcattctcctcagggatctgattcccttccagcgtctctcttcgaagatccaggattttttcatccagctgtaacttgccataaccgcccgttaccttcgccaccgtttccaccccgtcaagacctgtcattttttcaatcaaattttccggaaaatacgtctcctccatcggatactggctgatcgtcccggaggatatatttgtcatgatcttaaaatcatggttttccgcctcgatctggttggtcatatccgtcccattcgtgatcacaacggcagaaagtgccacgcagatcccgagagtaagcgaaacgatcgtcagcacacaccgtttccgaaaatggaacagatttctccacgccatcgctttcagcggatctttactctgtcgtcggctttttctcccggcagatactttttccatatactgtatcgattccacgggagaaagttttccgatttttcggacaacaccggctgctccaagaaacgtaaccaacattccaaagcagacagatgctgccagcatccacggacgaaacgcgatcatcgcggaggcttttcccaggccatgcagatacatcctcgaaagcaatgcgggaatcaccgtcagggtaaccgcaacgcctgccacacttccccaaagacatcccagcaccgcgattttccgtatctggcggtacgcgatgcttcggatctgtttcccggttgttcccaatgtttttaacagaccgaatcttcggatatcttttccataggaaatatgaagcacattatagatcagcagccatgctgcaagtaagatcacgacagccatcaccgctgcgatatcatacccgccgaccagttcggtcacagcctccagacccagtccggtaccgccgaaaaactgttgactgtcatcgcgcatcggaatatcctgatacaatcggtcttccaccgtctgaccgtccacgctcctgctctgttcgatcagcagcgttctcgatacttccgcaaggttcagttgatccagatatttctgtgagaaataaccgtacgcctttcccatcgacgggtctacatattccgtataatacccggacagccggaaatcgccggaacgttcttctccctcgctgtccgtcattgtcaccgggatcgtcattccgatcttcggtttactgatcccgagcagtttcagtgcccgcatcggaagcatgatttcatcctctttcgtcggatactccccgtgaatatccgtatacgccggtttctgcatcttctcccacgctgtcttatctaacaccgtacacaaaaaagcatctgtcgcggcaaaatccgtctccattcccgcggatcggatgtatgccagcttttgtatcttccggtactgttcctcggacggattttccagcgttgtgctggctttcgttcctccgtttcttaccatcagaaggtaatctgcctgtaccttcccaatggcaaggctgaacacacaaaatatcatccccacagcaaatgcaaccgtcccgatcaggatccggtttcgtcttttattttcctgatactcccgttttgtcagaagccgcaggatcttctgattgttatttttcatccgaatcacccgttacctttccatcctcgatacggatgatccgctctgccatctgcgcgatctcttcgttatgtgtaactaccagaatcgtctgataaaatctttccgcgcttatttttaacagtccgatcacttccatcccggtcactgaatccagatttccggtcggttcatctgccaggatcaccgccggtttcgtgatcagcgcccgtgcgatcgctactctctgctgctgaccgccggataacatatgcggcatgtgatccagtttttccgtcagtttcaggctttcggtaatttctttcaggaatttccgatcgacctgcatcccgtccagcaataacggcagcgtaatattttcccggacgctgagtgtcgacacaagattataattctggaaaacaaatccgatatttcttcttcgaaaaaccgtcttttcttcccctgacatttccttcagtgaggttccccgcacccatacttctccgtcggtcggctcgtccagaccgcccagcatatgaagcagtgtggtttttccactgcccgaggagccgacgatagccccgaaggttccttccgttacagaaagtgagacaccatccaaggcacgcacgatcccggatggtgtctgataatatttttttacctcttttgtctcaagtatctgcatctttcttcctcctgtcgcagttatctgttctttttctctgcttttctatgattgtaacagccaaaacttacaaactgcttacacgggaagaaaaatcgctacttccagtccctgttcttttctttttgctttcatgaatccgccgtggagcgtcacgatctcccggctgatatacagtcccagaccaaatcccggttctccggtcactctgcttccccggtaaaaccgctgaaaaatccggttttcttctccttccggaatcccgatgccatcgtcagataccacgattcttgtatacatttcatcctgccgcacgacgacccggatcttcgagtgttccggtgcgtattttacgctgttatccaatagattatagaccgcctcgccaagccaattcccatcatgccacacttttgtctcttccgctccggttacttccacttccatctgcttttcttctgccgctttctgtaccagaagtaccgctgaaaatatcgtatccgccagagcatcggttgtttttttgatctggatcatctgttgttccagccgcgccatcttgataaaactttctgtcagaaaatgcagccgctgttcggattgttccagtgcgcgcaggtatgtccttcccggctctcccgatatctcgccctctaaaagctgtgtgtaactctccacgcccgccagaggattccgcatctgatgcgcgatctccccgatcagtgctttcgtctcatcccgctctctggtaatccgtgcttccacgccctgatttttctcagaaatcctgcgaatctgataacggatctttgccggaagtgtatcttcatacccgatttctcccggctggatacattccccgttcagaacccgctccagcatccgggaaatctcttccatctcctgctgtgcttttctttttcgaaacatgttattctccaaacgtatagcccagcccaaacacatttttcacatacacaggatgtgcaggatccggctcgatcttctttttcaggcggttcagcgtcacatgcagcgtattttcttccacaaaattcccgccatcatcccagacctgttccagaagcatgcgttttgttactacttttttctgattttgcgtaagtacttccagaatcccgtactctttcggtgtcagcgctaccggctgtccctggatcctcgcttctttccggtcatagtccaggctgaaatcctgataataaaacacctgattcggctcaccgcctgttcttcgaagcaccgcctcgatatgttttaaaagcaccgcaagtgccaccggttttaccaggtaatcgtccgcacccgtatcgaatgcttctacgatatcctcttcttcatctctcgctgtcagaaaaatagctggcaatttctcctgcccgctcctttgccggcacagttccacgccgtctccatccgcaagcccgcggtcgattaaaagcagatccaccggctgtctctccagcaaccggcgggcttttgtcacagattccgctgcaaatgcctgatatccatgggacgtgagcatctccaccagcgcctgcccaagcagcgtgtcgtcttcgatcactgcgattttatacatctttacacatccgatctggcgtaactgtttttcatctggttgctcagttcatacagaacttttttcaatgtcgcagacgcttctttctgtaccatttctgccactttccggttcgctttgcgtttca

SEQ ID NO: 2483 - DNA, 1977 bp, Unknown
  gut microbiota DNA sequence
actgaacagttacgtaactttttcattaaacctgtctgttatagatatttcatcattgttgagacaagaatattcatatctacaggctttgcaacatgatcattcattccaacagaaagaacattttgtatatcttctgcaaaggcattggcagtcatcgcaacaattgggatcctggcttttttcgtatccttcatttttcggatggctaatgtagcatcatatccattcataacaggcatctgaatatccataaggatcatcttgtaataatcagcctccgccttttcaaccatgtcaatacatgcaacaccatcatttgcagtctcaacaatacatccttcttccgtcaatagttctcttgcaatttctgtattaatttcattgtcttccactaataggattcgaacaccgttcaaacaatttttattgtgcagattagtatttttcttctccagaatatcttcttttaacgcttttctgcaaggaacagtcactgtaaatgaagaaccctcgccctgcttacttttcacttctatagtgccattcatgagttcaacaagttttttcgtaatccccattccaataccgctgccctcaatatgactggcggtagaattacgttctctttcaaaagcttcaaaaatatgcttttgaaattcttcagacataccaattccattatcggtaatggtaatgatcatattgcaccagtcttctttttcacagggtttctgtaccactctacaggatattgcacctcctgtatttgtatactttatcgcattacttataatattgaaacagacttctgacaggtgcggtgcatccatatatacatacggatacataatctgttccgtcagagagagcgtctgatttttactttctgcctgttgttggaacatagtgacacaattttcaaagttctcatggacatctgaaacaacatattccatttcgaccttattattttcaatccttgcaagatccagaacattactaagcatcgacaaaagttcttttccgcatattcgaattttttcaaggtatctgctaagtttttctgtttctatcaaatgtctggacgccagctctgcatatccaatgattgcattcataggagttctgatgtcatgagacatattgaacaggaatgacgattttgctttatttgcacattctgcttttaatttagcttcccgcaattcctcttcttgttttaattcccgcattttttcatctgtcacatctcgatttgcaatcagcacggatgtaacatttccatttttgtcataactctgaggaacaaccatggaaagaaaccatgatccattcttctttttgaattcggaagacatagattctttattatgaagccgtgccgccatggtttgtatatcaaaaaaatctatatacttctgtacaaacggttctgctataataccttcgataccctcgaactgaagatcccaatctgcagtattatctttaatatcccaatccatctttcgggatcttttgacaagttcgaccttctttgttttcagattcaaccttgagatatgataataggcagtacctaatgcatgaaacgcctgtcgagttctcttcacctgctttcccaatgtaacagggaactcttcaccgtccctctgttccaaatccggtgttgactgatgcagatgctgaaccagccattttccatttatccacctatagataatcgtaaatcttgtctccattttaaaacaaatcgaaccgtccttaaacagaccaataaaatctactgttccatgagcaagaacatgatcatcatcaagctgttcttcttcctgatgtaaattttgtacttcaattctgattttgcctctttgttttacatcaaattcaaatgattctaaaaactcatgcaggttcctgaaaatctcgtgtttcccagttccaatcagactgatattttcatcaaaataattc

SEQ ID NO: 2484 - DNA, 2289 bp, Unknown
  gut microbiota DNA sequence
aattctgtcagatactgtaattttgcggacagatgttctttggcgcttcccacagagcttctcacactgctggtggaatataatgcatcttttcccagtttcaagataccaagattgctggaagtctctaccagtccttcgatctcaccgctcattttctcgatgccgaacggtacatgcaccagatagaagactactttttctttgctgaccatagaaagtgcttccaccgtctcttcttttcccggtgtcacggaaatggtgattccttcatcacttcccgcatattctgcacgaagttctgcctgcagtttttccgcaacagcttttacttcttccacatcctctgcatctgttacgatggctgctttacagcttcttgtaatcgcattgtctttggttccgccggacaggtctttgatgctgtatccgatcttctgtcccagttcatagaggaacagtcccattaatttattggcattggcacggtttttatcaatctctgctccggaatggccgccgttcagaccgtcgatcagaacttctgtcaccacgccttccatctcctgatattctaccgggatccggctggttccgcttaagcctccggcacagctgatccacagatatccctcttcctcggagtccatattgatcatgtgggttcctttcagaacagaagtatccagtgcctttgcacccaacagaccaatctcttcatcggtagtgatcacacactccagcgccggatgttttaacgtgtcatcatccagaactgccagcatataggcaactgcaatcccgtcatcaccacccagtgtcgtaccatctgctgtgatataatctccttcgatctgcaatttcagaccgtctttcatgaaatcatgatccgaatccggtgttttctctgcaaccatgtcacagtgaccctgtaagatcgtaatcggtgcatcttcgtaacctgcggtcgcatctttatagataactacattgtaggattcatcctgataatatttcagatttctttcttttgcaaaagaaacaagataatcactgatctctttcatattcgtggatccgtgtgggatctcacacagtttttcgaaaaagtgaaatactttttccggttttaatccttctaatactgccatttgttctaacctcctgcgatctgacgcgctccgttcacgacgtcagtttttcagccgaacaccttaccccgtcggccacaatacaattattttatgataaatacattcaaaaatcaaggcatatatataatcaaacaccgatgtctcactaaaggagctgcccatgcgatccggaatcttatgcacccttctttttttcgtttttgtctatctgcttcgctttcccgaagatgccttccaggcttccgcctccggtgtgacgctctggttttttcatgtgctgccgtcactgcttccgtttatgattctctccgacttttttatccataccggtctggcttccgtccttcttcagaaaacaaaggggattttccgttttctgttcggtctgtccatgtacggatcctatgcttttctgcttgggctcttctgcggttatcccatgggagccaaactgaccgcagatctgtttgccgagggaaaaatcacgaaaagtgaagctcagtacctcttaacgatctgcaacaatccgggaccgatgtttgtaagttcctaccttctcgtagatactttacacctctcccatgctgccgggcacacatttctgatcctgtatctttctttgttcctgacttccctgatttttcgtctgctcctgaaaccggactgccgggatctcacaaccgctcccgtatctccatcatcggaatcgttccgaaagtctgtcagtcatatgattgatgcttctatcatgcatgcatttgaaaccatcacaaagctgggcggttatatcatcctgttttccatcctggcttccctggtcgtacgctgcagttccccggtacccgttctctccgtatttctcaccggacttacggaaatgaccaccggaatcgctctcgtcggtgcttcctctttgaaattatcctggcgctatcttctgtccctgatcttcgcctctttcggcggactttcctgtatagcgcaaacaaggggaatgctcgtcggcacccccctctctattcgtacttatattgcgggcaaaaccgtccatgcggtctgtaccctgtttgttggctggctcttactcttcgtccagatcttccactgaagtttctgcttctgcggtttcttctgt

SEQ ID NO: 2485 - DNA, 13797 bp, Unknown
  gut microbiota DNA sequence
tttttggcgggtcccaagttcagaaatcttcctgcaagcaagcttgcgtcagatttcagaccttttgaccctggtatcatcatattattatatcattttctcatgaaaagtagttacagatttttctctgctctactgaatttccgtgtcagtaaccacatccctgcccacagcaaaattcccgctaggctgatccattttcccgcggaaagtccctgggcgtggtaggtgatcgtcacccagtgttccccgctgaccatccggcatcccacaaacgccgtgttgactttctccgtcacgacctctctcccgtccactttgatctccaaatgactgtcgtacgggatcgatgtgatcagatagccgtcctgctccatctcgatactgccgctgatctggtttcccttcgttgcgttccagtccggtgtgaaggtggactggtacagtgaatcgtcttccagcaccgtcgtatcgctgacatagcttttcaggttacagatccgatacgttccttttccaagtgttacgtttacttttttctgatctgcggaaagcttcatgacataagtaaatgtcgtgttgccattataatacagatgactttttgccgtcagcttatttctgatcccgttgatcacgatgctcacatcccggttcggatgttcattttccacatcgaattgcagatacaggatccgttctttcccggatgtatcttcatccagagaaagtgtggctttctgattcttttttgtcctgatcttccaggaatcgtcttcctttgttactccatgcttcgccgtaaatgtcacgtttgtttcctgtatacccttcgttttcgtaaccccatgctctgcgatattttcctcatctgtcacggcatactgcatcagcatcgtctggttataaggaaattccatcgtctgatatgttttttctgaaaggatctggctggttccgtagatcaccggcgcagccgtctcctgtacctcggtcgtgaagttctccccatcttcactccgtccgatcacatatttgactcccataaacttctgaaacagcggattagccgaggcggactgcatcagcccgtttcgaaacggctgttctacctgaaagacatcgctccgaaacttttgatacgctgtgttataggcggaagagtataccgaagtcgtccactggcgcatatcccagatccggtttacgttgtcttttcgcttctttgcaactccgctttgctccgtccggtacaggccggtttctccgtccagcgcatcacgcacggcatcctgccaggcactgtctgtgatctcctgataatcttctttctgcaccagattgcctgcctttccgttcaccacatgattgatcagcaccaggcataccagcgccggaaccagaagcaggaacgggcgtttccacttctgaaagatcagaaagaagaaaaacagtgctgcgctttcgatcaggatcagctgataattctgcgccctcgatccgtccccctgcagataaattgccagcagactgacacccaccgtaccgccaaatatgaatgctcctttccatcttcctatttcctcgtttttcatacggttcaaaaacactgccgtaagataacagaaaaatgggagaaacgggatcagtgatttgtaccgcacatacagcatcccgttaaatccccaggcaaatacaggcaccgtcagaagtgccacgcagaccaccgataccacccgctcccggatcgatccacacacgatcccgccaagcaaaaccgccaccagaataaccgtcagccccacgctgtaagtgccgtacagtgaactgtccagctgcagattcggcatcagcagttctttcagattctgactttgggaacttccgcttcgctgcaggatcgcatatgctgtaggaaccagcagtacaccggctgaaagtaccgccacgatcatcggaatcgggaatccgaacagttttctctttcggatccctttgggataaccgtaccagccgtataaaaatatcgctgccattcccgcgatgctgaaataaaaactggtcagaatcatcagaaacacacccagggtatacagacctggttttcctttttcccagtacctatccacacccagaaacgtcatgagtaagaatggcatatactgcacaaacatgatctgatgacaggactgatagatcatcggtcccgccagtaaaaacaggactgccacgccctgcgcaatctctgtggaaaatccccgttttttcagccacccgtacagcaggcagaccgaaaccgccagacagatcacacaagcagccatcagataatcgctcattttcataaacggaagcagataagcgatcagcacgatcggattatacagcccataataggaaaaattgtaaatattctgcccgccgccgatgttcgccgcgtattccggaaaaaactgtcctgtctgataaaactgctgccggaaatactccgggaacacgctgtgctgactgatccagtccatatttgccccgaagacaccgtatcttccggcaaaaaaccagcacactgccacagtcagaacagtcagtacagcgtaagacgccagtccgcaaattttctcttttgcattactctttttcataactggaactccttatgatatagatcggacgatgtttggattccagataggttttcgagagatactctcccatgatccccatgcagagcagctggatgcctcccataaacaggatcacgcagaccattgaaggccagcccgccaccggatcgccccagatcagtgtccggatcaccagaaacaatatcattaaaaacgataccccgcagaatacaacaccaagcactgccgccaccgataaaggagccacagaaaaaccggtgatcccttccagagaatacttaaaaagctggcgcagagaccatttcgtctctcccgcgctgcgctccacattttcatattccagccattcggttttgaagccaacccagctgaagattcctttcgaaaaccggttatactcactcatctgtaacacggcatccaccattttccggcacatgatccgatagtctctcgctccgtacaccagctgtgtttttgagattttattgataaatttatagaagttttccgataaaaacgagcggatcaccggctccccggttcgatcggagcgtctggtggcgacgctgtcacagattccgcttttgaccatctcatacatcttcggcaacagttccggcggatcctgcagatccacatccatcaccaccacataatctccttttgccttacagagtcccgcgtaaatcgcagcttcttttccgaaatttctcgaaaaagaaagatactggcagcgcgcatccttctctgacagtttcttcatctccgaaagtgtcgcatcctgtgatccgtcatccacaaagatcagttcacagtccgcatctatcgcatccatcaccggacacatatgttcataatagattggtatggtctcttcttcgttccagcagggaacaatcactgatatcaggttcatactctcactcctctttccgtttcagaacgtatacttatccattttattccttcgattcagcattgtacctcctgtttcttaaaattaacgaaagataaatcctaagatttctaaagatttttttacaatctgtaaaattcctgtataatgaggagcagaaagttaccgggcaacatccggtaccatgcaattgcaaatacagtgtctggactatctattcatgccaaaacacctcgcgggatagtggctactgaatagttaccagaagttttacgaaaaagcggaggaaaacacatggagcagcaaaccacacaggttcttgtcgtagacgataacccggaaattcgtgatatcatacatgttttactggaaggggaaggtatccgggtgacagaggctgccgatggcagttcagcccttcattttctggaaaaaggcagttttgatctgattattctcgatatcatgatgccggggttaaacggatacgagacctgccagaagatccgtcagctgaccaacgtaccgatcctgtttttaagcgccagaacttctgacagtgataaacttatgggcttttccagcggcggggacgattatctggcaaagccattttcctatacggaacttctcggacgcaccagagcgctgattcgccgttatcgcatttatcagggaaaatccccgactgccggacagtcagcatccaatctgttgatctgcagcgatctgtgcctggatacccggtcggaaaaagtaactctgaaggggcagccggtaactctcacctccaccgagtaccagattctaaaactgctgctttccaaccgtcggcagattttctctccccagcggctctatgaagcaatctgggaggagccttactattacggcgccggcaacacgattaccgtccatatccggaatctgcgtcagaagatcgaaccggatccgtcgaatccggtttacataaaaaccacatggggaagggggtatcactgtgattaagattcagcatatacgtactaaactcctgcttcttctttttgcctctgttctgctctgcctcggtctttttcatactctgtgggcaaacaaatggcatgttcttcacgtgattacagaaacaaatcttcccataatgctccctgttccacagccggatgaaaatttctggaccatgcttggaacagaggctctgaactacgatattcctgattctgaatcggatacagaagccgtggaaaaactgcagtccttatttgatcggttggatgattacaccggtctttatatctatggcctggaagatggtatctaccgggcaggtcagtatccccgctgtatgggcaaagaacgctttcggtccttcttcgatatcggatatagtctgactggcggggtgaccgaacaacggcatgaaaggaatacagaattcaaaaatggctacgcgaccgtgattgtcaccttttaccacagttccatatttatctttccttactttctgttctctttgtttctgtctgtcggtctgttccttctgatcctgctgttttttttcaaccggaaaatgaaacaggtgttacttctaaaacaggaaattcttcgcatgtctgccggtgatctctccacaccggttgcatcttccggtgtcgatgagctcggcgttctctcccgggaactcgaccatcttcgtctcaccctcgatcagaatatccgccaggaacaggaggcgcaccagtccaaccgggaactgattgccgccctctctcacgatcttcgcacgccgctgactgttctccacgggtatctggacatcctgcaattaaaccgcaaccccggtatgcagaatacctatgtcacccgctgcctgcaaaaaaccgatgatattcgccggctcaccgaccggatgtttgaatatgcactggtgtacgacgtgtccgagccggaacagatccggataatccctttttcgctttcacggcttctcgaacttttccgggaacagatggattttctggaactggccggatttcacacggatatatcttttccggatgctgacatttccgacattaccacccaggacacacttacgattcaggcagacccggagctttgcaagcggatcctcaataatctgttttccaatattctgaaatatggaagcaagcaggaaacactcatgctttccatgcagcttacgccggaaagcaacaatgatgctgcgctgtgtcttgccttaaaaaatgctgtgaaaccggaacattccacaatagagagcaaccagatcggtctcaagagcagtatgcggaatatggaacggatgggtggaaagcttgtggtctgccagacagatacgttcttcgaggtaagactatctttcccggttaccgctccgtaatctccggcatcagaccatctttcatccttgataaattttcacaaaaaaggcacgaatccatcggattgtctggttccgacagcttcgtgcctttctttttttgctttattctcaatctctgttaaatacttctctgttcaggctgccttcctgatggcatacgattgttgtacataccgcatcaccagtgatgttgactgcggtacggatcatatccaggatacggtcgatacccatgatcagggcaataccttcggtcggaagtcctacggaattcagtaccatcgccagagttaccagaccaacacttggtacaccggctgtaccgatggatgccagagtggcagttacgactacggttgccaggttacccatagtaaggggaatgccataggcctgagcgataaatactactgccacaccctgcatgatggatgttccgtccatgttaatggtggcacccagagggatggtaaaagaagatatctgcttggagacacccattttcttactcagggtatcgatggacatcgggatggttgcattcgatgttgctgtggagaatgcaaatcctattaccggcaggaactttttgatgaatttgaacggattcagtctggtaaatacaaacagcagaatctgatatacgatcagacactggatcgccagagccagagttacattgcccatgtatttcaacattggggcaaatgcggagaaaccaacggtcgcaaacgtgcgggcgatcaggcagaagacaccgatcggagcgatcttcatgatcgccatggtcatctccatcatcacatcattaaactggctgaagaagtttgccacaaccgatcctctggttcccagttttgccagcatgataccgacaaacagagcaaatacgataatcggaagcatatcgccgttcgccatggactgtaccgggtttttcggaatgatatttaacagagtatccaccaggctggtggcttctgtagtggaagatacggttcctttctgaacagcatccatatcaagaccaaggcccggattaatcagcagtgcacttcccagagccacgcatacggcaagagctgtggttaccagatagaatccgatggtttttacgccaactttccccagagtcttggtatctccgatagccatacttccgcagatcagagagcagaacaccagaggtacaaccagcatctgcatcaaacggatgaatccctgtccaaccacatagagaaccccctctacgatgacggtatctttgatataaccggaaggaatccagtaatggatcacaactccaaacagggcaccgatcagcagtgcgataaatatctgagtagacagaccaattttcttctttgttttttctgcagtattttttgccattattccagccctcctgtctcatccagatattctttcagggccgctttccagtctttcggctcttcgatgccggtcagacgaagcatcatgttgtccagaacggagtaggtcggacgcgcggaatcctcgatcacaaccggatacagatccagttctccggcttttccggaatactcaaggatcgttcttgcaaattcatatctgctgcagcttcccgggcagaccacatggtagagaccgtattcttcgttgtcgataaaataacggattaccttcgccagttccttcgcgctggtcggcgccgcatactgattgttcggcacttccatcgtctttccctgtcccacattgcgaagcacttcatccacaaaatctcttccgattccatagatccaggagcttcggatgatcacaaaccggtttaacagctgagttaaaatcttttctcccgcttcttttgattttccgtagatggttctcggatgcacgttgtcaaattcattatacggaatccgtgattccttatcaaatacatcatccgtagaaatctgaatcactttcgcattgacctcattggcagccagtgccacatttctcacaccgatcgcattaacacggtatgcttcatctacattgttttcacattcctgtacatcggtcatacctgcacagttgatcacaacatccggacggttgacatgtacaaactgtgtaacctcatcaatctttgtgatgtccacttcctcgatatccgtcggcagcaactggtattccactccttcaagcagatcgagcagtgcggttccgatatgtccctccgcaccggtaatccatattttcttcatcttgttcctcccattacttttccggggtttccctgagagatctgaacatctgtaactacacgcacatgattgttgcagatattcagaccggttgacagtctcctgtttcttacgcttctttgtcgtggttttcttacaatcccatcatatgatcatttttgccacaaaatcgcctttgcataccattccctctgcctctgcagaagctgtcactgtcagctcccttcgtagacaatatcactaaaaaggtccaccggacctttttgtcgtatgcctggtaacgaaaatagcggcttgcctcccggcaagccgctaaacatactttattttacctgtatttcgtcagaaagtcaagattttacatttcaggttctgtttacatcagtgaacagaatcgatttccttccagataatctcattggcctccatatgcaaatcgaagctggttccatctcctttgtatacggtagtatcctgtggttcataagtattgtttacgatacagtatttaccattctttacataggcatgtacttctacgttatagttgctgctgaaccagcgatgcaggttttcttcatcatgcgcagcccacaggatcgcacggtacagcacacggctgttttcaaaactatatggcagaccgctgatatagacacctcttccttctccgaaggaattcactgccatctgtacctctttatcaatctgacggatgatggtggtatccggcattgcatacatgtttttctttccttctccgaagtccacatctcccttgcaatcttcgatgataaagtgtttgtgttcttcccagttgtatttatctttgttcaggtcaaatccgttctcacgttctacacccagtacgcttctcagctgaatgtatttgccttcccactgatgaccggtcggctcaccgattccgataaatccaccgccgttgtatacaaattcattgactgcagaaacgatggtttcatctgtccagttatctccaccggtgtaagcagtatctccgtcacctacgttcaggataacgtcgatatctttcagcatatccggattcttacggatatcatcaaaagtgataaaacgcacatcaaacggtgcaccactcagcgcttccatgattcctgcataagaatagttctgtttgtgatagattgcatgatgaaccatatgattgccccatgcacgcatcttaccccagctgttcagcactgctacagtttttacacagtatggtgtagttcctttgatattttcatataaggtacggaattctttacatacactttccacataatcgataaattccgggaactgtaccgccagcttcaggtatccgccgtaaccgatacggtcgatcggttttcttaagatcgcacgacgcgcggttacccagttgacttttgcttcttttaccggatctccaccctcatggaaggtatccgggaagaaatacggaaggaaacgtccctcggtatatttgacaccaggaatatcactgatcagacgaagggttgcaccatttccaacagaacctacgactgcatccagacctacggatttgaactcgtccataaacggttccataccgatccagtggtcaccgaggaacatcatggcttcttttccgtattcatgcacgatatctacaaactctttcgccagtttcgtaacttctcttctctggaacgcggtaaaatccatgaattccttggacggaatccggtacatgttgttcatgtaaccctgatcgatgataaattccgggcggaacttataaccaacttcctgttcaaactgctccagaatatacggacttaccgatgcagaataaccataccagtctacatatttctctcttgccagctcgtcaaagatcagtgtgaactgatggaaaaatgtcgtgaaacgaaccacatccacatacggatggctctccaggaattttctcagacgtttcttggagtattcttttgtcttcggctgacggacatcaaacgtgatctgtttttccacgccctgccagtcgttggtcaccgcattatacatatgcaccggatcccacataatataagccagaaaacttaccgtataatcatgaaaagccttcgccggtttaatcgtcacatccccggtctcctcactgtaactccactccgtcaccggaaccacttttcccgtcgtacggtcaatgacttcccaccatctctggatatcatcatgcgaatttacctttaacatatccggatacagatgatccattagatgaatcgacagctcaccctttgtcgctgtatggaacgatgtcataatatacatctgctgaatctcatccggattcgccttcgcccatacattatcttttctggttgtataatatgttgcgtataccttcgcatccaccttcttcaattcttccggataatcggtaccatcgcagtcacgaatcgcatctgccccccaccgtttcaccagctccagtgtctccggtacgacatccacatcagtcggaatcgttactctgcccgttgtacactctttacccataacacacacctctccctttctttattatcactctcggaaccttaccaattccgcttatatccaatcccaaatcataaatcaccagaaataactgccgacaatgaccttttcccctatctgtctctcactgccggcagtcctattccagtctgcatcagacaggcggctgtttcccgtccgctgcactaaattcattatatccaatccccaccattctttctatgctacttttgttccaaacattagatatcttgcggtataagcgattctttgctatactgacgtatataaaccagtaaaatattttatctacggtttttctagtggcatcctacgatattttcctgcgcaaacttctcgcagcatcatactgttccgggtttgccaccgtcagaaattgcggtcatgcttctggagccacacagccttttgctggtgcccttagcaaagatgaaatccggcacttacctacggaacctgccactggcagcttccttcggatgcaatgcaacgcagacttttacgaggggcagccgaccctcgcaaacatagtcggagttagtgactagttcagatttgcgttaccaacggttgtgtggctccagaagcatgaccgcaatttcgtccgtctatcaaccttttaccaaaaacaaggaggtatatccccatatgtccacactttcatactccctaaccgacctgtcccccgaacaccaaacccaccagcacctccgctacgtaacctcctcctccttcggctccgactggaacagcgtcctccactcccacgactgcaccgaactcttctacgtgaccgacggcgaaggatggctgtgcaccgacgaaacccggatccccctgcgaaaaaacaccctcgtcatcgtcaaccccaaagtccaccataccgaacgctcctcaccagaaaaaaaaatgcactatattgtgcttggaatcgataacctccagttttgcttccacgaaggagaaaccttctcccccttccagatcttccagctctcctcccaccgggagatgatcctctcactcctgcacgcgatcctggaagaactgcaaaaaaaacagacttcctatgaggaagtctgccagcattacctgtccatcctgctgttgcagctccaccggatcaccggggaggaattttcctttgcgccgccaaccgatattccgtatgaatgtcagcgcgccaaagcctacatcgaagagcacttccacgaaccggtaacactcgagcggatcgcagccatcgtccactgggataaatactacctctcccatcagttttctgctgccttctccgtctcgccgatcaactacctgctgcaactgcggatcgcccacagcaaacgattgttgtgtgacaccgattactccatcacacagatcgccgagtccagtggattttcttcgcagaactattttacacaggcatttaaaaaactggtaggtgtctctccacgaacctatcgtcagaagcaccagaaataaatagtcaaaatcgatccacagatcaatttttgttatctattgcagtaaaaaatcagatgccgttacagtatttctgtagcccgcatctgattttctgtttttctattactttcccgcctgagcaactatacacacagccactccatcaccacagcagcttctgaatttcttagattcttgcaactcccgtatctcttgcagccttcgcaactgcctcggcaactgcctttgccacccgtttgtcaaacggattcggaatgatatactctgcatttctctcttcgtccgtgataatatttgcgatcgcatatgcagcggctaccttcatctcatcgttgatatcgctcgctctcacatccagcgcaccacggaagatacccgggaatgccagtacgttgttgatctggttcgggaaatcacttcttccggttccgattacggctgcacctgctgcctttgcctcttccggcataatctccggtgtcgggtttgccatcgggaaaagaatcggattcggagccattgtgcgaaccatttcctgtgtcaccgttcccggtgcggatacaccgataaatacgtctgcccccttgatcacatctgctagacttcctttttccatgttccggttggagatctcagccatctcttctttttctttgttcagtccttcacggcctttgtagattgcacccttccggtcacacatgatcacatttttcagacccatgctgatcagcagtttgatgatcgcgataccggctgcacctgctccggaagttactactttgatctcatcgatcttctttccgactactttcagcgcattgagcatagctgccattgttaccactgcggttccatgctggtcatcgtggaaaatcggaatatcacaacactcttttaacttgcgctcgatctcaaaacaacgcggtgcggagatatcttccagattgactccaccgaaacttcctgccagcaggctgacggtctttacgatctcgtccacatctttggttcgcacacacagtggaaatgcatccacatcgccaaatgccttaaacagacagcattttccttccataaccggcataccggcttccggtccaatatcacccagtcccagtacggcacttccgtctgtgacaaccgctaccatattgtgacggcgggtatatttataagaaagattcacatcctctgatattttgatgcagggttctgcaacacccggtgtatagcaaacagccagatcttccggtgtttccagttttgcacgactgatcacttcaatttttccagcccatttttcgtgttcctgtaaagcgaattctttgttatccatgtttctcctcctgcatatattgttatttcgtaactattcagtagccactgtcccgcgaggtgttttgacatgaatatgtcaaaatcccgagacatacaagccaaaatgccatcaccgaaggtgatttacgcgagcaacgagtcaaagtccgtgcttgcacggaaccttgaggagtgccgcga

SEQ ID NO: 2486 - DNA, 4548 bp, Unknown
  gut microbiota DNA sequence
aaaggaaatacagaactgacagagaaaatgaatgcggccatcaaggaactgaaagaggatggaactctggataagatcatggcaaactacatcggtgatgaccagggaagctaccagtacgagactccggaaggaaccgaatatacaaacggtacactgaccatggctaccaacgcagagtttgagccctgggagtacaaagagggggataatgtcgtaggtatcgatgcagatatggcgaaagcaatctgtgacaagatgggttatgatctgaaaattgacgatatggcatttgaatctatcctggcagctgtttccagcggtaaggctgagttcggtgcagctggtatgactgtgacagatgagagaaaagagagtgttgattttacagatacttatgcgaatgcgtcacaggttgtgattgttagaaaataaatatttggatacccgggtggggttcgcttgatatttcaatactccgacccgctcccgctcagctgacactggcagcggtactaaggcagcaaaatacgctgcctaaggaccggccgtgtcagatggtctgcgtattgaaatatcaagcgaaccttcgcaggcgggaggtaagaaaatatattttctgacaatgggggatggcttttatgttagtgaggtttagtaaggtgaaagataatccccgggatatgagagatgaagtaaaaaatatacgaaaagaccttgtaaaaggagtgtaagggaaacgatatgggatctttaagtcattgggttcacaggtattttgtggataatggggcttccagttggtggttgacgggtttgcggaatacgttgctgattacggtgttggcactttgtattggtgtggtgcttgggtttacggtggcgattattcggtcgacttatgagcagacagggaagctgaaggtgctgaatgcgatttgtaaggtgtatctgagtgttatccgtggtacgcctacgatggttcaggtgttgatatttaactttgttatatttgcttccatcgcggtgaatgaagttatcgttggtggtgtggcatttggtattaactccggtgcgtatgtggcggagatcgtgcggtcgggtatcatgtccatcgataaaggacagatggaggccggacggagtctgggacttagttccggacagacgatgaagctgatcattatgccccaggcatttaaaaatgtgctgccggcactgattaatgagatgatcgtgctgctgaaagagacatctatcatcggttacatcggtatgacggatatcacgaaagcagcgacactggtacagagccgtacatacgaagcctttgtaccgttgatcgcagctgcagtattttactgggtgctggtaacgattctgacatactttatgggtaaactggagaggaggttgagaaaaagtgaccgcaaataaaggaaaagttttattgcaggtacagggactggagaagaagtttgatgataaccaggttctggacggtatcaccacagatatctgtcagggtgaagtggtagcagtcatcggcccatccggttccggaaaatctacgtttcttcgttctctgaaccttctggaagtgcctaccggtggtcagatcctttttgaaggtgtggacattaccgatccgaaagtcgatatcaaccgtcatcgccagaaaattggtatggtattccagcagtttaacctgtttccacataagaccgttaaggaaaatattatgctggctccggttacgctcggactgacgaaagaagacgaagctgcaaaaatagcggaagaacttctcgcccgtgtaggacttccggataaagcggatgcttacccggacagcctttccggtggtcagaagcagcgaatcgcaatcgcccgtgcactggcgatgaatccggatgtcatgctttttgacgagccgacttcagcgcttgatccggagatggttggagaagtactggagatcatgaaagaactggcacagagcggtatgaccatggtggttgttacccacgagatgggatttgcaagagaagttgcaaccagagttctcttcattgatgaaggaaagatccaggaagaaaatgttccggaagagtttttcgcacatccgaagaacgcgagactacaggaatttttatcgaaagtattataaaataatgagcaatgactggaaatggtcattgctcattattgcgttgaacatatttctgtacagggggaaatttatatggacaagataatgatgtggatcatggcaatctgtgctctgatcggtggaacggaccggttgctggggaatcgtcttgggctgggaaaacgatttgaggacggatttcagctccttggaccgacagcgctttccatggctggactgatttgcattacgccgttggtatcactgggattggaatacacgattgtgccattttatcgtatgcttcatctggatccaggtatgctgggtgggattctggctcttgatatgggaggctaccagctttgtaaagaactggcactggatcctgcgattggaagatacggaggaattatcgttggtgctacgcttggctgtacgattacttttacgattccggtagggatgggaatgttaggcgagcgggagaagccattgtttgcaaaaggaatattagcaggtttgagtgcgctgcctgtcggaattttggtgggcggactgttgtgcggtctttctattgggaaattgctcattcagagtattccggtatttcttctggcggtactgttgatactgggactttcccgattcccggatgggatgattcgtggatttcgtgtttttgcagaaataattcgtggtgcaggaacaattggtattgctctgggagcattttcctacatgaccggagtgcagctgcttccggagatgacaggtctggatgaggcactgggggtagtttcctctattgggattgttcttttgggcagtctgccatttgcagagattctgcagcacctgctgaaaaaaccgctggaatgggtgggcgagaagattggtcttggacgacttggtactgcgggacttcttgtgggaattgtcagtgccttgcctgtgatagcagatatgaaacagatgaacgagagagaaatcgtgatgaatgcagctcttctggtgtgtggaacatccatggtggcagcacatctcggatttgtcctgggtgtggatgctccggcgacaggagcacttctggctggaaaactgaccgggggcattgcaggagtctggatggcatggcagatcatgaaaaagactgaaagcagcagagacagatagatacaaatctaaaatacaggtatagaaatacagaattttaagttgagtttttctgacaatatggtatactaaatattatgacgcatgtgatacggagtagaaaagactgaaattacatatacaaccggcatctgtatagaaaagtcagaaatacgaaaggatatagaactatgaatcaggaaaacttacagacaggaaagcaggaggcaatccagggattcgatattgagggaatatttctggaatgtacaccttgtggaaatggtcatattaatgatacttttatgatgtcatttgacagaaacggggaaacacatcggtattctctgcagcacatgaaccggtccgtattcaaggatccggtttctctgatgaataatattcttcatgtgactgcttatctgaaagagcagattaaggcacagggtggagatccgcagagagaaacactggattttgtatgtgctaagaatggagaatcgtattttgtagacagttttggagagtactggagagcctatcattttatagaagatgcatatgcactggatgaaataaaggatccgcaggatttttatgagagtgctgtggcatttggaaattttcagagaatgctggcagattttccggcagatacactgacagaaactattgccggatttcatgataccaaggcacggtttgcagcgttcgaaaaagtagtagaagaggatgtatgcggaagagtagctgaagtgcagaaagagattcagtttgtgaaggatcgctatgatgtggcatgtgtgctgggcgatttgttagaagctggtgaacttccacttcgtgtaacgcataacgataccaagtcaaacaatgttctgatggataatgcgaccggcaaaggtctttgtgtcattgacctggacacagtaatgccgggactggcggtaaatgattttggtgattccattcgtttcggcgcgagtacaggtacggaggatgaaaaggatctttccaaaatttcctgtgatatggaactgtatgatatctatacaaaaggtttcgtagaaggatgcagcggtgcgctgacggatatggagattgagtgtctgccgatcggagcgaaggttatgacctatgagtgtggaatgagattcctgacagattatctgtccggggatacatattttaagattgattatccgacacacaacctggatcgcacgagaacacaactgaaa

SEQ ID NO: 2487 - DNA, 9513 bp, Unknown
  gut microbiota DNA sequence
ttgtcttctttttcagatctcttctaaggaactgtaacggagacagggaaagttttttataaaggattcccgcatttaccactgccatcagtgccagcggaaccagtgtggtcttccagaacgcttccacactccagagcgtatgatacgtcggcagactgtaacttccgtaatacatgccggcgcagaaattcttaaataccgtatagcccaggatatttccgatcagtgccccgatcagagtaacaaccagcggcatcgtcatataatgacgtaccagttctcctttcgtgtaaccggaagcccgcagcgtaccgatcacatttgcctctttgctgatcgtattgctcaccgtcacgccgaagacaaatgccatgatcacgatgataatatacaaaagcactgtcatcatcgccttatcgcttccaaaatcatccccggtaaaagtgatcgcctgattcagatatctcgggataaaggtctctaattttgtttcatccctcaccacatccatcagatcttctgccatctctttttcctgcagttcatccgaaggctcattcctgtatttccaggaataactgtaattttgctgttcgtttgccagcgccgcatagccctccggtgtcacgataccaacgccgaacttcacggcatcaaacatcgtatcgttgttgtcctcgaacaggcagctgtaatccggcagtgccacatagccggtgatcttccagctgtattttccgtcggcgctctcgatcgtatccccgactttcaggctgttattgtccgcatacatacggtcaatggcaatctcatcggtctgcgtcggcatttcccctttcatcaggcagaccgtgttgacttcctctctgtctttgaaaatacgcatcgtactctcgttcgtcagtgcttcctcggtataaaagttctcatataacgttacgcccgcatcttcgatgtttttgatctgtgctttgttcgcctgcttttccagaaggaaattcccgttttccacattgtatgtttcaaatccatcgttgtaggctttcagcatactgctggtcgctatcaggaaaccggatatcagcccgatcgtggctaccagcagcagaaaaatcaccagatattttccaaattccgttttcagttcccggggcagacgttttctcagtggatttttcatcttcttcccccttaccattccagattctccgcatgtacccgcttctcattgatcacgttgcttcggatcatgccgtcttttagccgcactacgcgggtagccatatctttgatcgcatcgttatgcgtaaccatgataatggtattgccgtatttttcattgaccgtttcgatcagtttcaggatttccttggatgtcttatagtccagcgctccggtcggctcatcgcagagcaggatatccgggttcttgacgatagctcgtccgatcgcggttcgctgctgctgaccaccggacaactgattcggcagtttgttgcggtgctcgtaaagtccgagtgtatgtaacagttcgtccacatccagcggtttatcactcagataagctccgacttcgatattttcccgcacggtcagattcgggatcagattatacatctggaaaatgtaacccagatgttttcttcgatagatggtcagtcgtttttctttcatatctgccatctgctcgccatggatcacgatttctccctcatctgcctggtcaataccaccgatgatatttagcagtgtcgattttccggatccggatggtccaaggagcacacaaaactctccctgttccatttccagatcgattccctttaatacgtctaccttactctcaccctgtccaaaggacttcttgatttgttgtaatgtaagaaacataaacttcctccggttttctttccctttttctaattgctttccgctggcgcatcctctccctcagaaaactgctgccgcgtattcccgtttccgtgattcgctgcaactgtttttattcagttgcagctgttcgcaattagttttttctaactattttaccactatttattctgcttttggcttccattgatgataaattttctcatttactacccgcttgtatttttttatccaagtgccacatccagaatcatcatcaggcagaagccaaccccgaaaaacagggttccgatgttcgaatgttctccggtggacatctccgggatcagttcttccacaaccacgtagatcatcgctcccgctgcaaaactgagcagataaggcagcgccggaacgatcagacctgccgccaggatcgtgatcgccgcactgatcggctccacgatgccggataacgttcctcccacgaatgctttggatttcttcataccctccgcgcgaagcggcatggaaataatcgctccctccggaaagttctggatcgcgataccgatggaaagtgccagtgctcccatcgctgtgatcttggtatttccggtcagatatcccgcgtaaaccacaccgaccgccattccttccgggatgttgtgcagggtcactgccagcaccagcatcgtcgttctcgccagtttgctcttcggtccttctgctttctcactgttccggtgcagatgcggaatgatgtgatccagcaacagcaggaataaaataccgatccagaatcccactgctgccggaagaaatgccagccgtccaagggattccgactgttccatcgcaggaatcagaagactccacaccgaagccgccaccatcacgcctgccgcaaaaccggtcagtgcccgttgtacaagatcactcagctccttcttcataaaaaatacccccgccgctcccagcgttgttcccgcaaaaggaatcaaaattccataaatgacttctatattcatcttatcactactcctttccctttatggttagtttattctaactcatttgttttttcaattcctttttgctttaccgagaatctttcgcaatgtacggagtaacagaactggcaccgctggtttattctatgtgattgcccccttatctgctatctgtttttcataaaactgtaattaacctggttccatgattactatgaaaggaagcaaaaagcacctgcaacatggaatatttttatcctcatgctacaggtgtttctattttctctatgctattttgttttcttacatctcatattttttcacaaacagtgcccggatcgcgttcagtactgcgatcaccatgacaccgacatcggcgaagattgccatccacatgttggcgataccaagtgcgccgagtaacaggcagatcagcttgatgccgatggcaaaataaatgttttcgtatacgatacggatacattttcttgcgatatgaatggctgtcgcgatcttcagcggatcatcatccatcagaacgatatcggctgcttcgatagccgcatcggatcccatcgcacccatggcgattcccacatcagctctggagagtaccggtgcatcgttgattccgtcaccgacaaatgccagtttttctttttctgtcttgttggcaagtaatgcttctactttgcttactttatcgcccggaagcagctcactgtaaacttcctggatacccaggccttttgctacataatccgctacattcttccggtcaccggtcaacatgatcgtctttttcacaccgcattttttcagttctttgattgcctgttttgcatgcggttttactgtatcggaaatcaggatatgtcctgcgtatttaccgtctactgccatatgcaccaccgtaccgacatggctgcacgctacaaactcgatgcccagtttttccatcagtttttcatttcctgccgctacggacacgccatccactttcgcggtgacaccgttaccgctgatctcttccatatcggtgacacggcttctgtcgatttcttttccatacgctttctgcaggctcttactaatcggatgggaggatgagcactctgcaagcactgcatactccagaagtttttcttcttccatctcgttatgatgtacaccgcttacttcaaacacaccctgtgtcatcgtgccggtcttatcaaataccacatattttgtctgggacagggtttccagatagttggagcctttgaccaggacacccgctttgctcgcgccaccgataccggcgaagaaactcagcggaatactgatgaccagtgcacacgggcagctgataaccaggaaggtcagtgcacggtagatccagtcgccccattccggtgacagacccatgaaaagcatccgtaccagcggaggcagaacagccagcgctactgctccgtagcagactgcaggagtataatattttgcgaatttggagataaagttctcggatcttgatttctgggaacttgcattttccaccagatccagaatcttggatacggtggactctccgaactctttagttgtctgaatctttaatacaccgctcatgttgatgcatccgctgacaatctcatcgccacattttgcatcctgcggtacgctctcaccggtcagggcactggtattcagtgtggaggatccctctaccacaataccgtcgatcggcactttctcacccggctgtaccacgatgatcgagccaatctctacctcatccggatcgacctgttccagttttccatccttctcaatatttgcataatctggacggatatccatcagatcactgatgtttctgcggctctttccaaccgcataactctggaaaagttctccgatctgataaaacagcataacggaaacgccctctttgtagtcaccgagaagaatcgctcccatggttgccactgccatcagaaagttctcatcaaatacctgccggttcatgataccctttcctgcttttttcaggatatcatacccgatcaccagatacgggatcataaagagcccgaactttacatatccttcgatcggaagcagggaaaaagcaacgaccagaatagccgctacaatgatacgaatcagcatttttttctgcttcttattcataataaagcctccctcacgtaaaaatacagcgtaaagaaacaacttcgttttcccgggcagttctctctttacgctgtcatggtatcttacagataaatctcgcagtcgtcttctactttcttgcagtttttcagaacatcctgcataacggctttcggatcctgtccttcttcaaattctacgctcatcttcagtgtcatgaagtttacgtttgcgtcctttacaccagctgtgttctttgctgcttcttccattttgtttgcacagtttgcgcagtctacttcgatcttatatgtttttttcatatccgttaccttttacctttctttttgttttcaatgttatatatgagcacttgttcatatgtttgattttattatagcatcagttttctgattgtcaactgtttttctgaatttcttttattatttttgggcatgccctcttttcccggttctgcctgatagtttctatatataagaaaaaacgccctgcccttttcaaaaggcaaagcgttttttccatccgatgcttgttctttttatttcacaattttcaacagtacttccgtctcttttctcttcggagcctccggtacttcttccgggtagccgagtgcgatcaatgcggatacggattccgtctccgggatctggagaacttcttttactttttcttcttcaaagattcccatgataaccgttcccagacctttttcccaggctgccaggcagaaggcttctcccgcaagccctgcatcgtaggactgccagtgtgttcccttggaagtggaaaaagaaccgtctctctcatacccggatctctcattgaccgttgtctccacgatcagtaccgacgcctctccaataatccgctgattgccggcgaatcccatgacacaggtatcggcgatctcctgctttttctccgggtttactaccgcaatataacgggatgtctgtgtatttttccagctcggtgcatacgcagccgtggcaacgatctcacggatatcgtcctcgctcactgcctgatcggtaaattttctggtgcttcttctctctttgatgccttttactaattccatgtgttttcctcctcctgctcttatccgtactcctggaattcttccgacgaacaagccaatattttgtttggtttaccgtctccataaacgagacaaaacggaaaaatcggagaacagctctttgcaaagtcattctccggttcttcgtatgctttttattatttttacatgattatgttccgcttgtcaaccaagtgcacgctgtattattcgcccagtttctttcctgtcagcatctcatagctctgcaggtatttgtcgatggtcttgtccacgatttcctgcggcagtgtccagttgttatccgggttggctttcagccagtcgcgggcaaactgtttgtcgaaagatggctggctgtgtcctgcttcgtagccatctgccggccagaaacgggagctgtccggtgtgagcatctcatcaccgatcaccatatttccttcttcatccagaccaaattcaaatttggtatctgcaatgatgatgcctttgctcagtgcgtattctgcacattttttatacagtgcgatggtgttgtcacgaagtttctcagccagttcctgtcctcttcccgggaagtatttttccaggtgagctacgctctgttcaaaagaaatgttctcgtcgtgatcaccgatctctgctttggtagacggggtgtaaataggctccggcagtttatcggattctttcagtccttccggaagttcgataccacagacttttccggttttcttatagctttcccagccacttcctgtgatgtagccacgaacgatacattcgatcggcagcatctccagtttccggcacatcatgctgttgccgtcaaatttgtcctgctggaagaattccggcatatctttgacatctacagaaatcatatggttcggaatgatatcctctgtcatgtcgaaccagaacttggacatctgtgtcagaacagtacctttcttggtcacttcgttgttcaggatcacatcaaaacagctgatacggtctgttgctaccatgatcaggctgtcaccgttatcataaatctcacgtacttttccttctttaataggtttcatttcctgcattttacacacctcatcctttttttcttagacaatgtctgatgtattttcagtacaaaaaaagcctaccactatctgagatagattgtcaataccttacccggttttcacttatagttttaaaagcagcttattaataagttatacttatattttaatattctttattaagttttgtttctaaatcgcacaactttgattatcacggcagtcaccaaactctcgtacaatcacgaactttggttcgttacccgcgaaaaaagagccatacgcttttgtttgcatataactctcctgattcttattttccctcttccagcagctgtagaaactctgcctgtggcatcggtttgtaataataatatccctgaatataatcgcatccgttctcccgtaagaacgctacctgttcttcggtctccgcgccctcggctaccaggcggatccccagctggtgtgccatatcgatgatcgcccgcaggatgctctctgtctttttgttcacaccgatatttcgcacaaagctgatatcaatcttcaggatatcgaaatcatagtcctgcaacattccaaacgaagaatagccgcttccgaaatcgtccagcaggatcttcgctccgttctctctcagacgcatcagcatccgggtgtgattctctccgatcgcggcaagggaagtttccgtgatctcaaaacggatcatttttttctcttccttccctccacattgcagtcccgatacaatccattccagcatattttcatcgtaaaaatccatccaggaaaggtttaccgataccggaactgccggacggctttcttttctccgctgttccagacattctataactttccgaaccatgtaacggtcaagttcggaaatatatcctcccttttccagtgccggaataaactgtcccggtgagataaatcccttggtttcatggaaccaccgcaccagtgcttccgccgacgcgatctttccggtcttcgcatctacaaccggctgataaaacacctgaaattcctgtttcgcgatcccgtcttcgaactccgaacagatctccatctcatccacataagtatcctgcatattgtttttaaataccgtatatggtttcagatattcatctgtaatatattctttcgccagttttgctctgtcgatcatacttgtgatcgacatggtttcatcctggatgtaatacacgccacaggtactgtaaatgtgcatctgtctcttctcttcgccataactgaaatcacagaactctgtcagataatcaaaatccagggtttttttctcaatcaggcaggcaaaatgatcggactcgatacgtgccatatccaccggatccagttttgaccggagaatccgctgataaaaccactgcagcagtttatctccgccgcccactcccagcagttcattgattgctttaaaatttttaatattaaagaataacagaatatattcttctgtctctctctctttcagcactctggcaacctggcggataaatgcttttctgttatatcctccggttacctggtctatgtagtcccgctcaaacagtgcaatcgtatttcttactctgctgataacaattcttgcatcaaacggccggctgaaataatcgcttgcgcccatctcatacgcccgtccgatatattcgttggatgtctctgcggatatgataataactggaagttctttcaaccagttttgctcctgcatcacgcgtaaaaccccaaaaccgtccagttttggcatcgtgatatccagaagtacgatagaaaaaccaaagcgtccttccttcatgatctcaatggctttctccccgtcttccgcctccacaatctcatattcatcttccagcatcccggtcagaatgtcccgattcatctcggagtcatcgacaatcaggatctttttctttctcatctgtttcattggaattttctccatgtaatggctgttgctaaccccccgccactataatcaccattttatatattatttgtaactgttcagttccttcacagttacaggcaaaaatgcatttaagatcaccttcggtgatggcatttttgctcgtatgtctcgggattttggcatattcatgccaaaacgcctcgcggaatattacctactgaatagttactattatttaaatttatcactctagtatatcagaatatattataacgtattttcgacgcagtgtctatcttttcacaacattttgaaagcgccggttcttttttacttctaccccccccc

SEQ ID NO: 2488 - DNA, 16317 bp, Unknown
  gut microbiota DNA sequence
gtgtcccagttcttcgacttctcatcatttttatcttattttgcgtctgccggtacgtctttgatgctgaagctcattcttcccatcttgtctttacccatgcagattactttcacttcgtcgcccaatgtcagaacatcttctacccggttgatacgctctttggcgatcttggagatatgaaccataccttcttttccaggagcgaactcgataaacgcaccgaattctttgatgcttactactttaccggtgaagatctgaccttctttgtagtctgttacgatggtctggatatagtgaattgctttatccatcatcttctgttcggttccgcagatagaaactgctccgtcatctgtgatatcgatttttacaccggtctcatcgatgatcgcgttgattgtttttcctctctggcctacaacgtcaccgatcttttccggatcgatcttgatctgaacgatcttcggtgcgtattcattcacatgctctctcggacctgcgatgcatttttccataacttcggtcaggatatattctcttgcctgttttgtctttgcaattgcctcttcgatgatcggacgggtcagaccgtgaatcttgatatccatctggatcgctgtgataccgtcatgagtacctgctactttgaagtccatatcgccgaagaagtcttcgagtccctggatatcggtcagaacgatgtaatcgtcatcggtctcgccggttaccagaccacaggagatacctgctaccggtttcttgatcggtacacctgctgccatcagagacatggtagatgcacagatacttgcctgagaagtagagccgttggattcgaaagtttcagatacggtacggattgcatacgggaattcttcctcgctcggcagtaccggaaccagagctttctcagccagtgcgccatgaccgatctcacgacgtcccggtccacggctcggttttgtttcacctacagagtaggacgggaagttatagtgatgcatgtaacgttttccggtctcgaactcatccagtccatccagacgctgtccctcagacagaggtgccagagtggtgatggtacagatctgtgtctgtcctctggtaaacatagcggaaccatgaacacgcggtacgatatcggtttctgctgccagcggacggatctgtgtgatcgcacggccatccggacgtttgtggtctttcaggatcatcttacgaacggtctttttctggtactggtatacagcttcgcccagaacagccagccattcctcattatctgcaaatgctccttccagttttgctgttacctgacggatattttcttctcttgtctgtttgtcatcggagaatacggcaacttccatctcttccggtgttacgatctctttcattgctgcgaacagttcttccggaactgcacaggattcatagctgtgttttgcttttccgcagtcagctacgatcttgtcgataaatgcaatgatctctttgtttactttatcagcttcaaagattgcttcgatcatcttagcttccggaacttcgtttgctccggcttcgatcatgatcactttttctcttgtggaagcaacggtcagtttcagatcggatctggaattctgctccagcgtcgggttgatgatcagctcgccgtcgatcataccaacctgtgttgctgcacacggtccgtcaaacgggatatcggagatgcaggttgcgatagaggaacccagcattgctacgacttccggattacactgcggatctacagacattaccatattgttcagggtaacatcgttacggtaatccttcgggaacagcggacgcatcggacggtcgatcacacgggaggtcaggattgcatgctcggatgcttttccttctctcttgttgaatccacctggaatctttcctactgcatacattttttcttcatattctacacttaacgggaagaaatcgattccttctcttggcttttctgatgcggttgcggtagaaagtacaacggtatcaccataatgcataaatgctgcgccgttagcctgttttgccacacggtcaatgtcaactgtcagtgttcttcctgccagttccatagaataacttttgtacatacattttctcctttttctgccctctccgggcgatttttgccggcggatatgctccgaaacaactgaaaaacacactctcttttcattccgacaatgtgcttttcagtggtctcggccgtcctctccggcgtcttacaggtacattttgcactgtataagataaaagggatggaagaataccttccacccctcgccattcttatctctgtgcagttgaattactttctgattcctaatttttcgatcagtgcacgatatctttcgatatctgttttcttcaggtaatccagcagacctcttctctgacctaccattttcagcagacctcttctggaatgatgatctttgtgatgtgttttcagatgctctgtcagctcctggattcttgctgtcagtacagctacctgtacttccggtgaacctgtgtcgccttctgttcttgcgtattcagccataatagcctgtttcttttctttagaaatcattttgttttcctcctattttttcaatcgccacatattaagaaatggtcggagtgtccgatatctgaatatgggctaactcatacttggacagtataccatatgctctcaggaatgtaaacctcttttttgaaaatattgctttcctgcattggcatctctctggatctgtgctttcagttcttccaccgaatcaaacttgcactccggacgcacgaaatgatagaattccacccatgcttcctccccgtacagatcttcgtcgcagtcgaacagataggtctcgacacctgcaaacggcacttccacagtaggtttcacaccgacattggagattccgtagaatgttttccctttgataaacgttttcgacgcatagactccgaacggcggaagcagttttccgtcctccggtacctgattgatcgtcggaagtccccacgtccgtccgagctgtcttccgtgtacaacctcacccagcacaaaataccggtatcccagaagatcattgactttctcgatatttccttcctgaagtacttcgcggatccaggtgctgctgaccggtcgttcttctctggtctctttacttaagatctccacttcatatccatatcgggttcccagctcctgtaacagctgtggagttccctttctttcatatccgaagtgaaaatccggtccgaccaccacatacgcggcgcgcagctgttttaccaggatttccctgataaaatcctccggctccatctgtatgatctccggaatgaacggacactccaccaggcagtctacgccacggcgttccagaagaatcctgcgctcttcgttcgtaaggatcgtccgtttgatcctggttcccagttttacaagaggggagacatcaaaggtaaataccactgtctcatacccttctttgccgatctccatcacccggttgatcagtttgctgtgtccggtatggacgccgtcaaactttccgagtgtcaccacgcttcgtttatccagttgaaaatccagattctttgtaatatatttcatgtctctttccattcttctctttgtatacaatacatccagttttccgtttaattttctttccggtaaaacattttcaccggtaccagctggtctgtcttcttctcaaacagcccgataaaggtatcttcgctgtcgtaaacccggacataaccgctttctgcctccggttcttcctgtaacagttccgaaaagagccggttgccgttatgcaccagcagatcgccctgcgtagtcgtctttgccgtcggatactggtcaaatatccggtcaaccggaaagatcaggctgtcgaccgttccctcttccatggctttctgcacttcatcgagttttaccgcatcttccagtgcaaaccgttccactctggtacgcagaagttcttccatgcagccgccacagcccagtttttccccgatatcgttgcaaagggtccggatatatgttcccttggaacactgcacccggatctttactttcggaagttccatccacagaacctcaattttatgaaaggtaaccggtctggcttttcgttccacgacttttccttcccgtgccagttcgtataatttctttccgttgactttcagcgcagaatacatcggcggaacctgcatctgttctccctgaaacgaaagaatgcaggtgcggacttcttcttccgacacctgcactgatgactcctgcaggacatttccttccatgtcctgggtatcggtggtgattcccaaccgaagcactgcctcgtattccttatcatgatctgccagcagatcgcacagtttggttccttttccaaggcagaccggcaggacaccctgtgcctgtggatccagggttcccgtatgaccgatctttttttgttttaagattccacgaagcttcgccaccacatcatgggaagtgtagcctgcttctttgtatatgttgattacaccgcttctttccatctgtttactcctgcagctgtctttctatatccagtgtcagactgtttaccacatcgaacacggatccctgcatcgtacatccggccgctttcacgtgaccgccgcctccgaaataagaagctactctcgccacatctactttgccgttggaacgcatgctgactttgtattcctgcacaccaatctcatataagaagatcgcaacttccacgccacgggtgttctgcagctggttgacgataccatccatgtctttcggtgtcacaccgtaaaaatccatgtctttctgtctcacataacccacgatacaccgctgattcagaagcatgatgctctccatgatcgtccggcccatgatctggttctgcgcgtaggatttggtgtagaaagaatctttgatgatgctggtaaaatcaatgccttttgccatcagctgtccggcaatctccatcgttcgggttccggtgcagctgtactggaacacaccggtatcatgaacaattccggtatacagtgcttccgcacaggctttgttgatcttttccggctccagcagctcatagagcacttcacaggtggaacttgcatccggaacgatctgattcttctgcgcaagtcctttgtttgtgatgtgatgatcgatgcacgcagtcatcttcgccgtctccagtgcccgaccggcaacgccgatccgatctatactgctgacatcaaagcccaggaacagatcgtacgctttgtcctcccactcctgttttgccttgtcgatatcctgaataaaatgaaagacttccggcacttcttccagatagacatctgcctggatctgcggataattttctttcaggtacagatacattcccatgcaggaacccacacagtcaccgtccggtcttacatgaccggcgatggctactgtggttacgccctcaagtacagacgcaatattatttatcatcttcctcatccctttccggggtttctttgtttacctcgtcaattaatctggacatgtgtacgccgtattcaatcgactgatccagtacgaactgaatctccggggtattgcgaaggttcagacgttttgccagctggcggcgtacatatccttctgcactgcgaagaccggcgatggtatctttcttttcctcatcggaacccatcacgctgatgtaagccttgcaggttttcagatccggtgccacttccacggaagtgacggatgtcatcatatgaatccgtggatctttgatctcctggcggatgatgaggcttaattccttcatcacttcgccgttgatccttgtatttttaatgctgttttttctcattttctatcacctcaatccggtatgcaaagcctatctcggtacttctaccatgatatacgcttctacctgatccagttcctggatatcgttgaatccttcgaataccagaccacattcataaccggcttttacttcttttacatcatctttgaatcgtttcagagatgccagaggtccttcgaagatctgttttccttctctggagattcttacggtgcagcctctctggaagacaccatccagaacgtagcttccggcgatattgccgacaccggatgccttgaagatctgacgaacttctgcatgaccgatcactttctcttcgaagacaggatccagcatacccttcatggcagcttccacatcttcgattgcctgatagatgacacggtacagacgcaggtctacgccttcctgctctgcggttgcttttgcggttgcgtccggacgaacgttgaaaccgatgatgatcgcgttggatgcggaagccagagttacgtcggattcgttgatcgcacctacaccaccatggatgatcttaacgacaacttcatcgttggacagtttcaccagactctgttttacggcttctacagatccctgtacatcggcttttacgatgatgttcagttctttcaggttaccttcctgaatctggttgaacagatcatccagagacatcttcgctttcgtctcttccagcaaacggtttttattttcagaaataaaggttgctgcaaagttctttgcttctttatcattttcggtagctaccagaacttcaccggcattcggtacatcagacagaccaaggatctctaccggagtagacggacctgccgttttgacacggcgtcccttgtcatccatcatcgcacggactttacctgaggaagctcctgctgcgatgaagtcaccgacatgcagggtacctttctgtaccagaatggtagcaacagggccttttcctttatcaagctgtgcctcaataaccagaccacgtgcttttctgttcgggtttgctttcagttcgcatacttcggaagtcagcaggatcatttccagcaggtcttcgataccctcatgtgtctttgcagataccggaacgaagatggtgcttccaccccagtcttccgggatcagctcgtactcggaaagttcctgttttactctctcgatgttggcactcggtttatctaccttgttgatcgcaacgatgatctcaacacctgctgcttttgcatggttgatcgcttctacagtctgcggcatcacaccgtcgtccgctgcaactaccagaacggcgatatcggtggagtttgctccacgcatacgcattgcggtaaatgcttcgtgacccggagtatccaggaatgtgatcttctgacctttgatggataccacatacgcaccgatgtgctgtgtgataccacctgcctcacggtcggttacattggtcttacggatcgcatccagcagggaagtttttccgtggtcaacgtgtcccataacgcagacaaccggcggtctcggaacgagatctttcggatcttcctcttcctcttttaacagttcttcgatcacatcgactttttcttcctgttctgcgatgatatcgtagtccagtgcgatctcctgtgctttttcaaaatcgatctcatggtttacggtaaccatggttccttccatgaacagtttcttaacgatcactgcaggctgcattttcatcttttcagccagctcgcggatggtcattttctccggaagtgtaatctctttgactacttctttcttttcttccttcggctgcggacgggtaggtttctgcagtgccttcggcagtctgctcttctggaaacgaccctggttcggacggtttcctccctgtccgtttcttctgtcctgcgtctttttctcttctctctcgcgctctttttctttatctttttctttgttctttacgtctctgaccggttttcttgccagtcccagatccatgctgtccatagccggtctggaatctctgcggtcatttctgcgtccgttattttctcttccgtcgcggtctctgttgtcacggttcataccgtttctgttgttgtcaaaccgacgtccgccctggttatctctgttctgtccgtctctgttgccatcgaaacggcggtttccgtttccaccgtcctgacggttattctgtccctgataacggttattattctgaccgtttctgttgtcgaagcggcgtccgccctgattgtctctgttctgaccatcgcggttctgtccgtctcttcttccctgaccattgaatcttctctcctgaccgtctctgttctgtccgtcacggttctgattgtctcttcttccgttgaatcttctctcctgaccgtctctgttctgaccatcacggttctgtccgccacggtttccttcgccgtttcctcttgccggtctgtcctgtccgtttttgtcagactgcggtttgtttcttctgaaattcttgccttcctgtgtctgcgcgttctgcggacggaatacctgaatcagattggatttctttttcgggcggtctgtattttctttcttctcttcttttccttctttttttccggcaaatgcatcccggaccattttttcatctttttcttccaatgtactcatatgactcttaacttctacctttttctcctttaaaaattcaataacttctttgttcgttttatttaattcctgtgcaatttcatagattcttgtttttggcattctaccaccaacctttctgttccatgccaagaaatgtaactattcagatttcagctgtttttccatcgctgccgccaggttttcatcggttactgccagagacgcacggaattcttttcccatggctcttcccagttcctctttccctccgaaatcatagcacggcacttcataataggtgcacatgttatgaaatttctttttggtattgtccgacgcttccgccgagacgatgaccagccaggcttttcctgtctttaccgctttttctgttgaaaactctccgctgacaatcttacctgccttggtggaaagtccgatcagtgatagtactttattacaattcaatcgtatccagctccctttccaggttctcgtagacctcctgaggaatctgcatcttcagggaacgctccagccctttgttcttgatggctttgtgcagacattccttcgaaaaacaaacatatgcgccgcggccgttctttctcccggtcacatccagtgtgatctcaccttccggtgtcttcagcacacgcatcatttctttcttgtttttcatctcattacatccgatacatttccgcagcggtaccttttttatatttcccatagctatccgcctcactgtttctttcgggtcttactcttctgtctccggttcttcttccagttctacacctgccagagcgtcttccatggaatcctcaccctcttcatcgtcagattcctgataatattcgaaatcaccggcttctcttgcctgtgtctcactcttgatatcgatcttgaatccggtcagacgggctgccagacgggcgttctgtccttctttaccgattgccagagacagctgataatccggaacgataaccagtgcggtcttctcatccggatctgccagtaccgtgataacttttgcagggctcagtgcattttcaatcagcagtgccgggttctcatcccagctgatgatatcgatcttctcaccgcgcagttcttccacgatagtgttgactctggcaccgttcatacctacacaggcgccgactgcatcaacatccgggtcgttggaccataccgcgatcttggttctggaacctgcttctctcgcgatactcttgatctctacgataccgtcttttacttcggttacttctgcttcaaagagacgttttaccagttccggatgggttctggaaaccatgatcttcggtcccttcggtgaatcctttacttccagtacatatactttgatacgttcggtcggtttgtattcctcaccttttacctgttcattttcactcaggatcgcatctaccttacccaggtttacgctgacatttcttcccatgtaacgctgtaccacaccggtaaccacatctttttctttctgaaaatactcatcatacagaactttccgttcttcttcacggatcttctgcaggatcacgttcttcgcattctgtgttgcgatacgtccgaactgtttagactggatcggaacctgtacgatatcgcccagttcatacttggaatccatcatttttgcgttggaaagactaatctccatcaccggatcttctaccacttccactacggtcttgtcagcatatacgctgaactcgcaggtctcatggtcgatggttacatgtacgttatctgcttttccaaaatggtttttacaggcctggatcagagactgttcgatggcatccatcagaacttctttactgatatttttttctttttccagaatagttaacgcttcgagtaattctgtattcatttttttctttatcctccttaaaaatcaaaagcaagacgaatcaatgcgatatctgctttttcaaatgtctgttcttcctgctcctctgtggtgatcgtcacgctactttcatcatatgcgctgagaatcccgtagaattctttttctttgttgatcggacggtaggtacggatctctacctcttttcccatacttctcgcataatctttttcctttttcagaggacggccaagacccggggaacttacttccataatataagcatcttcgataaaatccagttcatccagtttatcactgaaaattctgctgactgcctcacagtcatctacggtaattccgccttccttatcgatatagaaacgtaaataccagtttcctgcctcttttacatactccacatccaccagttcaaaaccgaactgatcgatgatcggctgtgccatagcttccgctttctgttcatactgttctcttacactcatgctttcaccaccttctacacggacagcgccgctgtccacagcagtcaaaactgatctgttatatcaattttgatctgcaatgcaacaaataagagtggacgtatcgcccactcttataactagtaatcatctattaacatggttatcataccatttattattctaaaatgcaagcgttttcaggctttttcctttatacccgcactttcgttcctttggtatcgcgttttccgagcttgatcttgttgaggatcatctgtttttctttgtactcgatctggtattccatccggctctccagaagataaccgtgttccagataatctttatcactcatcttaatcgcccgcacaccgagtgccgcttttttcttctccggcacttcttcttttaagaaccgcaggaaatatccgtcgtggctttgcagcaccacataatccatcgtatcacacagatccaccagcaccagttcatcatcctctgccagtttggttgaggcgatcgttctcttgatcacatcaaattccgttcccggcacctgtttgatcataccggatttcgtaacaaagatgatatgcgaattctttaccgcttccatactgctgacacagagcagttcttcctgtgcactcaagaaattactcaggttgtccaccggaacacctttatcccgcagtctcgtaagcggcagatccatcactttcaccgtatgcatctgtcctttgttcgtaaagagacagatcttatcggtgttcatacaggtaaatacatacttatattccccgtgaaccgtctctttgttcctctcgtaggtattcttatccagcaccttggcatatccgaaacgatccatcagaaaacatacttccgcttcttctactttcttttcttcaaagacagcttcttccctgttttcgatcacggtgcggcgttttcttccgtaagctttcttgatgtgatccagatcctccatgatgacctgtgccatcgcatcgtaattattcaggatttcttcgtatcttgcgatatttttcagcgtctcctcatgttctgccatcaacgcctcgatctccagaccgatcagcttgtacagacgcatctccaggatcgcggttgcctgtctctgggtaaagcagagtttctttgcagctttctcactcgctttggtcttaaaacggatgccctcggtcacaccgtttgtcagacattcttttacctgtttctgatttttgctaccccgcaggatctcgataatcaggtcaattacatcacaggctttgatcagaccttcctggatctccttcttttcgagttctttatttaacagggtctgatgctttctcgtacagacttcaaactggaaatccacatgatgctcaatgatctgtttcaggctcagtgtttccggtcttccatctgctacagcgagcatattcacaccgaaagtatcttccagacgggtctttttatagagcatatttttcagattttccacatctgcgccttttttcagctccagaacgatccggataccttctttggaagactggttggaaatatccacgatgtctgtggctttcttggattctaccagacctgccacatcgtttaagaattttccgatattggcccccaccatcggataagggatctcggtgatcaccagattgacttttccgccctttaacttctcttcttccacttttccgcggattttgatctttccgcttccggtttcgtagatcttcagaagttcatctttattgatcacgataccgccggtcggaaaatccggtcccttgatgtatctcatcagacctttcacggtaatctcattatttttcatgtaggcttttacaccgtccacgatctctgccaggttatgcggcgggatgctggtcgccataccgaccgcgataccgtccgccccatttaacagaagattcggcacacgaaccggaagtaccaccggctctttttccgtctcatcaaagttcggcataaagtccacgacatttttatccatatcactcagatagacttcctgggtgatcttttccagtctcgcctctgtgtatcgcatcgcagcggctccgtctccctcgatggaaccgaagtttccgtgaccgtccaccagtgcctgtccctttttaaaatcctgcgccatcacaaccagcgcatcatagatggaactgtcgccgtgcgggtggtatttacccatggtatctccgacaatacgggcacattttcggtaaggtctgtcataacgaatacccagctcatacatatcgtacagggttcttctctgtaccggtttcagtccgtcacgaacatccggcagtgctctcgatacgataacgctcatcgcataatcgatatacgatttctgcatcacttccgaatattcggttctgataatctgtccttccattgtatcctccttagatatccagctgtgcattctgtgcatgctgatagataaatgcttttcgtggcggtacatccgttcccatcaggacttccgtcacatctgatgccatacgcgcatcttcaatctccacccgttttaagattctggttttcggatccagggtggtttcccacaactgctgtgcatccatctcaccaagacctttgtatcgctgcaaagtgaacgagccggtatgggtctttctgtatttttccagtgctttgtcatcatacaggtattcttcttcccctttggacggaattaccttatacaatggcggcatcgcaatatatacatgtccttcatagatcagttccggcatgaaccggtagaataaggtcagtaacagtgtggaaatatgtgcaccgtccacatcggcatccgccatgatgatgatcttgtcatagcggagttttgtaatatcaaaatcgttgccgtacccttcggaaaatccgcatccgaacgcgttgatcatcgttttgatctccgcattggcgaggactttgtcaatcgttgctttttccacgttcaggatcttaccacggatcggcaggattgcctgataatttctgtctctggcggactttgcggaaccgccggcggaatctccctcaacgataaagatctcgcatttttccggatcttttttcacacaatttgccagtttgccgttggaatcaaaggaatatttctgttttgtcagcaagttggtctttgccttttcctctgttttccggatctttgcggaacgctccgcacaggagagcacagctttcagtgtctcaagattacggtcgaagaaacggacaatctcatctccggttacttttgccgttgccttagaggcatcctgattatccagcttcgtcttggtctgtccctcaaaacgcggtgccggatgcttgatcgagatcacagctgtcataccgtttcggatatccacaccggtaaaattgctgtccttgtctttcaggataccaagttctctggcgtaattattcatgaccgtcgtaaacatcgttttaaatccggtcagatgggttcccccctcggcattgtagatgttattacagaatcccagtacattttcatggaactcatttacatactggaacacgccttccaccgtaatgccgtcgctctctccggaaaaatacaccgggtcatgcagggtttcttttttcttattcaagtctcttacaaaaccgataataccttccggctcatgataatcgatactctccggctccgcttttcgtctgtcttcaaaatgaatggtcagtttcggattcagataagcagtctcatgaagacggctttttacttcctcctctgaaaatctggttttttcaaaaatctccgggtccggcaggaaattgatacaggttccggtctctttcgtccggttcagcttcggaagaagtccatcctccagttcgatcaccgggattcctctctcgtaccggtcatggtgcacatatccctcccggctgatctttacatccagataggtagacagtgcatttaccaccgaggaacctactccatgcagaccaccactggtcttgtaagcgccgttatcaaattttccgcccgcatgcagcgtggtaaataccagacgctccgcagacattcccttctcatgcatccccaccgggattccacggccgttatccgatacggtacaggaaccgtccgcttccaggatcacctgaatccggtcacagtaccctgccagatgctcgtccaccgagttatccacgatctcatagatcagatgattcagaccctttctcgaaacacttcctatatacatacccggacgtttccggaccgcttcgagtccttcaagcaccgagatactgctggcgtcataactgtctttctttgccataatactttcctttctatcctttttcttccattatatctattctttctctccccggtactttcctttggctcaagccacagactttgactcattgctcgcgtacataaataatcggcggtttttcatggggtactggggtacttaacgaaaactgccgattattataccatatttttatacatagaaacaagttaaaaagtacttcagattgtagattcctatatttctcccttttctctcagacaattcagaaacccctctaatccttcttccacatccctgtaagtttcatcaaagtctcctgtataccagggatctgctatatctcttccagatccggcaaagcttaacaatttatataccttcccttccgggtcatgcttcaacatccggttcaggttacgtatatttgcagtatccatacctatgatgtaatcaaacttgtcatagtcgtctaaagtgacctgtctggctctgtgaggcaccaatggaattcccagttctctcaatttgttcactgtacctctgtgtggaggattaccgatttcttctctgcttgttgcagcactgtctataacaaacatattttccaatccaagggtgtttactttgcgggtaaatacgctctcgcttagggttgatctgcaaatattgccgtggcaaatgaatagtacctttattttctccattttatctcctcatatcctctcaaagccttataaatactggcttttcagcctttgtgcattttttacttgaaaggttctttttcttgtaaattcttgtattttctcatgttttttcgggcatttgtggtacaaatgggttatttttaaagtcccaaatcccttatgagataaggcttacatgagttgtttgtgcatgtttttgggttataaactttttcttttccagttcatcccttgcttcttttaatctggcaagttctttctttgcatcatcatagccggtatgcgtat

SEQ ID NO: 2489 - DNA, 446 bp, Unknown
  gut microbiota DNA sequence
tgtcttcgcagatacttccggcaaagataaactgatcctgctcttcatccgttcctctcggaatcgccacaccgcaatcctcataagtcacaaaatcctttgtggttgccagatcccagccaaatggttctccaaaaggacacgggactctggtatctctctggtggaacagatagaatgtatcatcctttccaaaaggcatgcaatcgccaaaccaggtatttggatgctgatagtaaattttcataattttcctctctttcctgcccgcaggcatataattatcctttgactgctccggcggtcaaaccgctgagcatgtacttattcgtaaagaaataaaacaaaaatgtcggtaacacagtaacggtaattgccgcaaatgtagcaccccagtctgtagttcccataaaaccgacaaagtcgttcagccccaacgtaacagt

SEQ ID NO: 2490 - DNA, 540 bp, Unknown
  gut microbiota DNA sequence
cggctctccaaaaggacacgggactctggtatctctctggtggaacagatagaatgtatcgtcctttccaaaaggcatgcaatcgccaaaccaggtatttggatgctgataataaattttcataattttcctctctttcctgcccgcaggcatatgattatcctttgacagctccggcggtcaaaccgctgagcatgtacttattcgtaaagaaataaaacaaaaatgtcggtaacacagtgacggtaattgccgcaaatgtagcaccccagtctgtagttcccataaaaccgacaaagtcgttcagccccaacgtaacagttttcatattggtagatctcgtaaacgtataggcattgataaaatcattccatgtaaagacaccctgcatcgttgctaccgtcagcagcgagttcgtcgacatcggaagtacaatcttgaaaaatgtccgcatcggtgaacacccatcaatgattgcagcctcgataatctcatccggcaggaatttactgaatgaataaaacagctgaatcgagtatg

SEQ ID NO: 2491 - DNA, 731 bp, Unknown
  gut microbiota DNA sequence
aaccagacgaccttcgcattctcctctcatcgggcttgtgaagacttcctctgtcggcatgttcggaacaaagaaagcacgattcagatgattgatatctcctgcactgccccattttgctcccggaatcagatctacacgaaaatccgtaccgttgctgcttgtataatgcagtgttttaaaattctgttcatttaaccaatttgctttctgcgtcatccgttcgttatgtgcctgccagattttttccgcatcctcaccatctttcagatatacgcagtcaaagatcgcatcccacagtttttccactgccacatcctctgtatcatccggaaatacttttttcgcccattttccagaagctgctgccacgatcagccactgatgtttaccatcgatctgatcacggtattttttcatgactttctgacgcatctggctgacggtagaaatcagatctgctgggattcctgccagttcatctggatcggaagaatcgataaagatacgaaccggcagatccacggtcatctgttttgcacgttcctcttcccataccggtacttcgccgagtacctctgctgacgcatactgataatgcagtttgttgatttctccacactcccagaacatctcaacataacttgctcctgctttatagcactcctccgtcaccatcgttaccaacgggatctgatcgacacctgcctgcagacggacacgctgtcctt

SEQ ID NO: 2492 - DNA, 610 bp, Unknown
  gut microbiota DNA sequence
cgtgtcggagacaaatgggagaaagagattgccatgccggatatggaaggaaaagaatatgcagtggaatactgtaagttcgctcctcgttgtccgtacgcaaccgatgaatgtcgtcagaaacgcccggatgcacaggatatgggcaatggacgtatggtactttgctgtcaccctctgtgtcagaaaccaaaggaagcgtaagataaacttgcaaaatataaaaaagctgttgccttcgggattcgtgagagttccggggacggcagcttttttatattgatgttattgtatttatgtgagcgacaagttgaaagtttgtgctggaaatatgcttttgttgagagtgatagtatgtcgtatatggaaaaaacagtgggtagatggtacttttgatttgtgtatatagcaaaaacgccccggcgatttcgttgcgtttggaatcgtcggagcgttttcatatgtcaaattatttcaaagagttcgaatattccgaagattagaacagtccggtgatctttcctgtctcgtctacatcgatcttctcagcagccggtactttcggcagtccaggcatggtcatgatctcgccggtcagagctacgatgaa

SEQ ID NO: 2493 - DNA, 35318 bp, Unknown
  gut microbiota DNA sequence
gcttgtcaagaagttttttcaacttttttgaagttgtttttgtttctctcttgcagcaactttggtagtttatcatatctaccgtaccgttgtcaagaactttttttgcaacttttcggctttcaccgaacggagaaggagggatttgaaccctcgcgccgctactaacgacctactccctttccaggggagccccttcagccacttgggtacttctccaaatgcctgatccaacgatcagttttctcttttgtaacggagagggtgggattcgaacccacgcgccctttcggacaaacggttttcaagaccgcctcgttatgaccacttcgatacctctccatatctttgtagtggtctgcgcttttgtctcgctcgaagacaagtgatattctatcatctgttttccaatatgtcaatacacttttttcattttttttacttttttttaccaaatatttcacgggcaaatatttcgccgatttcgaggtcttccggcgttgtgatttttatattcttataagacccttcgtagagccataccccatgatttccataggcctctactaccatggcatcatcggtaattctgctgcagtcatgagataatgcctgttcgtatgcttctttgaccagcgcatactgaaagatctggggcgtctggacattccacacccggcttcgatccggcgtggatgccactttctgatcgttttcaacgatcttgacggtatctttggatggcatacctgctgcacatgccttgtatgtttttgcacagtctattccccgctcgatcagttcttccgtaacaaacggtcttgccccgtcatggatcaggacataatccgtcccctgacaggcacagagcccctgatagaccgagttgtatctctcttttcctccagctactaccgcagacactttatcgatctgatagcgttctacaaacgtttcctgacagtaagcgatctcctgttcaccggtaacaagaataatatccgtaatctgtggagcatcctgaaaagccttcattgaataatacagtaccggataatctcccagctgtaaaaactgtttctgtacactgctcttcattctttttccctgtcctgctgccagaacgattgctgtacatttcacaagtatcccccctttcttaccgttctcccagtttcagattgggaactgcattcagatcccatccgtgacgtacaccttttttgtattcataataagccgcaacgccgatcattgccgcattatcggtacaaaagatcggtgacggataataaaactgaatatgttctctctcacacgcctctttcatcgcctggcgcagggcgctgttggacgcaactccacctgcaatggcaagtttatccatatgatgctctttcgctgctttcaccgctttttccaccagggtatccaccactgctttctggaaggacgcagcaatatccgcctcgcagatttcttctccctgcatcttacagcggttaatatgattcaaaaccgcagattttacgccactgaagctgaaatcatacggatcttccagttttgcttttggaaatacgatagcatccggatttccctctttggacaccttatcaatcttcggacctcccggataaccaagaccgatcgcgcgcgctactttatcaaaagcttctcctgctgcatcgtctcttgttcttccgaggatctcaaattctccgtagtctttgacgatcaccagatgggtgtgtccgccggatacaatcagacacataaacggtggttccagatccggatgttcgatataattggcggatacatgtccctcgatatgatgcacgcctaccagtggcagttttttcgcgtaactgatcgcttttgcttccgcaacgcctaccagcagtgcgccgacaagtcccggaccgtaggtgactccgatggcatccagatcatccagtgtgacatttgcctcagccagtgcttcctctactacctgattgatcttttcaatatgttttctggatgcgatttccggcactacccctccatacagggtatgcagcgcgatctgagaagaaattacattggataaaatggttcttccatttttcactacggaagctgctgtctcgtcgcaggagctttcaattgccagaatcaaaacatctttctcactcattttcttcctcctcaaataataaatccacggattttccgtcttttcccacataactgttcgggaaaatctctcttacgccatccatatattcttccggatgtaccagggacggactgaaatgggtcagccacatttcttttacctgtgctttttttgccagttttgccgcctctttcatcgtcatatgcttgtattctctcgctttcgcgtctttttccggttctccgtacattccttcacagatcagcagatccgattctttcgcatgttcttccatagacaccgtcggacggctgtccgtacaataggtgactttcagtccttttcttgccggtccgagtaccatatccggtgtgtacacttttccatctgcctcgatcgtctcccctttttgcagagggttccagaatttgagcggaatctcgttggcttttgcctgttccacggagaattttccgccgcgatggatctcaaccgtataaccgtaacaggtcacattgtgatttacccggaacgctgtgatctcatatccgttgatggaaaatgtctcttcctgcccctggatctctttgcagatgatcggaaatggcagttccggcgcaattgtccgaagggcatgaaccacccgttcgagtcctttcggaccgatcagcgtcagcggttcggtgcgctctgcatttcccatggtcagtaacattcccggaagtccgctgatgtggtctgcgtggtaatgagtaaaacagatcacatcgatcggtttaaagctccagcctttggccttgaccgctacctgcgttccctctccacaatcgatcatcagactgcttccattatatcttgcaaggaaagaagtgagatatctgcgcggcagcggcatcatcccaccggttcccaataaacatacatctaacatagaatttttaattcctctatctttcttttccggttgtctcatgcatcatcagtaccgcatgttccaccggatcctcataataatttttccgtaaaccgtttttcacaaatccggctttttcgtacacatggatcgctctctcattgctctcgcgtacttccagaaacagacgggatactcccatctcttcggttttccgaatcagttcctgtaccagaagtttgccgataccgtggttttgtctgtctttttttacggatacattggtaatatcgccttcatcctgcaccatcacgacaccacagtagccaaggatctcttcgtcctcctctgctaccagaaacagggtatcctggcggatcagaaaggtaaaaaatcctgtctctgtccacgggcgggagaaattctcattttcaatctccatcacctgttccagatcgtccagctgcatttcccgaatctctgtcatctttttcctgcttctctttccgcacgctcccgctctgcctgagatacccgaaggtattccggctgatgctcggctgctgttactgttttgccttcccggtaatatttttctgccagtgttcccacggctcctgcccgctgtttgttcaggtgtgccggtgcaaagctgtatggtacctgcatattttcttttaacatttcctgatagaccgttacgccatcccccaaaaaggtcacggcttcccccagtgcattcagttcttggatcagttcttccacggcaattgctttctgggcgcttacagtcaccagttcatgatcttcaaaccgatagatgccggtgtacacctgttttcttctcgcatccatcatcgggcagatcactcccgtggtatcatacagattgtatgcgagcgcgtctacggtcggcaccgggatcagcggtttctttaatgccagtcccagtcctttcgccgtagcggaaccgatgcgcagaccggtaaaagatcccggacctgctgccaccgcgatggcgtctatcgtttccagatccagttcgatcatctttgcgatctcatcgagcatcggaagcagagtctgggaatgtgtctttttataatttaccgtatattctgccagcagctgatcttcttccacaacagcgacagatgctaccagtcccgaactgtcaagtgctaatattttcattcgttttcccatccttccagtcctgtaatggtgatccgacgataatcgaatcccctttccaggtctttctcaattgttacatgaatactgttttccggaatcagttcttcgatcagttccgcccactcgatcatgcacacaccatttccaaagaaatagtcatcataaccgatctcttccatctcttcgatatctccgatacggtatacgtcgaaatgatagaacggaagccgtccctcttcgtatacctgtacgatggtaaatgtcggactgctgaccgcttctgtgattccaagtcctctggcgattccctgggtaaacactgtttttccaacgccaaggtcgccgttcagggtatagatctgtcccgcttttgcctgttcgccaagtttctgacccagtgcaaaggtttcctcgggaccgtttgtttctattatcattgtttttcctctttctttatttcagacggattttcagcttcctcgcatccacatgtttcttcagaagttccagcagtttctggtaatttttaccgactgctgccttcggccatacataggcatctgctttgttgatatagacatacaggcataactggctgtcaatcaccttttccacctgattccatttcagatgtccggtctgcgcgttctggatcgtcgtgattccggtgctgtctactttgtaagtaaatggttttctatacaccggtgttcttttaaatccctgatccgctttgatccagagttttcccggcatcaggagcaggaaaaatacagcaaaaaagatataacacacgctgaacattcttcccacccggttccaggtaagcacacacagcggaatcatcgcaagtcctgccagaaggctgagttttccacgcagggtccggtaggtgtgctgcagaaagaaatcaaacagatactgtctggtcatctgcacattaaattgtactttcacttctgttctcctttatttctgatctttgcatattatagaattatatcataggaatcttattcctacaagaaaggagaactattccggcatggcaattgtatgctgtgtcacgctgaacgttgcttttccatcactggaaaatacgatgccctgtgatttcagatcggtgtagatcagcgttgtcatcgcctgttttccgtcatttgcaaatacttcaatcgtatatttatccatcacaatccgaaatgttatcgtatcctgatcgtttgccaccttcatgctgcggctgcagatcacatctcttaccagaccggaataggtacgatccacggtaaataattcctggtatctgttatagtacagttcagtataattttcatcgtcgcaggcaagcagaatggagaatccttccagatcctctttttttacttccactgtcatatcaaaacttctgcctgtgattccgtccagttcggcagactgattttccagagtgactttttcatatctacgctcgccggtataatacttttcaatctcacgtactggaagctgtaccagactgtcatcttccacatgcagttctctcgggagtgtcataagtccggtccagtccatatcttccggggtcataaaattatcccagctctggagccatgcgaccatgactcttcttccgtctgttgtttctacggtctgcggcgcataaaaatccataccgtaatctacctgtctcgcatcgcctctggtgtaagtcatcgtctctttgtcatagtccccggtaaaatagatggaattgtttccgttgtgaaattccagtccttccgctctcataaactgcggagatacgatcagaacctgacggccgtcaagtgcaaagaaatccgggcactcccacatttttccataacggtttttacactggtcgatcattttctcgtaattccagtggatcgcatcctcggaagtaaagagtgccagctgaccgcttccgtcttccgccttgcttccgatcagcgcgaaaaacttaccatcttctttccagatcttcggatcgcggaaatcgaccggagagcttccttccggcagacagtctgcggtgatcactgggttttccgccactttttcatacgtttcgccgtcaccaatcgcaatactctgtgtctggcgtaccatatgggttccgtcttcgaggtctttttccagtacgctggtatacatcaggatatgttttccttcatgttctacggctgttccggaaaagcatccctgtccgtcgtattccatatccggtgccatcgcgcacggaagttcttcccatttgataaaatcttttgtcttgcagtgtccccagtgcatcgggccccatttgttctcatatggataatactgataaaacagatggtattcatccccaaatctggaaaatccgttcggatcgttacaccatccggttgtcggcgttacatgaaacgccggacgcttgttctcatcccgttcctgttttttctttgcttcatatgcgattgcttttgctaatttttctgatggtttcttcataaaagtgacctccttttgtaattattgtgttttattttaaacattattttctgacacgtttcagatgacagatggtttctgtgtgtaccgtctgtgcaaactggtcaacgcacacgcagcgctccacgcggtatccctgctttaaaaagatttccagatctcttgcaagactggttggtttgcaggaaatatagaccagattttccacctgatagttaataatctttggtaaagctttcggatgaataccgtcccgcggtggatcgagcacgataaagtccggtttttccccgatctcatccagcacttttaatacatctccggcgataaattcgcagttttcgatgccgtttctctcagcattttcccttgccgccacaacggcttcttctacgatctccacgccgatcactttttttgccactgctgccaggatctgtgagattgttccggttccgctgtagagatcaaagaccgtcatatctctggtatccccgatatagcttctcgcggtttcatacaacacttccgcaccgagagaattcggctggaaaaaggagaatggcgtgatcttaaatttcagtcccagcagattctcataaaaataatcctgtccatacagcactctcgtctcatcactctgtaccagatccgccagtgaatcgttcaggatatgcaggattcccacgatggttccttccagcgggagtaccagcaggcgttccaccagttccgaaagatccggatccagctgtgtggttgtcaccaggttgatcagaatctccccggttgtattcccgcggcgtaacagcagatgtctcagatagccttcatggcgcatcttatgatagtaggtaaatccctgttctttacagtaatccagcacacaggtcaggatcttcgtcagatcttcatgtaccagcttacagtcggatgcagtcagcacatcataggtgcttccctttttatggagtcccagtgtcagcggaccgtctttttcggcatctccgaacgaaaattccatcttattacggtaacggaattctgtagggcttcccttgattccctcaaaaacatagtctgggtttccgttttcatccacctgaccaccgtttttgatggctgtgtccaggagtcttcggatctgttcctgtttcatctccagctgatggctgtagtccatggtctggtacatacatccgccacactgtggaaagatggaacagaccggttttctcgtctcaagcggtgacggctccagcacttccaggagccttgcttccaccctgccgcctctttttttattgatcataaagcggacacgctgtcccggcatcccgttttttacgatcaccggctgaccgtccaccatgactcttcctttatttggaaaatctacctgttctataataccctcgtatacttcaccttttttcatctactgtcctttcttggtgtctcttttttaataaaacctaagaaaagctccggggtctcctccgaagctttcctgccgttttgtgtattcacatgttaattttcttcgttatcttcttcttcaaagtaatcgtcaaaatcatcatcgaaatcatcttcaaagtcttccagataatccggtgtgaaaaaacggtacactgcatatgcaatacctgcaactgctgcaacggcacctataattgccaggacccacatcactgtgtttttgcatttttcttcttctttttcctgcttctgcagcaaagccattaactcatcaagtttattcatattgaacaccgtcctttctctaaaagcatagcttccaaaaactgttattattataccactatccctgtgattttaccacaaaaatttactccgttattttttttaattttgcaaaggaggcaaacattttttttgttcccactttatcaaaatctaccgtaacttcataatccttgccgccgtcaacgatcgcctgtaccgttccggttccgaacttgatgtggcgcacggtatctcccacgccgtaagaaagtccctgtgactttttcacttcaaactgtttcggggaaaagctggtcttctggtaggtctggcgcattcttgcgtaactgctggatggttccggcatctttgtgatcgtccgcgccttcggctctcttccaagttccaccagttcccgcggaatctcgcggataaaacgggaaactttgttatactgagtttctccgcggatcatacgctgctgcgccgcactcaatgtcagttctttcattgctcttgtgattcccacgtaacagagtcggcgctcctcttccatatcctgcgggtcatctcccacgattgtcatataactcgggaaaataccgtcttccatacctgccagatacacattcgggaattctagacctttcgcactgtgtaaggtcatcagaagcacacggttatcgctgtcctccacggagtcaatgtctgcgatcagcgccacttcctcgagaaatccggacaggctcggatcttccgcatcatcctcataggatgctgccttggaaatcaactcgtcgatattctcgatacgtgcttttgcttcatctgtatcttccgcttttaattcatcgacataaccggtctcttcgatcagtttttccagcagttctttcaccgacagatactcgatctggctgcggaacttctggataaattccacgaacggacgaactttcgcgcttccgcgtccaagcgtcgggatctcgtccgcctgtcgcagcgcctgatagaaactgataccgtaagcatctgcataatcctgcacttttccgagggtagccgcaccgatcccacgcttcggcacgttgatgattcgtttgacagccacatcgtccttcgcattgtcaatcgtcttcatgtacgcgagcaggtctttgatctcttttctcgcatagaagtttacaccgcccacgatcttatacggaatattcgcgatcagaaatttttcctcgaacagacgggactgggcgttggttcgatacaggattgcacagtctttatagtcatagattccttcccggactttctggctgattgcaccggcaatatattctgcttcctcgtatccgttctggaactggcgaaaatgaatcggggatccctcttcatttgccgtccataaggtcttgtcttttcttccctcgttatttttgatgacttcatttgccgcattcagaatattctgggtagaacggtagttctgttccagtttgatgacctttgcctgtggaaatactttttcgtagccaagaatatttccgatattggcaccacggaacttgtaaatggactggtcatcgtcaccgaccacgcagaggttttgatatttttctgccagcagactcacaaatttgaactgtgcggtgttggtatcctggtactcgtccaccatgatatagcggaaccgctcctgataataatcgagcacatccgggcaggactgaaacagttccacggtctttacgatcagatcatcaaagtccagagcgttgttctggcgaagctgtttctgatacgcttcgtacacccgggcgatcgtctgcgcgccgtagccggaagcggtggatgcctgcagtttgtattctgccggtgataccagctcatcctttgcagaagaaatggctgccatcagtgtgcgttctttgaactgtttggtatcgatattcaaccgcttgcagatctctttgatcaccgttttctgatcatcggtatcgtagatcgtaaagttgttgtcgtatcccagccggtcgatgtatcttcgcagcatccgcacgcagctcgaatggaaggtgctcacccagatactttccgaaccgaatccgacgatctggtctacacgttcccgcatctcctgtgctgccttgttcgtaaaggtaatcgccatgatattccatggatttacccctttttcttctattaaatatgcgatcctgtgtgtcaggacacgggtttttcctgatccggcaccggcaagaatcagtaccggtccttcggtatggaataccgcttcctgctgcatcgcattcaaactatcatatttactcatattttcctctccatcttttccatgcatctccggaattttccggaaacgcctgtcttcgtacaggtgttcttatcatatcatgcacctgttggcaagtcaattgttagtgttcactctgtctgttggataccctccagctccagacaccttcccgcgaagcattttcctgtaaagaaaaaaaagatttacaaatagtattaaaaactatataatagggtgaaagaggtgatatgatgacgattgatacaaacgatcttttaaacagcattcttggaagcctctcccgtattgactatatcaagccggaagaagtcccgaacattcctttatatatggatcaggtaaccacctttatggacgcgcagctggcttcctccaaacgttatccggaggataagattcttacgaagacgatgatcaacaattatgccaaaaatgatctgcttcctccgccactgaagaagaaatactccaaagagcatctgctggtactggtgtttatctattattttaaaagtattctttcgattacagatatacaggcactcttaaagccgattaccgacacatattttccggcttcggaggatctttccctggaagatatctataatgaagtcttccgtttacagaaatctcaggtggatgttctgaaagaagatatcgccaaccgctaccggttatcccgcgagacatttcaggatgctccggagaaagatcaggagtttttaaaaacattttcctttatctgtcttctgagttttgatgtctatgtgaaaaagcagctgatcgaatctctgattgatgatctgaacccggataccaaagagaaaaagaaaaaataaaaaatgcaggatttgatttttcttcagatcctgcattttttatatactttattttattgtctgtttctattctttcacactgagacgaaccagtgctctttgcagtttcgccttgacgattcgatattctttgtcgctgagactgccttctgccagtttggcttccgcccgttttctggcagcctccgctctctgtgcatcgatgtcttctttccactcccaggtggtcgccagtacacggcaggttccgttcatcacagagagcattccgccgatacatgccgccgtctttctgctaccgtcttccagtacaatatgggcttcccccataccaagtgcggtacagtaattgcagtgtcttggcaggatcgccagatccccgctgattgtccgacagaccaagcgggagacttccccttcatacaacagaccgtccggtgtaccgattcgcaaaggaaatgtactcatctgttacccctcctttactgtttcagtgcttttgctttttcaaacacctcatcgatcgttcccgcaaacaggaaacagctctccggaatctcatcgcattccccgtcaaggatcatacggaacccgcgcagtgtctcttttaacggcacatacgttcctggcataccggtgaactgttccgcgaccgagaagctctgtgacagataacgctgcacttttcgtgcgcggtttactgccttcttatcttcttctgacaattcctccatacccatgatggcgatgatatcctgcagttctttgtagcgctgcagtacctgctgtactgcacgtgcaatttcgtaatgttcctttccgacaacctccggtgtcaggatacggctggtggaatccagcggatctaccgccggataaattccctggctggcaatctctctggaaagaaccgtagtcgcatccaaatgcgtaaatgtggttgccggagccgggtctgtcaagtcatccgccggcacatagaccgcctgtacggatgtgatcgatccttttcttgtcgatgtgatacgctcctgcagcgcacccatctcagtggcaagtgtcggctggtaacctactgcggacggcatacgtcccagcagtgcggatacttccgaacccgcctgggtgaatcggaaaatattatcgataaacagcagcacatcctgatttttcacatcacggaaatactctgccatcgtaagaccggataatcccacacgcatacgtgctcccggcggttcattcatctgtccgtataccagtgctgtcttatcgataacaccgctctctttcatctcgttataaaggtcatttccctctcttgtccgctctcctactccggtaaataccgaaagtcctccgtgagcagtcgctacgttatggatcagctccatgatcagaaccgtctttcctacgccggcaccgccaaacagaccgatctttccgcctttcgcatacggacagatcaggtctacgactttgattcctgtctcaagaatctccgttgccggaacctgttcttcgtaagccggcgcctctctgtggatcggccactgttcctctgtcgttaccgatccctggtcatctaccgtctctccaagcagattaaatactcttccaagacaggcttctccaaccggaaccgtgatcggctttcctgtgtccaccgcatcggtcccacgtaccaggccatccgtagatttcatggcgatacagcgaaccgtatgatccccggtctgctgtgccacttccacgatcagtttttctccatgattgtctatttctatggcattcaagagcgcaggcagttccccttccggaaagcgaatatccagaacaggtccggttacctgtatcacctttccaatatgtttttcgctcatttaccaatctccttacttttatttttctgtcagcttcctgtaccgttcatccggctacaggcactctgcaccgccaacgatctccgtgatctcctgcgtgatgcttgcctgacgctcccggttataatacaggttcagttcatcgatcatgtcctgtgcgttgccggtcgctttctccatggcatttcttcgcgccgccagttcacttgccacgctctcacagactccgccgtagatcagaccgccaagatattccggaacgatcgcattgaacacttccacgccatccggttcatacagaatcaggttacggatcttctctttttccccggcttcctcttttgcaatatctaccagtggaagcaccggaacagattccggattctgcgtcaggatggagaaaaacctggtatagcaaagttccacatgaccgaatgttccctgtcggaattctttacacaggatcgacgcaatctcaaaacaatctgccacagaaatatccgcaatctctgcgaatgcatcagtgatgcactccagatttctggattttacatattctactgcctttttcccaatgggaaggacactgatggttttccccttcgcatcctcttcaaagcagcgcagcaggttggcattatatcctcctgccagtccccggtcgcccgcgatcaggacataacagcatgtttcctgaaccgcttctttcgcatagatggaatagaattctgtatttccttttgctatttcctgtaatgtacggtacagttcctgaaaataaggtcggcaggtatctgcccgctccttggcttttcgcagcttggaggaagccacaagttccatagccttggtaatctgcatggtgctttccacactcttgatccgcagctttaccgctttcatatttgcagccataggttcctccttctttctttatttatttttgaatcctcgtatccaaaaagctttctgtataaacttccagagcactcttcagcttctcttctgtctctttttccaattttccggtctgctggatcgcctgcatcacttccgctccgcgggcatcggtatccagccaggtatataaaccttcttcatacagtcccacatcttctgtcgccacttttgacaggatgcctttgcttaccgcataaagaatcgccacctgcttttctaccggaaccggcgcgttctgcttctgtttcagaacttccacgattcgcgctccctgttccagacgcatcttggtatctgtatccagatccgaaccaaactgtgcaaaacttgccagttctctgtactgggaatagatcagtttcagtgtaccggcaacttttttcatcgccttgatctgtgcatttcctccgactcgggaaacagagatacccggattgaccgccggcatgacaccggaatggaacagttcggattccaggaaaatctgaccgtcagtaatagagattacattggtcggaatatacgctgagatatctcccgcctgtgtctcgatgatcggaagtgcggtcagtgatccacctccgtgcgcatcgtccagttttgccgcacgttccagaagtcttgagtgaagatagaagacatcacccggatatgcttcacgtcccggcggacgacggatcagcagagacagtgcacgatatgctactgcatgcttgctcagatcatcgtagataatcagtacatcttttccctgatgcataaaatattcacccatcgcacagccagtgtacggcacgatatattgcagcggactcgcttccgatgctgtcgccgccaccacgatggtataatccatagccccgtttttctccagattttccaccagagaggctacggtagaacgtttctgtccgatcgccacatagatacagatgacatcttttcctttctgattcaggatcgtatcggtagctatggttgtttttccggtctgacggtcaccgatgatcagctctctctgtcctcttccgatcggaaccatcgagtcgatcgccttgatgccggtctgtaacggctgacagacaccctgccgttcacagatgcccggagccggactttcgatcggctggtattccgatgcactgatcggtcccgccgcatcgatgggctgtcccagtgcattgacaactctgccgatcagagcctcacctaccggaacagacactacttttccggttcgttttaccatctgttcctcactgatggcttctcccgaaccaaataaaacaacagatacactgttttcttccaggttctgtgccataccaaagcttccgtcctcaaactcgagcagttctcctgccatacagtttgcaagaccgctgactctggcaattccgtcacctaccatcagaacggtacctgtttcatcctgccggatcgcattttcataatacttgatctggctacggatgactttggatatttcttctggtttcagttgcatgttttcctcctacactgctgcgtgatgaattcggtcagaaatctccgagatccggttcttcaccgttccatccagcagttttccatccagttctacccgaatacctgccagcagggatggatcggttttctgaatcagaatgatctcttttccgctgatcgcttccagcttttctttcagccgtgcctgctgttcctccgacaacggacagacgctggtcacaactgcctccgtaatatgatgatcttcataatatctttgcttgaaaacttccagacaaccggaatattctccgagaagattcttctcacacatcagtttcataaaattcaccaaatatcgttgtgcctgaccgccaaatgccgcctcgatcatcccggttctttctgtctggggaatcgaaggttctgacagcagtcgttcatactccgggttctcccgcaaaagcgtccggatctgctccatctgtccgagaatctcactggtcagattttcctcagctgcaaggtcgtacaggctgcccccatagattctggcggtttctgtcatgatacttcacctacattcgatataaattcatctatcagcttctcatggtctttttcattaatttcacgctcaatgacttttccggcgatctctacggccatatcaccgatctcgcctttcacctcattgactgcctttttcttctcctgggcaatctctttttctgcctttttcttcattgcagatgactgttcctgcgcttctttcaggatcttttcactctggatcgcagcagtctttcttgctccatccagaatctcatttgccttctgtcttgcatcctgcatattctgttcatattccgcacggatcgcttccgcctttgcttttgcttcctctgcctgcgtgatttccgcatcggcagccgcacgccgtttttccagtatctcatgtaccggtttgaacaggaatcgcttgatcagatacatctgaataaaaagattgcagatctgtgcaataaatgtccaggggataattcctaccagttcctgaacctgcataatgttattcctcctagttttcttttcgttcttatcccaggaatttcataaacatgccaggtgccacaaagatcagaagcagaccggttacaaaaccatagatacccgtggtctctgcgattgcgcatccaagcagcatggtacttgtaacatcgcctttacattccggctgccgtccgattgcttccagtgcttttgccactgcatttccttcaccgataccaggaccgatacctgcgatcagagaacatcctgcaccgattgcacatcctgccagtgcgataccttttgccaaaatctgaaaatccatattgtttcctcctatacaatccattgaaaatttcgctacacatacgtttcttccggttttccctgcacgctctgtttattcctctgctgcgtttgcaatgtacatcaccgtcagcatacagaaaataaatgcctgcatcaccccggaaaaccagtcaaaatagacagataacactgcggggattcccacgtccagaatcgggatctgtgacagtacatttcccacggttcccggaatcagtcccagcagttttgcactcgctaaagccagcgccccgtaaatcagtgcattgattacaactcctgataaaatatttccgaaatgacggcacgccatactgatcggcgttgccagttcagacagaacattgaatggtgtcataaccggaatcggtgtggtaaatcctttcagataccctcccacaccgtttgtttttatcttctgcgccgtgatcatcgtaaataccacggcagcccaggcagcttccgtagaaagatctgcggtcgggctgcgaagtccgatcagactgatcagattggatactacgctggttgcaaacaatgctgagacgaacggaatcagataccggaacttttcacccatatttcccagtacaaacttatccgcggtttccacgatccactcggctactgcctgtttttttgaaatatcccgtaccttcagtcctctcgtcagccagaaacagactcccgtgatcagcgccatgacgatccagctgacgatcagtgtctcgctgatctgtaattttccaagaagcggcacatcgatcggggtcgtaaaaaagacctttgcaccggagatatcaacctccattcctgtctctcacctccttatttttttcctttcgctgctcccaccagtttgatcgctgttccggggatcagaagcggaaggatgccagctacaaactgaaaacaggggagaacaatcgcaagaatcacccacagcatttgcatcatattcctctgagaatagctcgcctgaatccatcgctttgccgctgcctcctctgtctcggctgctgccttctgcactgccatccccatcagaaaaaagtttaaaaccgcaaccgcaccgccgaaaagtccgccaagaatcacggtataatcaaacggaaccttcttgggtaacaccagatgcagtatcagaaacacacaccacatcgctgctactcccactgcggtatacaccataacgtgttctgtctcttttcttactgctggctggatcctttcttttatcttgcccatattgtcctgtttcctttcctaaagatgtctgttgaaagatacttttgattttcttttttctttttctgtccgttcctgccggttgaccaccgaacggtaaaccttccatgctgtcatgccggatcctccgagaccaaagaaaaaaccgaccagatagatccatccgccaactgaccagcgattactgatccaccagcacaaccccagacaaagcaaaagaggtgtcacaagagacagactgaactgtgtcagcatcgtaagttttccaataatgtctgtccactttttcatttttccttcctttctgtgcatttttacaatagttatctttctttcttcaaaacttcttgttcatatcgtaccataacttttgcatttcagcaaacaattttgtgaattgttatttttttctcacttttttcattttttattaatgaaaatttttctcattttacggaataatagaaatttcacatgaaaatccgcatttttccgtaaaatttgcggattttgcctgttattcgtttaacagaaaaaaggcaaaaaaagatcctgtggctttcttttcccgccacaggatcttttcttttgtactttatcttcgtttcttttatgatccttattcttctttctctccgatccggttaaagaccatctcgtatccgtcatttccgtatgtcagagaacggttcacacggctgatcgttgctgtggaagctccggtcttctcggaaatctccagatacgtttttttctggcgcagcatccgtgccacttcaaatctctgagaaagtgataacagctcgttgatcgtacatacatcttcaaagaatgtataacactcttctttattttccagacataaaacagcttcaaacaaatgatctactgcctctgtatgtatttttttactcatgattttctcctttactaccccatattttcattgcatttataaagctcccgccttttcttctgcccgggaacttaatatgatacaattttaacacaatacagcaaaaaagcaagtggtttttcctgtcgggtgttttggcttgcaaaccgcccccggcaatgatatgattaaggaaattgggaaaaggacgggacaacaatgagaaaatggctggaaaaaccttaccactctctcgattacatgcttcagaagcgtttcggagagaaagtatataagatcacattaaacggcggcatgtcctgtccgaacagagacggtacactgggaagccgcggctgtatcttctgcagtgccggaggttccggggacttcgctgcggatccttcgcagtcggtttccgcgcagatcgagtctcagatggcactgatccagaaaaaacgcccggtgcagaagttcattgcttattttcaggcatacacgaacacctatgcacccatctcttatctgcggccgctctttctggaagcgatccggcatcccggcgtggtagccctcagtatcggtacccgtccggactgtctgggcgatgatgtgcttgcactgctctcggagctgaacaccatcaagccggtatgggtggagctgggacttcagacaatccacgccgataccgcagcctatatccgcagaggttatcccctctctacttttgaaaccgccgtacagaaactgcatgcgcgccatctcgagatcatcgtccacacgatcctcgggcttccgggcgaatctccggaacagatgcttgcaacgatcgactatctgaaccaccagccgattcagggaatcaaattgcagctgcttcacgtactcaaaggcacggatcttgccgatgattatcttgccggaaagtttcagacgctctcccgggaagaatatctcaatcttctgatctcctgtctggatcatctttccccggatcttgtcatccaccgtgtgaccggtgacggaccgaaagatcttctgatcgcgcctctctggagcagcgccaaacgttctgtactcaacgacctgcatcacctgatgaaagtccgaaacacctggcagggtcgactttataaggaggatctgtatgattgaaaacacctctacactctataaaatgattatcctgtatatgctggaaaaggtaacttttccgctttccaacagtcagattacaaactttttgctggatcacgaatacaccacgtattttcatattcagcagaccatccacgatctgatggacacgcatctgattctggaacgcaaacagggaaacagtatctgctatgagattaccccggaagggcagaaaaccctttcttattttgaaaagaacatgtcggattcgatccggctcgaagtagacagctatatccgggaaaagggatatgaaatgcggaatgagaattcaatcaccgctgaatattaccgcacaccggagcaggaatacacggttcaacttggcgtactcgaaaaaaatacaccgctgatccagttaaagatcaccgttcccaccgaggaaatggcgaaaacactctgtcataactggccgaaaaaaagccaggaaatctatgcctcagtaatgacatcgctttcctgaccttttatatcttatcttttatatcttatcttttattcttctcttgtccgtaagcgccggagtctctctccggcctgtttttcataaccgatatcggtcggatgataaaagacttcatctttgatctcatccggcaggtattgctgtttcacataatgttccggataatcatgcgcatacagataaccgacaccgtgtcccagttttgaggaccctttataatgggcatcctgcaggtgtgccggaacactggtctttttctttttcacggaagccatcgccgcgaagatcgcctcacaggcagtattgctttttggcgcagttgccacatacgtcactgcctccgacaaaataatctgtgcctccggcatcccgatccgctcgatcgcctgtgctgccgcagtggcaaccacaagtgcctgcggatccgccattcccacgtcctctgccgcacagatcatgattcttcgtgagataaatttgatatcttcccccgcatacagcatcttcgccagataataaaccgcagcatccggatctgatccccgcatacttttgatgaacgctgaaatcgtatcgtaatgttgatctcctgtcttatcgtagcgaactacccgcttctggatacattcctgcgccgtctcaagatccacatggatctttccgtccgcacttctctccgtggtgagaataccaagttcaatcgcatttaacgccgctctcgcatccccgccggcaagatccgccagaaaatccagggcttcctcactgacttctgcatgataacttccgagtcccttgaccggatctgtcaccgcccggtccagaagttttcggatatcctttttttccagagatttcagttcaaaaataatagaccgcgataagagcgcaccgttcacctcaaaatatggattctccgtcgtcgctccgatcagaaccaatgtgccgtcttctacaaatggcaacagataatcctgctgtcccttgttaaaccggtgaatctcgtctacaaacaggatcgtctttttcccgtacatgccgagatgctgctgtgcttcttttaccacttcctccatatctttttttccggctgtcgtggcatttaactgggtaaatcttgcacttgtcgtgttggcgatcacttttgcaagcgtcgtttttcctgttcccggaggtccgtaaaaaataaccgatcccagtttgtctgccttgatcgcgcggtacaataatttgtccttgccgatgatatgttcctgtccaaccacttcctcgagtgtcgtcggccgcatcctcgatgccagcggcgactcattttccaatgtggtttctttcatataatcaaataagtccatcttctgtccttccctgtctttttcttttatcataccaaacttttgttcctctgtcatctattccaggatcatttcctccacattgacaaatacaaacccctggttttgaagctgatccaccagcgcaaatgctgcatcaaccgaactctgatacccgtcatgcatcaggatcatatctccctcctccacctgaccggacaggcagcacagcacccgttctttattctgtaatttccaatccagagaatccacgttccagaacaccgggatcatatccaccacattttccagttcctgactccatgccccgtagggtggacgaatataaagcggatcttctcccgtccactcccggatcagctgattcgtcttctcaatttccccctttgccgcttctttgctcagtttgtttaactgtacatgatgataggaatgatttccgatcagatgcccgtcttttaccaactgttctaccatctcgcgacgatcttccatattttcccccagaagaaaaaatgtcgcctgcacaccgcgctctttcaatcccctggataattccatcgtatactcacttggtccgtcatcaaatgtcagggcgactttccgtgcctcctgctgttccggcactacactctcctgaccagtcactgtttccatcgctcttccctgccacgcaatcagcagacacagtatcccggtcactgccagcccgtttttcttccagaaatcccttctcatcttcccgctccggtctttgtcgttatgttactttatgtaaaagagaacaaaaaaagaccgccgcaacttctgcgacagccttatcttttgtttttaattaagcgattttgcttttagccagctctgccagggtagcaaatccttctgcatcgttgattgccatgtcagccagaacttttctgttcagttcaacaccagccagtttcagaccgtacatgaatttgctgtaggacagtccgttcattcttgctgctgcattgatacgagcgatccacagctgtctgaactgacgttttttctgttttctgccagcgtatgcgctagtcagtgcacgcattacagactgttttgcaactctgtactgtttggatcttgctcctctgtaacctttagccagtttcagaactctattgtgttttttctttgcgtttaatccgcctttaattcttgccatctcttatattcctccttcaaactcaatcttataaatacggtaagattttcttcatgttcttaacgttgctctgatccagcacggtagcttttctcaggtttctttttctcttctgagttttctttgttaagatatggctcttataagctttatttcttacgattttacctgtacctgtagttttgaaacgtttagcagctgctctgcttgttttgatttttggcattttatagtcctccttagatttactctgttattttaacgtttttcagttaaaaacatagtcatgcttctgccttccacttttggtgctttttctaccactgcaatgtcagccagtttttctgcgaaatcatccagaatgtatttgctgttgtgcatgtgcgccatctctcttccgcggaaacgcaaggtaacttttaccttgtcgcctttggaaatgaattttcttgcagcacctactttagtgttcagatcgtttgtatcgatattgggagacagacgaacttctttaacatcaatcgtacgctgttttttctttgcttctttttcttttctggccatctcatatcgatattttccgtaatcgataatcttgcaaaccggtggcttagccgtcggtgcaatcttcaccagatccagtcctgcttcctgagcacgtttgtacgcatctctggaagacatgattcccaactgttccccattttcgccaatcagacgaacttctctgtctctgatctgctcattaatcattaaatcgctaatagtagtgcacctccattattcttagataacctttccatatgattcgcattcactgccctgcagcatagccgcataaaaaaagcagatagaccgactatccgcaaatttaccctaagattactctttctacttaagtattaaccatagtcacttttgtgctaaggtgagagcggatactcttctttgttttcatacttgtataggttagcatagttttttctgtctgtcaagatttttttatttttattttctttcttattgtatagaatcttccgccacttctgtcatttttcttaagcttccctgtatttttatcccccgccttgtatctgaacggaaatctgctataatgaccataataaaacctgtatctttcgatacttacagagaggggaataattatgaagaaaaaatggatggtttctaccgctttgctgtgttccgctgcactgcttgtcagcggctgcgggggaaagaaagccgacgggtttgatgctgctggctataccacagcctatcttgatggcatgatcaaaggagatacggattcactggcttcgttgtccgggacttccgcagaggatctgactgccgctttcgataccggaatcgatgaactggtaacttctttctttggcagtgatgacaatacaccgggaagtacacagatttccgcacagcttcgccaggattataccaccttctggaaaaatgcttttgcagacaccaaatacgatataaaggaagcagaagaaaaggacagcagttatcaggtaacggtggaaactcagcagatgcagctttacaccgccatggaacctgtctataacgaaaaacttgccgattatctgaaaaataacagcgtggacagcgatcagtacatcgaggacgtctatactctgatgctggaggcttatcagtcggcactcgatacggttacctacagcgatccgcaggaagttaccgtaacccttcagaaagatgattccgacctgtggagcatctcttccgatgatatgaccacattaaaaaatgcactgatcgacctttccaccctgactccgtctgctgatggaacggatgaaacacctgctcaggcaagtgcggaagagattgcaaacagccagtccgaaggtgcaccgaatctggaatatccggaagatctcggcagcacacccgcttacaaagtcggtgatacgattccgctgcaaagtgacggcaaggatgtgggtactttctgtatcgacaaagtggaagttacggatgaacgaaacgaatacaatccaaccaacccggacaaagtgatcgtgattacttatacttataagaataccgcttttgacaatccgcttttatacgatcagatgagtttccgtattctggatggtgacacggtatgccttccgtattatccatccgatctgatctccccggaactggtgaatgccggtgacgatgccgttaccgcaacccttgcctacggcgtgagcgcatcctgcaatgaggttacgatctatgtagaaggaacacagatcccgactccgttccaggtttccgcttctatctcctgatcgcttatctgaatgatcctgaaaaccccggtttttgcatcgcctgcaaaagccggggttttttgtgatcacctatcctgctttattcacaccggaaggttccacaacaggtttcctcacagatgcatgcctgacttccgtcgatctgtacatgatctgcctgacatacctcctgtctgttataggtacagtcgtgggcggaacatccgacctggacggaactgcatccgcatccacatgtatgggcattggacattcctgtcttctctacaaaactggaacaccaggtttcattttctgtcactgcgtgatctccttttacctggatgtctcctttggaacagagattttccttattgtacatacatttgactgcggaacactgtaatgctggcatttgcacatacctcctttttcttcttatataaatgaaataaactaaaaagcatgtccgaacgtatttttgtccgggcatgctctagtatgtgcatatgctctttttttatacttttaaattttaagcaagtgctttttccagtttttcgatcatttcatcgatatctgcctctgtgatcacaagcggtggtaccatacgcagtacgttcgttcccgcagagatcaccagcagaccgttctcgatagctttcgtaacgacttctcctaccggttttccttccagtaccagtccctgcatcagaccttttccacgtcttgtggtgatgaaatcatatttttccaccagctgatccagtttttcctccagatacggtgccactttattgacatgttccacgattttttccgattcgaacaggtcaaatactttgctgactgccgcacatgccagcgggtttccgccgtatgtggttccgtggtctccaggtaccaaggatgcattggctgtcttttcattcaggacaaatgctcctaccgggacaccgcagcccagtgctttcgcgcaggtcataacatccggctgtacaccgtaagcctggcaggcaaacatgcttccggtacgtcccataccgcactggatctcatcgaggatcagcagaatatcgtgttcatcacacagtttccgcacgccctgaaggaattccggttctgccggatagatgccgccctcgccctgcacggtttccatgatgatcgcgcaggtcttgtcggtaatctgtgcttttacgctctcgagatcattgaaatctgcaaatttgattccgccgatcagcggtttgaacggatcctgatagtgggtattaccggttacggataaggcacccagacttcttccatgaaaggaatggttcatcgcaatgatctcatgatcgttggaaccgtctttcaggtaagcgtattttcttgctactttgatcgcaccttcgatggcttcggttccgctgtttgtgaaaaatactttggaaagtccggttgcttttaccagtttctctgcggcttccatcatcggtacattgtaatacaggttggaggtatggatcactttatcaatctgatccttcagcgcctgattgtatgcctgattattgtatcccagggcaaatactgcgattcctgctgcaaagtccagatattcttttccgtccacatcatacagatggacaccgtttcctttgtccagtacgatctggaaacggttataggtatgcagaatgacttcttctgcccggtcgatatattctttactgtatgtcataatctttgatctcatcctttctcagaattgcggttccaattcctttatttgtaaagatttccagcagcagacagtgcgggattcttccgtccagaatatgtactctggaaacaccttcttcgatcgcatcgatgcagttctgtaacttcgggatcatgccgccacctacgttaccgttgtcgatcagttcttttgcttcttttacaaataatttggacagtagggtggacggatcttttggatccagatatacaccctcgatatcggtcaggaatgctagtttttccgcatgcaccgcttttgcgatcgcacatgctgcatcgtccgcattgatgttataggtatcaaagtttttgtccagaccgatcgggcatacgatcggaaggaaatctttctccagtagatcttcgatgatcttcgggttgacagaagttacatttcccacatatccgatatcttcgccgtttgaatatttcttttctacatttaacagggcaccgtcttttccgctgataccgactgcttttacgccgagagattctaccagtgttaccagttctttgttgacttttccaagaaccatctctgcgacttccatcgtatctttatcggttacacgaagaccgttgacaaatcttggttccataccgacttttcctacccagcggctgatctcttttccaccgccgtgtacgatgatcggcttaaatcctaccagtttcagaagtaccacatcctggataacctgacgtttcagattttcatccaccatggcgcttccgccgtattttactacaataattttccggttaaaccgctgaatataaggcagtgcttcgattaacacctgtgctttttccagatattctgtctttaccattttcttttgttctcctctttttgcttcttctatatctttttatgaacgatagtccgcgttgatctttacatagtcataggtcagatcacagccccatgcggtagctgttacctctcccatcttcacatccgcgatcgctgttacttctttttcggaaaggatctttgtcgcttcctcttcactgtaatcggtcgctacgccgtctttgatgatctgcagttttcctgctttgctttcaaaatacagatctaccttttccggatcaaactgtgcgccggagtatcccatcgcacacaggatccgtccccagttcgcatcatgaccgaagatggctgccttggtcagattggaagtgatgatggatttacttaaagttaccgcctgttctttgctctcggcgccaaccactttaacttcaaataatgcggttgctccctctccgtctccggcgatcttcttcgccagacaggtattgacatagagcagcgcatccaggaaggtctgatagtcttcattttcttctgtaagctcatcattgcctgcggctccgtttgccagaagcaacacggtgtcatttgtggaggtatctccgtctacggaaaccatattataggtatcttttactacggtgctcagtgctttctgcagcagttctttggaaattgccacatcggtggtcaggaagccaagcatcgtacacatattcggatggatcataccggatcccttgcacataccgccaagtgttacggtctttccaccgatctccatggtcactgccacttctttcgatacggtatctgtggtcatgatcgactgtgctgccagttttcctgcctctcttgtatgagataacagcggtaccagattctttacacccgcgccaagaagatccatcggaagctgttttccgatgacaccggtggatgccaccagtacggaatcttccggaatctgtaaaatttctgcagcaatctttgctgtttctttgcagtatccatatccttcttcaccggtacatgcatttgccacaccgctgttacatacgattgcctgtgctgtcggtgcttcgtatacaatatgctgatcccattttaccggggctgcctttaccacgttggtcgtgaaagttcctgctgccacacacggtttctcgctgtataccagcgccatatcttttgtatttcctttttttattccggctgccagtcctgctgcctgaaatccttctgctgcggtaacaccgccgtcaataatcttcatatgtcaattctcctttaactcttcgttatgatcgaccggatatttacgggaacatcggaaccagttcaagtccttcgctctctttcagaccaaacatcaggttcatgttctgaaccgcctgtcctgctgctccttttaccaggttatcaatggctcccatcatgatgatccggttggttctcggatcgatcttgaagtttacgtccacatagttgctgccttctacccatttggtctgcgggcagacatctttttcgagtacacggacaaatttctcatctgcataatatttatcgtaaattgcttttacttcttcataagtcacatcttttttcaggctcgcataggcagttgccaggataccgcggttcattggcaccagatgcggggtgaagttgatcgtgatcttctcgccgcatgcataacccagctgttcttcaatctccggagtatgacggtgagttgccacgccgtaggctttcatattttcattgacttcgcagaacaggttgtccactttcgcacctcgtcctgcaccggaggtaccggattttgcatctacgatgatcgtgttcggatcgatgatgccttcttttaccagcggatagcaggtcaggatactgcaggttgtgtagcatcccggattggctaccaggcgggctttctttacatcctcacggttgatctcacacagtccgtaaacggcttcttcgataaactgtggagatttgtgctccagtttgtaccattcttcatatacttttacatctttgatacggaaatccgcactcagatcgatgatctttactttggaaagaatctcttcgtttaccagagatgcgcacagtccctgaggagttgctgtgaaaatcacatccacctgatctgccagagcttccatattatcatccatgcaggttgcatctaccagctggaagaagttctggtaaatggatgcatatttcttatcaatatagcttcgtgatccataccatttaatctctacatctttatgtcccagaaggatacgcaccagttcggatcctgcatatccggttgctccaataataccaactttaatcattttctcaatctcctctttcttcatgatgtagggtcaaaaagtattttgacccctctgataccggattgttccgtactttgtactcccacaatcctcaaaaacattcgtaatccgctcatttttcttcgaaaaatggctacttactcatgtttttggcgggtcccaaggtcagaactcttcctgcaagcaagcttgcgtcagatttctaaccttttgaccctggtatcatttcatatgttaatttattctactctcttccactgccaaagtaaagtgtcagaaatgagatctttgtattttcttcttacaattgcataattatacagcatttatgtatattatgcaagtttttttattttttttccatttctctattgctttttccttttatatgatgtatattatgccttgtaaaattcatctgaatttgatttcgtcctgtttttctatgcagatggatgcataaaaatacattgtataccgataaacaggaccgtacaataacatatacctgcaaggaggatattataatgaaagaaaaagtaatcttagcgtattccggtggagtagacacgactgcactgatcccgtggctgaaagaaactttcgactatgacgttatctgttgctgtgtaaactgcggtcagggagcagaactggatggtctggataaaagagctgccatgtccggcgcttccaaattatatattgaagatatcgtagatgaattctgcgacgaatacatcgtaccttgtgtacaggccggtgccgtatacgaacacaaatatctgctgggtacttccatggcacgtccggcaatcgcaaaacgtctggtagagatcgccagaaaagaaggcgctactgcgatctgccacggtgctaccggtaaaggaaatgaccagatccgttttgaactgggtatcaaagctctggctccggatctgaagatcatcgctccatggcgtatgacagatgtatggaccatgcagtcccgtgaagatgagctggaatacatcaaacagcatggtatcgaccttccgttcgatgcaaaacacagctacagccgtgaccgtaacctgtggcacatcagccacgaaggactggaactggaagatccttccaacgaaccaaactacaaagatctgctggttctcggtgtttctccggaagatgctccggatcagccggaatatgtaaccatgacttttgaagccggtgttccgaaaactctgaacggaaaagcaatgaaagtttccgagatcatcaccgaactgaacgccctgggcggaaaacatggtatcggtatcatcgatatcgtagaaaaccgtgttgttggtatgaaatcccgtggtgtatacgaaactcctggcggaaccattctgatggaagctcacgatcagctggaagaactgatcctggatcgtgaaaccatggaaaccaagaaaaaactgggcagccagtttgcacaggtagtatacgaaggaaaatggttcacaccactgcgtgaagctatccaggctttcgtagagtccacacagaaatatgtaactggcgaagtaaaattcaaactgtacaaaggcaacatcatcaaagccggtaccacttctccatacagcctgtacaacgagtctctggcatccttcacaaccggtgatatgtacgatcaccacgatgctgacggattcatcactctgttcggactgccgctgaaagttcgtgcgctgatgatgcaggaagtaaaaaataataataaataatgtgaaacagttatccccggcaggacggtttctgccggggatttttttatacctgtacttttcagagttttcctgttaccgcagcacttgtcagtgtggcatataagtgcagattttcaatcattactaacaaaaagcggaagcgcagttcctcatctctgattccctgcgctcccgcttttttctgttgctgtaaattttgtttcttatttatctcttactcattttcttccacatatttctgaatattagaagcatttacatatttctttgtctcgtcgccttcgatgactaccagcgtcggtgcctgcatgataccgtatctggataccagttccgggtttttctcagcatcgatcagctgatactcttcttccgcctccgcaagcatctttttcgcaatcttgcagtttggacaggtacttgtagtaaacagatatttgaccgtgtccggatgctggatcttcacatcgtcttttgtcatcgtaaccatggttctggtggcatgttttccacccactgccggctgttcttcttttttctctgcttccaccggttttgctgccggtgcaccggaatgaaggatatcgtacacggttctgtttttatattcctgcgcttttccgtcgttccagttctgtaccggacgataatatccggtgattcggctgtaaacttctgctttcttgccacaggtcgggcagataaaatgttcccctgcaatatagccgtgttctttacataccgaatacgtcggtgacagggtatagtaaggcagacggtaattttctgcgatctttcttaccagtgtggctgctgccttccagtccggaagtttctctcccaggaatgcatggaagactgtaccggatgtgtacaatgtctgtaactcatcctgcacatccagggcatcgaagatatccgaagtataatctaccggcaggtgcgaactgttcgtgtaatacggggtatctccctcatgacctgcggtaataatatccggataatgtttcttgtcatgttttgccagacggtatgcggtggattctgccggtgttgcctccaggttatacagttctccgtattcttcctgataatcggacagccgctctctcatatggttcaggacgtcttttgtaaacttctgtgtcttctcgtcagccatatccgcgcgaagccatcttgcattcagaccggcctcattcatgcccaccagaccgatggtggagaaatgattgtcaaagcttcccagatagcgcttggtatacgggtacagaccctcatccagcagttttccgatcacttctctcttgatgtgcagggaacgcgcggaaatgtccatcagacggtccagacgctgataaaattcgtcctcatcctgagacagataagcgatccgcggcatattgatcgttaccacgcctacagaaccggtgctttcgccggaaccgaagtatcctccggtctttttacgcagttctctcagatccagacgcagacggcagcacatacttcttacatcgctcggctgcatatcgctgttgatatagttggaaaaatacggggttccgtatttggatgtcatctcaaagagcagacggttgttttcggtatcagaccagtcaaattcttttgtgatggagtaggtcgggatcggatactggaatcctctgccgttggcatctccctcgatcatcgtctcgataaatgccttgttgaccatgtccatctcttttttacagtctttgtatttaaagtccatctcttttccgccaacgatcgccggaagttctgccaggtcatccggaacagtccagtccagtgtgatgttggaaaacggagcctgggttccccagcggctcggtgtattgacaccgtagataaaggcttcgatacattttttcacttccggataggtcagatggtctgcttttacaaacggagccaggtaggtgtcgaaagaagaaaatgcctgtgcacctgcccattcgttctgcatgatgccgaggaaattgaccatctggttacacagaacgctcagatgtttcgccggagcagaagtgatcttgccttctattccccctaaaccctctttaatcagctgttttaacgaccagccggcacagtatccggtcagcatggaaaggtcgtgaatatggatatctgcgtttctgtgtgcgtctgcgatctctttgtcatagatctcggacagccagtagtttgctgttaccgctccggagttgcttaagatcagaccaccgacggaatacgtcactgtagagttctctttgacacgccagtcttccactttcacatagctgtttacgatttctttatagtccagaatcgtggatttcatatttcttactttttctctctgtttgcggtagagaatataagcttttgccacttctgaataaccgcactggatcaggacattttccacactgtcctggatatcttccacagacacctggtctttttt

SEQ ID NO: 2494 - DNA, 1393 bp, Unknown
  gut microbiota DNA sequence
cttctttttccagtgcgaacgcgatctcctgatatccggtcgtatctgctgccggataggtggtcatttttcttcgttccgttaccagacggcggatatccagatcgccgtaaattgtctcattgataaaacgtttcgcctcttttaagatcgaaccgttctcgcagatcagattgtgtccgccaaataccaggtctgtggaggattcgccctctccggctgttgcgtaaatataaccgcagatcagccgcgcggactgtccttttaccagttctctgcggtaggtatcttttccggtgatctcatctccggcagacagattgacgatcacattggctcctgccagtgcgtgtcccacactcggcggatttggcacccagagatcctcacagatctccacagccaccttcatccccggcatctgcgggcaggaaaacagtaattttgttccgaacggtacgttttcttccccgatcgtcaccatatgcgtctccgggtctgccggtgtgaaatgtcttgcctcataatactcggcatagtttggcagattcgtcttcggcaccagaccaaggatttttccccggtttaagactgctgccacattgtacagctttccgttatattcccatggaagtcctacgatgatcagcgcatccacctggctggtttcccctgccagccataccagctgttccttcgcactgtccagaagcagtgtctgccagaacaggtcctggcaggtatatccggtgatacaaagttccggaaatgccatgatctttgcgccctctgtctccatctgacggattagtttcagaatctcccctgcattgtatacacagtctgccacctgaatcttcggtgtgccggctgctgttttgataaatccgtgtctcatagctttcctttccgcctattttctggcaagttcgagcagttctttcagttcatctacgctgaagttgtagttggagttacagaaatggcagttcagttcgatcggctcaccgtcatcgatcatgccctgcagttctttttctcccaggctgatcagcacctttccaacccgtactttatcacagttgcagtagaaactggtcggcactttctcattgatctccagatccatatcaccaagcagtttttccagcagcatttccggtgtataaccctgatccagaagttcggtaacagaagtgatctgtgccagatttttctccagtttctcaatcacttcttcctctgcgttcggcatcagctgcacgataaatccacctgcctggcggacagtattatccttctccatcagtacgccaagtcctactgcggaaggcacctgctcactgcttgcaaaataataggtcagatcatctccgatctcaccggtctttaa

SEQ ID NO: 2495 - DNA, 30898 bp, Unknown
  gut microbiota DNA sequence
attcggttgccgtagcccgctacgccgccctcattcggataaaatctcccacaaactgggactcgcagctcacgaaaagcctttttcaaacacgctctaggcagggatgagtaaggttccctgtacagtctggaaaatagattctgcgaattaagactttgacggaataaacggtgcgatcgctcctgctacattcgagattggcatggtctggagccatatatgtcccgggccggtgatgacggtgttgaagatgccttccccgccaaaaagcatattttttacaccgggaacggtctggatatccatggaacaggtggcttccatagcagccagataaccggtatccacgatgatctgctgaccgggctgcaggtcgtattcgacaacatggccgtcaaattccaggaataccatcccttctccggcaaggcgctgcatgataaatccctcaccgccgaagagtccggaaccgaagcgtttctggaagaaaacagaaaggtttaccccggcttcggaagcgagaaaaccagacttctgtacaatcagttcccgcccgggggaaatctggtaaggaagaatacttcccgggaagcaggaggcaaaagcaatcatgccgggaccgccctgggcagtatagatattctgaaacatggattcaccggaaaacatccgtccgaaagcttttccgatgccgccgttggtagaagttgccatgtgcatgtttggagacatccagctcatggctcctttttctgtgatcattttttcaccgccgtccagataacagataacaacgggtaaagtgtcgccttgaatttcataacgcataatatgtacctcctgtatagaaaatttgcagctgttcagttatgagcaagtagcgaagcggattgcgaatatccgcttgaatgagttccggagttttttacatcctgcctggaacagtgaaaatcatggttatgatgatgtttctaatggtattatatcaaagtagacagctggatgatatggaattaagaaaaaagtaaacaataaaatttgaaaaaagtgtttgacaaatatatatgtatgtggtaatttatagaaaagtttagtgtagtaaaccgttgaagcggagatcaaagcagttatgcgcgcacagagagtccgggagggtgagagccgggtggagatgcaggctgccaaatggaccgctgagggcgcagtgaacagtcattatttcgaatcggctcagtattctgcgacgtggggcatacgtcagttgccgggaatatgcaggtattccgcaaagcgcacagtgcaaactgtgaaacaaggtggtaccgcgggtagtttatcatacgctcgtccttgacagaagaacaagtttctgtcgagggcgggcgttttttcgcgttgtgtatcaataattgatccggtgaatcaattttgattcgcgggcaacaagtcaaggttcatgcttgcctgagactttcgcggcaggacagaaaaacaaagggaaagacagtaacagaaaagatttacaggaggtgcccgaatgtatccaacattagaaaaggtaaaagaaatcgcagccagtggagagtatcgcaggattcccgtatgtaaggagttatatgcggatcgatatacacccgtagaagtgatgcgggttttgcggaaagcaagtaagcattgctatctgctcgagagtgccagtcagacggaggtgtggggaagattttcttttctcggttatgagccggcgatggagatcacctgtacggatggagtcctgaatatccgcaaaaccggggaggatatggttgtgacaaagaaagtggaacatccgggcgatactctgcgggagattattgaacagtataaaacaccggtgatggaagaacttccaccatttaccggcgggctggtagggtacttttcctatgactatatcaaatatagcgaacagaaattaaaactcgaagataaagagcagcaggatttcagggatatggatctgatgttgttcgatcaggtgattgcctttgatcattaccgtcagaaagtgttgctgatcgccggagtgatgaccgatgatctggaagcgtcttatcagaaggcagaaggaaaactggaagagatggcacagcttctgaaaaccggatcgcatatggaattcgaaaaactgaagctggagtccgatatccggccacagttcccggaagcggaatactgtgagatggtggagaaagccaaacattacatccgtgagggtgatattttccaggtggtattatcgaatccgatgcgggcgaaagcgacaggaaatcttttcgatacctaccgggtgctgagggcgacaaacccatctccgtatatgttctatttttccagcgacgatattgagattgcgggagcatctccggagactctggtaaaactggaagccgggaatctgagtactttcccgttggccggaaccagaccgagaggaaagacaagggaagaagacagggaactggaagccggacttttaaaagatgaaaaagaacgggcagaacacaacatgctggtggatctgggaagaaatgatatcggaaagatcagtaagattggcagtgtgaaagtggaaaaatacatgtgtgtggaacatttttcacatgtcatgcatcttggttctacggtagtcggagatctgcgagaggataaagatgcggtggatgccgttgatgcgatcctgccggctggaacactctccggagcaccgaagttccgggcctgtcagatcatcgaagaactggaacacagcaaacgtggcatctacggtggggcgatcggttatcttgattttacaggaaatctggatacctgtatcgcgatccgcctggtttataaaaagaagggcgaaatctgtattcgttccggtgccggtatcgtggcagacagcgtaccggagaaagaatttgaagaatgctgcaacaaggcacgggccgtggttcaggcaattgcacaggcacaggagggattggaatgatagtactgattgataattacgacagtttttcttataacttatatcagctgatcggttccgtggagccggacgtcaaagttgtacgaaacgatgcatacacggtggaagagatcgaggcgatgaaaccggaagccatcatcctttctccgggacccggaaaaccgtccgatgcaggaatctgtattgaggcgatccggtattttgccggaaaggttccggtctttggtgtgtgtctgggacatcaggcaatctgcgaagcatttggtggaacggtgtcctatgcgaaagaactgatgcacggaaaacagaaagagattcatcagatcggtgaaaatcagctgtttcaggggctgccggagacatttccggcagcgcggtatcactcactggcagcattaaaggaagaactgccggaagaactgaaagtgactgcggagtcggaagacggagaagtgatggcggtagaacacacaaaatatccgatctacggtgtacagtttcacccggaatcggtgatgacaccggatggcaagattatgatagagaactttatggatgtagtcagaggaggaagagaacaatgatcaaagaagcaattatcaaagtggcaaaaaaagaagatctgacatatgaaaaatcaaaagctgttatgaatgagatcatggatggagaaacttctcaggtacagacggcggcatatctgatagccttagctatgaagggtgaaaccattgatgagatcacaggatctgccgaaggtatgcgttcccatgccctgcagttaaaacatgatatggatgtcctggagattgtcggtaccggtggggacggttccaattcttttaatatttccacaaccgcttctctggtcatcgcagcaggtggtgttccggtagcaaaacatggaaaccgtgcggcatcttccaaatcaggagcagcggatgtactggaagccctgggtgtaaagatcacgctgacaccggaacagagtgaaaaaatactggaaaagatcgggatctgtttcctgtttgcacagacttatcacaccgcgatgaaatatgtggcaccggtcagaaaagaactgggtatccgcacagtgtttaacattctcggcccgctgacgaacccggcaaatgcaaacatgcagatcatgggtgtctacagtgaagagctggtagagccgatggcacaggttctggtgaaactgggcgtgaaaaagggtatggttgtgtatggtacggacagcctggatgagatctcgatgagtgcaccgactgctgtgtgtgagatctgtgagggtaaattagctccttatgagatagttccggaacagttcggttacaaaaaatgcgagaaagacgagttaagaggtggtactccgcgggaaaatgcgaccatcaccagagcaatcctcgatggcagtgaacagggggcgaaacgacaggccgtgtgcatgaacgccggagccgctctgtatgtggcaggaaaagcagggacactggaagaaggtgtacgtctggcagagcaactgatcgacagcggtgcagcactgaagaaactggaagcattcattcgggagagtaatgaagcatgaatatattagaagaaattgcaggaaagacaagagagcggattggccaggaaaaaggtaaggtatctgttgcagaattaaaggaaaggatccgggaccgggaacagaatccggcgattcttccgacaccgtctttttatcaggcattgaaaaaagaagggatgtcctatatctgtgaggtgaagaaagcatctccgtcaaaaggactgatcgcaccggattttccgtatgtggagatcgcaaaagaatatgaggcagcgggtgcatcggcgatttcctgtttgacagagcccttttattttcagggatccgaccggtatctggaagagattacagcggcagtgaatattccggtactccggaaagattttacagtagatgagtatatgatctatcaggcgaaagcctttggggcatcagcagtacttctgatctgtgcgatccttgatgatgtacagttgaaagattaccgacagctggtagaaagccttggactggatgcactggtggaagcacacgatgagcgggaagtagaacgggcactgaaagccggtgcgcggatcgtaggagtcaacaatcgggatcttcgaacgtttcagatagatatgaacaacagcatccggctgcggaatctggcaccggaggaagtggtctttgtatcggagagcgggattaagacaagtgcagatattaacctgttatatgacaatcgggtggatgccgtactgatcggagagacgctgatgcgaagcccggataaaaaggcgatgcttgagacactgaacgggaaaccgctttccagtacatcataaattacgtttctgttacattgacgccggatgatttcttcatatgcaaggcggaggaaagaggcgtagcggtggctacggcgactgacgacaacgcagcagatgaaaaatcagacaagtcaatgtgacagttacgtagtttatgatgtactagataagcaggagagattaagcatgagcagaataaaaatatgcggtctgcggcggccggaggatatcgcagcggtcaatgaggcaaggccggattactgtggatttattgtggaatatccaaaaagcagacggagtatcgatcgggcaacattacgggaactggtacagggactgcgggaggaaattgttccggtaggtgtatttgtcaatgcaccgaaagagctggtggcagatcttctcgaggagggaacgatacagatagcacagcttcacggacaggaatcgcaggaatatatacaggaattaaaggtactgacagaaaaaccgctgattcaggcattttccataaagtcgaaggaagatgtggagcgggcccgggagagtgtggcggattatattttactggatcagggaagcggcggaacgggaaaagtgtttgactggtctctggtgggtgaagtcggacgaccgtattttctggccggaggtctcggtgtggaaaatctgcgggaagcgatcgggatgcttcacccatgggcggtggatctgagcagtagcctggaaattgatggaagtaaagatgccggacggatccggcaggcagtggatattgtaagaatggaggaaacaaaagatgtcaaaaggtagatttggagtacacggcggacagtatattccagagacgctgatgaatgcggttctggaactggaggaagcctacaatcattataaaaatgacccggagttcaaccgggaactggcggagcttctgaatgaatatgcgggaagaccgtccaggctgtactatgcggctcatatgacagaggatctcggcggggcaaaagtgtatctgaagagagaagatctgaaccataccggtgcacataagattaataatgtgctggggcaggtactgctggcaaagaaaatgggaaaaacccgtgtgatcgcagagacaggagccggtcagcatggggtggcgacagctaccgcagctgccatgatgggtatggaatgtgaagtatttatgggaaaagaggatacggagcgtcaggcgctgaacgtgtatcggatgcgtcttctgggagcgaaggttcatgcagttacttccggaacggctacgttaaaagatgcggtttccgagaccatgagagagtggaccaaccggatcgcggacacgcattatgtactgggttctgcgatgggaccgcatccgttcccgacgattgtcagagattttcaggcggtaatctccaaggagatcaaggagcagatcctggagaaagagggacggcttccagatgctgttctggcgtgtgtcggcggcggatcgaatgcgatcggaaccttttataattttatcgaagatgaaggtgtacgtctgatcggctgtgaggcagcaggacggggtatcaatacggcagaaactgcagcaacgatcgctaccggaaagctgggtatcttccatggaatgaaatcttatttctgccaggatgaatatggtcagatcgcaccggtatattcgatctcagccggactagattatccgggtgtgggaccggagcatgcccatctgtatgacaccggacgtgcggagtatgtgccggtcacggatgatgaggcagtagatgcctttgaatatttgtctaaggtggaaggtattatcccggcgatcgagagtgcccatgcagttgcatatgcgaagaagctggttccgacgatgagcaaggatcagattatagtaattaccatctccggaaggggagacaaagactgtgcagcgattgcccgctacagaggggaggatatccatgaataagagaattacagagagttttacaaaagggaaagcatttatttcgtttattacctgcggggatccgtcactggaggtgacagagcagcttgtatatgccatggaggaagcaggggcagatctgatcgaactgggaatcccgttttctgatccgaccgccgaaggtccggtgatccaggcggcaaatgtccgtgcgctgtccggcggagttacgacggacaaggtgtttgcgatggttgagaagattcggaagaattcgagtattccgatggtgtttatgacgtatgcaaatgtagtgttttcttatggtacggagcggtttgtgaagaaggctgctgaggttggcatggacggactgatcttaccggatgtgccgtttgaggagaaagaggagtttgacggaatctgcaaggagtacggactggatctgatttctctgatcgcaccgacttcgcatgagagaatctccatgattgcgaaggaagcgcagggatttgtgtactgtgtttcttctctgggggttacgggtatgcgctctcagatcacgacggatatcggagcgatggtggatctggtgaagaaggtgaaggatattccttgtgccgttggttttggtatctcgaatccggagcaggcgaagaagatggccgggcagtcggacggagtaattgtcggatcggcgatcgtgaagctttgcggacagtatggggtggagtgtgttccttatgtgaaggagtatgtgaaagctatgaaggatgctgtcagggaggcttaggttttcttgtagttttcttttacgccggacgaaatggagcggtggacgagagggtcttgatgtgagtgtttcctttacggtgttgatgccggcttttttcgattgaggttgttgagtcatttcagtttacttatgtcgaatagaaatttaacagtggaaggagcaggttctgggtttcaagacactacaacatacataatcctacacatccaactgagtcatagggatacaccagagggggaagaatattcgatatttgaatttacacatgtaaaatgtaaacttaaaatcaaaatgagttgacaattaatgcttttatgtgttaaagtgatatccgtacgaaaaatgaaagggcattttgcccatgacaaatgaaaggatatgttatgaattccgaattttatgaaaaagaagtacctgttctttccagggaggatgcgatcgctattttgaacacgccggatgaggagctggatgcgctgatcgatcgcgcgaagagtttgcgatatcgatataagggggatcgtgtaagtattcatattcttaccaacgcccgcagcggcaactgttcgcaggattgtgcttactgtgcacagtcatgtcgttctaccgcagatattgataagtataaatgggtagatgaagataagctgtatcaggataatgattttgtaaatgagtatcatttatccagacattgtatcggtctgagtgggatgaagtttacggataaagagatcgaggaacttgcccgccggatcaggaagatgaaagaacatggaacgcatctttgctgttctatcgggtttctgacagaaaagcaggcaagaatgctcaaagaagccggtctggatcggatcaatcacaatctgaacagcagccggtcttattatcataatatctgcagcacacacacgtttgagcagcgtgtacagaatatccgcatgcttcagggaatcggatttgagatctgcagtggcgggatcattggaatgggcgaaagtaaagaggatgtcgttgatatgcttcttgaactgcgggagattcagccggaggctctgccgatcaatttccttctgccgatcaaaggaactccgcttggagatgctgatatctccgggctgacaaccgaatactgcatgaaagttctctgtcttgcaagacttctggtgccgaaagcagatattcgctgcgcggccggaagagaagtctattttaaaggggaagaaaagaaactgctcagtgtggttgactcgatctttgcctcaggttacctgacagaaggcggtcagggaattgaagataccctcaaaacgatcacggatgccggatttatttatgagattgaatccgcataacggacaaattttagaaggagaatttttaacatgaaccagacacaaagcagtacgttacctcgcagcaaaacctatgaaatcaccataaccgcactgatgacagcggtcacctgtattcttgctccaatgtccatccccatcggaccggttccgatttcctttaccaatctggcaatctatctgtccctgtatcttctcggatggaaaagaggaaccatcagttatctgatctatcttctgatcggactcgttgggctcccggtattttccggcttcactggcggtccggcaaaactggcagggcctacaggcggatatatcatcggatttatcgtaatggcaattattgccggactggtcatcgacaactgccgcaaaccatggcttcagcttatcggtatgatcgtcggaaccatcgtatgttaccttttcggaaccatatggttctgcgtggtcgcaggttatactttccaggcagccctcgcagtctgcgtcatcccgtttattccggccgacctggtaaaaatgattatcgcgatgctcatcggaccgatgataaagaaaagaatacggtaatcgcggcagtcgccaaggtcctgtgcaagcatggactttgactctgttgcccgcataaataaaaatgctcctgatcaatcatcaggagcatttttattgcactgcatatcaataattagttcggcggaccaattttgatttacgcattcagttgttcaatcgcagcaaccgttctctcatattctttcgcaaccgcgttcatcatattgtcatcttccggcaggttgcctgcgcggagaacttcggtgagagtggcggtggcttcatagagcggggtgaatccaaggttctgtgcgacgccttttaaggtgtgggcggcacggaacgcttcttctacatttttttcttccagagtgctctggagctgggaaaagctggggtcactaggaaatttcaggacgaatttggtgatcagtctttcgctgcgaaggcgtccgaagacttcctcataatcagctcccatagcctgataacattcattaatattcatacttgtaattcctttctgcatgtgatggagacagaaacagcgggtctctgtctgcaatacgaaaaaatgtcataagtaattatattatatgagtatatccaaataaaaacaagaattttagaaaaatgtaagaaaaatgtaatggctactgtaatgctttttgtaatgtttttaattcctacaggcgaaatactttcgttgcgataaagaagtaaatcataatggaactcgcatcgacgatggtagtgatcagcggagatgccatcagtgccgggtccagaccgatttttttggcgaacatcgggaggatgcagccgagcagtttggcggaaataacggttgcgaccagggacagggcgatgacgattgccatacctgcctgttgataggtcagatagatccgcagtccgttggcgacagcgaggacaacacccacgatcagggaaacacggaattctttccagatgacacggaaaaagtcatggaaggttacctgattcagggcgattccgcggatgatcagggtggaactctgagaaccacagtttccgccggtgtccatcagcatcgggatgaaggataccagaagcgggattgccgcgaaagcgttttcataacgggtgataatacttccggtgatgatagaagaaaacatcagtaccagaagccacgggattctgcgctttgcgtgttcccaggcggatacctcaaagtaagttttttcacttggagccacagccgccatcttggtgatatcctcggttgcctcttcgaccatgacatccatggcgtcatcgaatgttacgatgccgaccagcagaccgtcattgtcaagaaccggaagtgccagcagatcgtatttgcgaagctggtgagccacttcctctttgtcggtcagggtagacacagagatgatttctgtctccatgatatcttcaatcaggacatcatcatccgtagtcagcagatcttttgcagaaacgatgccaagcagtttccgctgctggatcacataacaggtatagatggtttctttgtgaataccggtttccttgatatgtgcgagtgcctgacctaccgtcagatgcggtttcagatccacgtattcggttgtcatgatacttccggcactgtcctccggataatttaacagtttgttgattgtttcccgttccttcgggccgctggcatcaagaatccgggtaaccagattggctggaagttcttctaacagatccacggtgtcatccatgtacagatcgtccaggatttctttcagttctttttctgagaggacttctaccaggacagactgcagggaactttccatgttggcaaatacgtctgccgccttttctttgggaatcagacggaaggcgagagccagttctttatcatcaaattctccaagcagtgaggcaatgtccactgcgttcattacgtccagaacgtcttttaccgatttgtaacggcgttcctggagcagttttacaaaaatatctttgttcatcataaacgtacctccgatatgcaattattggtatatgatcgtcgcattccgcgtgataactggcaccagcgtccatttcctcaccacctttcattctttaaaaatcagcataaaaaaattccttcaaagcctgagcaatgaaagaatctgcaaaatacatcacggaaaaatcctgaccatcgttcaagctttagtatcacagggcatatatcaattgcattaggttatgccttcacgacatgacctgctgaccagcgcgccgtgtctccacagccttgcggcagcaatctcaggaaaatccaaatccctgtggtaacctcacctaccgaaatctctttatttgtcgtgattatcatatagcaaacagaaagtaatgtcaatcgcttttttacaattgaaagcacctgtcaaagtcgatataatgatagcagcgatgtgcccggtacaaaggggaagaaaagagtcactgacagaacgggtacaggggaaggagaagacagatgacagtagcagaaaaaatcaatgagatggggatcgtaccggttgtggtactggaggatgcgatggatgcaaaaccgctggcgaaagctctttgcgagggcgggcttccgtgcgcggaggtgacattccgaacggcggcagcgaaggaatccattcgtatcatgctggaggaatatccggagatgttcgtgggtgcgggaactgttctgacgacaagacaggtagacgaagccatcgaagcaggagcaaaatttatcgtaagcccgggattggatccggagatcgtggattactgtatcgaaaaacagatcccggtatttcctggctgcgtgacggcatcggagctggcgcaggcggtaaaacggggactggaagtggtcaaattcttcccggcagagacttccggcgggctggcagcgatcaaagcactggcagctccatatgtgggaatgaaatttatgccgaccggtggtatcaatctgaaaaatgtccgttcttatctggaaagtgatgtgatccttgcctgtggcggcagctggatggtgaaaaaagacctgatccagagcgggcagtttgatgcgatccgccagatgacagcggatgcggtggcactggtcagagaagtacgaggcagtcaggagaaataaatatgaaaaaaacattattatttggagaaccgatggctctgttactggcagacacacctggtgtgttggagggcgtggagcattttacaagaagaatgtccggggcggaggtcaatgtggcgatcgggcttacccggcttggttttccggtggaatatctgacacggcttggggatgatccgtttgggcattatattgaacaggcgttaaaagacaatgggatcggaacgaatcttctgacgtatgatccagtttatcgaaccgggattcagctgaaagaatatgtgaaagacggacatgatccggcggcaccgtattatcgaaaaggatcggcggcatcgcatctgtctataagagaaatcgatgcgctggatcttggtgagatcgggctggtgcatgtgacggggatcccgccggcgctttcaaaagaagcgagagaggcgacgtatcgcctgatggagcgggcgcgtaaggcgcagattccggtgacttttgatccgaatctccgtccggcactgtgggaaaatgatgagatgatgagaaaggttctgaacgatctggcaaattacgcagatgtggtactgccgggaatcggggaatgtgagatccttgcgggtacaacagataaggaaaaagcggctgatttttatcatcagaaaggtgcggctcttgttgtaatcaaagatggaaaaaatggtgcttatgtatccgaaaagaaagaaaacggggagatcacccgggatatgatcccggggtatccggtaaagaaagtgatggataccgtaggcgcgggagacggatttgccgtcggtgtactgagcggactgctgaaaggtcttccggtgagcgaatgtgcgaaacggggcaatgcgatcggctcgatccaggtacagcaccgtggcgacaacgaagggctgccgacagaagaaatcctgcaaacatatatgctaggaaatatacagaaataaagaaaacaggaaacgaaaaaaatgaatacattttggattttaatggaacagatcgagctgtttatcgtctatcttgtcatcggtatgatactggtgcggaccggtgtgctgagtgataagggactcgactggatcgcccgagtcgtgatgaaactttcgctgccgacgatgatctttgtcaatgtagtcagccaggtagaccggacggcactggtacaatcgctgtccatcatcggactggcggtgacagcctcgattctcttatttggactgggcgttgcgttgacaaaactgtttcatgtagaaggtgaccggtcgcagatctaccgggcgatgacgatgtttggcaatgtgggatttatgggaatcccgatcattaccagcattttcccggaacggggcatgctgtatgtatccgtatttaccattgtggatcagctggcgatgtggacggtaggagtgaaactgacctccccgagtggaaaaggaaagtttgatccgaaaaagctgatcaatccggcgacagttgccatcgcgctggcagtccttttcgtactgaccgggctgaaacttccgggtgtcttccagacgggattccagaatatcggagcgacggcgacaccgcttgcgatgatctatcttggcggagtgtttgcctgtatggatatccgaaaatatgtaaaacagatcgaattatatggaattatcatctgtaaaatgctgatttttccggtactgttttaccttgtcctgggtttcatcccggtatcggaagaaatccgtatgaccatgtccctgatcaccgcgatgccgaccatgtcctccgtagtcatgctcgctaattcctccggttccgacggagaatattcgctgggaggggtgatgctgaccaccctttgcgggatcgtgacactgccggttgtgtgcagagtgcttttgtggattgcaggaagctgagagatgcaccactgtctgtcgggaatatccggacaggcagtggcgcatgctatctataggcagaacctatggtaagatatacgaaacaagtatttgccatatctgacaaaatggaatacaataattctatataagcttgtcagaataacgaaatatatggcagcagaatgggagaagagaattatgggagatggaaaaaaaatgaaagagattcatcaggagtttctgaccggcgagcgtgcgctgtttcaggggaaggatctgaaaatttatgatactatttttgacgacggagagtctccgttaaaagagagcagaaatattgaattatacggaagcatgttcaaatggaaatatccgctgtggtatgcgaaagatatcaaggcggtggattgtacctggtttgagatggcacgcgcgggtgtgtggtatacggaccggatcgaagtgaccaacgcagtgatcgaagcaccgaagaatttccgccggtgtaacggactgaaactgaccaatgtaaccttcccgaatgcgtcagagacgctgtggagttgtcagaatgtggaactggatcatgtggatgcaaagggcgattatttcggtatgaactgccaggatctggtgctgaaaaacttccgtctggtgggaaattattcctttgacggtgtaaaaaatatggaagtacacaacgcaacgatgctgtccaaggatgcattctggaacagtgaaaatgtaacggtgtacgattcctttatctccggagaatatctgggatggaatgcgaaaaatctgacactggtaaactgtacgatcgagagtctgcagggcatgtgttatattgacaatctggtgatgaaaaactgtaagctgatcaatacgactttggcatttgaatattcttctgtggatgccaagatccacggaaccatcgacagtgtgctgaacccgtcgagtggtgtgatccgtgcggatgagatcaaagaactgacggtagaaaaagataaggtagacccgtcaaagacgaagatctttgtacagggaaaagaagtcgaggcataatggggtatcgtttatacgatacaggcaaaaagaaggaacggaaaattgccgggacaaaaactgaagatatcgaacaaataaggacagagaggaagatacagcatgagcagatatgattttgaccagattacagaccggagaaataccggatctctgaaatgggatgtggcggaaaatgaattaccgatgtgggtggcggatatggattttcagacggctccggctgtacgggaagcgattgaaaagcgggctgcacacggcgtgttcggctatacggatgtggaagaagactggtatcaggcctacatggactggtggaagaggcgtcatcagttttctattaaaaaagaatggctgaccttttgtaccggtgtggtaccggcgatctccagcacggtccgcaagctgaccacaccgggggaaaacgtactgatccagaccccggtgtataatattttctttaattccatcgtcaataacggaagaaatgtggtggaatgcccgctggcctatgacggggaaaactatgagatggactttgaggcgctggaggagaaattatcggatccgcagacgtcgctgatgatcctgtgtaacccacacaatccggtgggaagaatctgggagcgggagacgctggcacgggtgggagaactgtgtgagaaatatcacgtaacggttctttcagatgagatccattgcgatatcacccggccgggcactggatacattccgtttgcggcggcttccgagacttgtaaaaatatcagtgtgacctgtattgcaccgacgaaagcatttaacattgcaggcatccagacagcagccgtgatgatcccgaacgaggcactgcatcataaagtgtggcgtgcgttgaatacggatgaggtggcagaaccgaatgtatttgccatcggtgcggcgatcgcggcatttaccaaaggagaagactggctggaagaactccgtgagtatctctttgagaaccggacatacatgacggattatatccgaaaagagatcccacagctgaaagtgacagaggcagatgcgacctaccttctttgggtggattgcaatgcacttggctgcagtgcgaaagaaattgccgatacgattcgaaaaacgacaggtctttatgtatcggaaggcgcacagtacggaaaaaccggcgagcagtttttacgcatcaatctggcatgccagaaaagccggatagcagatggctgtgagcggctgaaacggggcgtggaggcgtacctgagtcagagataacagcgggagaaaacaaagaacaatagtaactattcagtaggtagtaactgtgaaggtattggacagttacgaaaaacacagaagatagctgtgagaaatgagaaacatatggagaaaaaacgaataccggtacgtccgcatcatgggatgtgtctggcgtattttataggaaaaggatacagcgaaggattctccgcgcatatggagaaaatgttacacattctggaacaagatgtcccgatccgtctggtggtttcgctggatgaaatctgcagcgcatgcccgaaccatcagttccttaccgatgaggaaaattccggagaaacaaaggaaatctgtgaagcgcaggaaaaagtgttccggtatgatcatggcgtgctggaggcctgcgggctgacagaaggagaagaactgaactttctggaatttgcgcagaaagtccagaaaaaggtaatcgatacaggattgcgggagaagatctgcggggactgtgagtggaatgaaatctgcagtgagaaaagcagtcgatgggaaaataaaaatattttacgttgatttttctaaaagatatctgaaatttcatattgatttcataaaatgatggaacacctgtaaaagggtgattcatcattttttttaaatctgtttcatcgcacctgatgtgcaattgctgacagatttcggaagattttgcaggagggataagaagacatgaaaaattatgtgattgatacgaatgtactgattcaggcaccaaatgctctgtgggcttttcaggaaaatcggattgtgattccgctggtggttgtggaagaactggatcatttgaaaaaagcagaaggagaaaaaggagccaatgccagaaaagttattcgctgtctggaacagctgagacatcagggagatcttctgaaaggggtcagaatcgggcaggaaggaattcttcagatcgaaaaaaactttgtatatgtggaactgccggaggaacttccggatgacagagcagacaatcgtattcttcaggtgtgtgttgggatgcgtgagaaagaaaaagatccggtgatcctggtaaccaaagatctgctgttacggttgaaagcacaacttcttggaatccaggcagaagattttgaggcagagcaggtagaagaacagaaacttcaatataccggaagggatgaagtatttgtaccggaagagtatttcaaagattttaagaaaaagggagtacctgtcgcggttgtgtataaagcagatgagcagggagaaaaggtctatccgaaacttacggagaatcagtttctgattctgagaagtgatcagtcggagaaaaaaagccagttgggaagagtagagggagagatgatccgtaaactgacctatcgaaaaaccgagccatatggcatccgtccgagaaatgcaggacagtattttttccaggaagcactgatgcatccggcggagaaagcaccgcttgtaatcgtaaaagggatggcgggaaccagtaaaactttttattcgctggccgttggactggagaaagttctgaatcatccgtcaggagagtatcgccggattctgatctgccgtccaaatgcccagtttgacgatgatattggcttccttccaggtgacgaacaggaaaaaatttctccgctgatgcggccgatcatggataatctggaacagctgatcgattccaatgaagaggaacgctataaagatgaaaatgaattaaaagggaagatagaagagatttttgaacgggggctgatccaggccgaagctttgaactttatccgtggccgttccctgattcaaacgtatctgattatcgacgaagcacagaatactaccccaaatcagatcaaaggaatcatcacccgtgcggggaaaaatacaaagattatcctgttgggagatcccgatcagattgaccggccattcctggatgagcgtaccaacggactttcttatgcagcagagcatatgaaaggaagttcgttatgctggcagatcaccatgagtccggaggaatgcgagcggtcagaactggccatggacgcaattcaacggctggaaaagagaacagaaaagaaggaatacagatgaaaccgggatatgaacagattagaaatgatcgggagatcaaccttttaattgaacagggaaaccgtaacctgaaagtactgggatataccgaacattccagaaaacatgcggtgaaagtggcggagacagcaggaaggatcctgaaggaactggggtatcggagacgacaggtggagatggcaaaaattgcaggttatatgcatgatatcggtaacactgttaaccgctatgatcatgcacacagcagtgcggtgcttgcatatggaatcttaaaagaacgggaaatgaagcaggaagatattctgacgattacttcggctattggacaacacgatgaagaaaccggtacggcggtagatgcggtttctgcggcactgatcctggcagataaaacagatgtgcgcagaaatcgggtacagaatccggtaccggcaaattttgatatccatgaccgggtaaattatgcggcactttcttcaaaccttgagattgatcctgagaagaaagtcattcacatgagactggagttggacgattccatctgcagtgtgatggattattttgaaatttttttaaaacggatgttgatgtgcagacgtgcagcggaaatgctgggttgcagatttaaacttaccgcgaacggaagtaaaatatgttagagcgtgtttgaaaaaggcttttcgtgagccgcaaagtggggcttgcaaattgcggaaatgatttttcagacatgctctagcttcatgaggaaaatcccctccttttttgaaggataaattgacaaaaagttgtggaaaatctatactgaagtcagagaattacaaatatttgtgacagaaagggggagaaaaaaatgaagatgaaaatcgcccagattcaggctcatgtttacgaagaaaaaagcaaaaatctggaagaactggagcggaatctggaacgtataaaggacgaaaacattgatctggtaacccttggcgaaatgttcaactgcccgtaccagacaccttgttttccggtctatgcggaaatggaacagggagaaacctggcaacggttaagtgctcttgcaaaaaaataccagatttatctgtcagccggaagtgtaccggaaaaagataaggaaggacatgtgtacaatactgcttatgtcttcgaccggcagggcaaccagattgcaaaacaccgcaaagtgcatctgtttgatatcgccgtgaagggcggacagtgctatcaggagtccgcgacactgactgccggaggccagattaccgtttttgatacggagtttgggaaaatgggaatctgtatctgctttgactgcagatttccggagatcgtacggctgatgacattgcggggcgccagagtgatcttggtaccggcagcctttaacatgacaaccggaccggcacattgggaattaatgttcaggggaagagcggtggacaatcagtgctatatgatcggaacttccgatgcaagagacgagcaggcaggatatatctcctggggccattctcttgtcgtgtcaccctggggggatgtggtgacacagatggatgagaaaccgggcattcaggtcacggaacttgatctcgaccgcgtggaagcgatccgggaacagttaccgctactgtccgcgcgaagaacggatctgtatgaactgaaagaaaaataaaaggtttgttaacatgaattttacgggaagataatatagaattaaagtaaatttgatattgtgttcctgtaagtgtgacaattggacaaaggtaaaagaaagcaaagggataagcaatgaacgagaccatctatatgaaccgggaactgtcctggttaaagtttaatgaacgtgtactggaagaagcggagaacccgaaggttccgctgtgtgagcgactgtcatttgcatcgatctaccagagtaatctggacgaatttttcatggtgcgtgtgggatcgctgatcgatcagatgctggtggcaaaagattccagagaaaataagacgcacatgacaccgaaggagcagatccaggcaatcctgccgcaggtggagatcctgaacagacgaaaagacgaagtctatggaaagatcatgaaaaagatcgaggattatggtgtaaagctggtggatttcagtaagatttccgaagaagagagtaaatttctggaagcgtattttgacgtggaaatctccggtctgatctctccgacgatcgtgggaaaacgacagccatttccatttttaaagaataaagaaatctatgcggttgtgattctgacaacaaagagcggaaaagaacgactgggaatcatcccgtgcggaagcggtgtttttgaccggctgatccgcctgccgggtggcaatacctacatgttgtccgaagaattgattcttcactatatcccgaaagtcttcaaaggatatcaggtaaaagaaaaatccctgcttcgcgtgaccagaaatgcagatatcgatgccgatgcattgtatgacgaggatctggactaccgggaatttatggcggaactgatcaagagaagaaagaaactttccccagtgcgcatcgaactttccagaaaactcagcgaggagagtgtcaagatgctctgtggttatctgacaacgaaaccacagtatgtgttccgcagccagtctccgctggatctgtcctttgtcttccagatcgaggatgcactccgcaagatcccggaactgttctatgcgagaagaacgccgagaaaatccccggcatttaccggtgaccggccgatccttgaccagatcaaagaaaaggacaaactgctttcctatccgtatgagagcatcaacccgttcttaaatatgcttcaccaggcagccaacgataaagatgttgtttcgattaagatgacactgtaccgtgtggcaaaacagagtaaagtcgtggaagccctgatcgaagccgcagagaacggaaaagaagtgctggtactggtggaactgaaagcccgttttgacgaggaaaataatatcggatggtcccgtcttttggaggatgcgggctgccgcgtgatctacggtctggatggttataaagtacattccaaactctgcctgatcaccaagaaaaccgatgaacagatcgaatattatacccagatcggtaccggaaactacaacgagaagacctcccgtctgtacaccgacctgtctctgatgacgtataacgtggatatcggtttggaggcagcgaatgtcttccaggcactggcgatgggagagacgatcaaacgggtcgatcatctgctggtggcaccgaagtgtctgcaaaataaagtgctggatatgatcgatgaagagatcaggcatgccgaggcaggtgaaccggcatacatcggactgaagatgaactctctgaccgataagaagatcatggaaaaactggtggaggcatcctgcgccggcgtgaagatcgatatggtagttcgtggtatctgctgtctgattccgcaggtaccgggaaaaacagaaaatatccgtgtgagaagtatcgtaggccgtttcctcgaacactccagaatctatatcttcggaagtgagggaagagaaaaaatctatattgcctctgccgacttcatgaccagaaatactctgcgccgtgtggaggtggcagcaccggtttacgatgaagagatcaaagcccgccttctgcggatgttccatatcatgttacaggataaccagcaggcgcgtcaggaagacggagaagggatctaccggattctgccgaccgatgaagaaccgctggattctcaggagtatttctatgccgaggcatatgagattgcagaaaatctctgaagagtgccccttcagtatgtcccgtttgtcagaatcggacacagacataccgtaaggaagcggcacggctggaaaaaacacagaaaaagaaaaaagtaaatgagaaaaaatcccgtttaagcctattgaaaatcccaggaagttgtgctacacttatcgtagttagtaaaagctaaccatcatgtgaataagtcgtgggaagatcctttctgctcctgcggaatgggagcagaggatcgtccatgggaaagggtcagggataagatgaaacatttgacaattgaaaaagtaatcggacgtgaaattattgactccagaggcaatcctactgtagaagcagaggtttatctttcggacggtaccatgggaagaggcaccgcacccagcggcgcatctaccggagaattcgaagcactggagctgagagacggagataaagaaaaattcggaggcaaaggtgtatccaaagcggttgccaatgtaaacacagtaatcaatgaaacattaaaaggtgtcaatgcgctggatatctatgcgatagatgcagctatgatcaaagcagacggaaccaaagataaatccaatctgggcgcaaacgctattctggcagtatcgatcgcaggtgccagagcggcagcaaacgcactggatctgccactgtatcgtttcctgggcggtgtaaacggcaatcgcctgccactgccgatgatgaacatcttgaatggtggtgcacatgcagccaatactgtagatgtacaggaattcatgatcatgcctgcaggcgcagcaagcttcaaagaaggtctgcgttggtgtacggaagtcttccatgcactggcagcactgttaaaagagaaaggtctggccacttccgtaggtgacgagggtggattcgcaccggatcttggcagcgatgaagaagccatcgagtgtatactggaagcagttaggagagcaggatatgaaccgggcaaagactttgtactggctatggatgctgcatccagcgagtggaaaggcaacaagaagggcgaatacgttctgccaaaatgcggaaagaaatttacatccgaagaactggtagcacactggaaagaactgtgcagcaaatacccgatctactccatcgaagacggtctggatgaggaagactgggaaggatggcagatgatgaccaaagaacttggaggtacggtacagctggttggcgatgacctgtttgtaaccaacaccgaacgtctggcaaaaggaatcagccttggctgtgcaaactccattctgatcaagctgaaccagatcggttccgtatccgagactctcgaagccatcaagatggcacacaaagcaggatacaccgccatttcctcgcaccgttccggtgaaacggaagataccaccatcgccgatcttgcagtagcactgaatacctgccagatcaagaccggtgcaccgagccgaagcgaacgtgtggcaaaatacaatcagctgttaagaatcgaggaagaactgggcgaagcagcagtatttccgggaaaagaagcatttaacatcaaaagataaaggcagaaaaaatgttgtctgatcattagaggtgggtgcgtcgatttttgtaaaaatcgatgcacccttttctacgtcaaaaaaggcttttctgtaaatgaaaaatgtttcatgcggatgtgtcagaacacgttctttgttctgttgaactacggaagtgattgtaaagaaaaaaagaaactgctacaataaaagcgtatattattgaaaagacagaacagaagtaaaccgggaggcggaatgtgaaggaaaaacaaaagatactcaggaaattgtttttgtccacactgtatctgagcgcctttacctttggcggtgggtatgtgatcgttacgctgatgaaagataaattcgtggacaaatatcactggatcgaagaaaatgagatgctggatctgattgccattgcacagtcggcaccgggagcaatcgcggtaaacggggcaatcgtggttggctataaactggccggtcttgcaggggtactgacagcaattttcggaacagttctgccaccttttcttatcatctctgcgatctctgttttttatcagatgtttcgggataatttcatcatccgtgagcttctggacgggatgcaggctggcgtgggagcagtgatcgcttccgtggtatgggatatggcagcggggatcacgaagaaaaaagagtggacatcgattgtgatcatggtagccgcttttatcgcttcttatgtgatggaagttccggtggtgtatatcgtgctgatctgtattgcgatgggagtgatccgcacggtactgtcaggaagggggaaacggaagaaatgatttatcttcagttatttttcagttttcttcagatcggcatgttcagcttcggaggcggttatgccgcgatgccgttaattcaggaacaggtggtgagccgtcacggatggctggacatgggagaattcaccaatctgatcaccatttcccagatgacaccgggtcccatcgcgatcaattccgcaacctttgtcggaaccaagatcgccggaatcccgggagcagtggtttccacattgggatgtattctgccttcatgcattttggtaacgttacttgcctggctgtacctgaaatatcagaaaatggatctgttgcagagcgtcttacagtctctgcgaccggctgtcgtggcgatgatcgcgtctgcgggcgtatcaattctggtatctgccttctggaacggggcggatgtcatcgcactggcggacacccgctggacgatggtgggaatctttgtgatctgtctgatccttcttcggaaaacaaaatggaacccggtacttgtgatggcgttggctggggtaatgaagctgttggcggcgattgcggggattggataaaagcaggtggcgaatcgggggagtctgcggtataatgagaaaacagaaaaaaagaacagaaaacaggtgacagatatgaaaataaaaatcacagaaccatatctatggcttcccgtagatgcaaaagaagaaaaagtccttctgcacctctactctgagggggaaaaaatcgatgaaatcgcgatccgtcttggcgttacagactgcgattattatgcatacaaagacgtatcagcgtataaaaataaagaactggagattatccggtatgatgagggaaatctggatcggatctttcagtacccggagaaaccgcagacggtctatccgttccgacctaaactgcattaccatatggcagcaggctggtgcaacgatccgtgtgggctggtctatgcggatggcatctaccatctgtaccatcagtgcaacccttacgggccggaatgggaaaacatgcactggggacatgcagtcagcaccgatctgatccactgggagagaaaagggctggcgctttgcccggatgagaacggaaccgcatataccggaagtgcgatcgtggacaagaagaatctgctgggacacggcaaagatgccctgctcttttatcacactgcggcaggtggaaaaaacgagtggtcccggactacaggaaaacagttcaactttacccaacggttatactattcgacagacggtggagaaacactggtgcgggatgatcgttttctgatggaacagatcgccccgttaaacagagatccgagagtcttctatcatgaggaaagcaatggttatattatgttgctgtatctggataaaagtgactacgccatttttcgttccgaagatctgctcaactggagggaaacccagcggctgtccttcccgggcatgtgggagtgcccggaactttttgaacttccggtggaaggaaatgagaacgagaaaaaatggatcttctggtcggtggaaggatattatgtagtcggaacctttgacgggtatacctttacgacggagtcgtctttacagcagggatacgcgacatccacattccacgcggcacaactgttctcgaatgtggaaaaccgggtgattcatatctcctgggtgtggataaagaacggaagaggaaattaccgcggtatgatgtcggttccgtgcgaactcagcctgcgaaaaaataacggccgttatcaggtcgcattccgaagtgtgcgggaactgtcagaactttcggggaaaatcacggtacttccccggggaacgataacagcgaagcttccgtttgagaaaaaagccacccaggtcaatctgacctgggttcatccgcaacacggaaaaaccacgctggaagttcagaaccttcagatgatgatggattttacaaagaaaacgctggatatccacaaccagggaacgggagaacggttagcctgtgtcacattggaagaaaccgaaacctgcgaactgcatctgctgattgatcaggaagtcatagaattcttcaccaaccggggaacctcctacggagccgtcgagacagaggaaaatgtcctgggtggaaacctcctggtcaaatccgagattccggtggatgagatcacataccaccgattcgaagtgtaaaaggatttctttttcagaaaaattacggtatactgaaacacagaaaacataaaggagaatatttatggaattttggataggtattatttttgatacgatctgtcttgccattgcccttttcatggcgatcaacccaaaaggatttgcaagaggcatgaagtatcagtcggtacgacagacaaaaatcttccggatcgtgggaatcatcgcggtgatcattctggttatatccctgacgagccgggttctgacactggtataagaagatgaagagagtaattgtatatttaaaaagagaaaccgtgctttgtatcgcggtttttcttgctgttatttccatgttttttgtcagaccggaccgagcttatgcagaatatattgacaccagagtactggctttattgttttgtctgatgacgatcatggagggatttaagaagactgggttatttgaacagatggcgaatacactgctgaaaaaggtacacactttccggcagttgatgctggttctggtgggactttgttttttctgctctatgtggattaccaatgatgtggcacttctgacttttgtgccgtttacgattctggtgctgcgtatggcaaaactggatcagcggatgattccggtgattaccatggagacgatagctgccaatcttggaagtatggcaactccggtgggtaatccgcagaatctgtatttgtattccgtctccggaatgtctgctctgtcttttgtaaaggtcatgggacctttgtcgctggtatctttgcttcttctgatcgggggctgtctgttacagaagaatgaaagtatgcagatagaacagatcaggagaaaaaccaaaaagaacaaaacagctgaaaatctgattttgctcttccttttttgtgtaagtctggcaacggttttacgtgtgctgtcctggccagtgcttctgggaattacacttctgatttgtctgttccttttcggaagtggaaaagaagaatttttaccgctgagagtagattatagtctgcttcttacttttgttgcattttttgtatttatcggaaatatggggcggattccaatcgtaaaagaactgctgataaaagtactggaaggacatgaacttattcttggttttgttgccagccaggtcatcagcaatgttccggcggctattttactttccggttttactacagactatcctatgcttctccggggagtgaatattggaggtctgggaaccctgatcgcttccctggcaagtctgatctcttataaattttatgtacaggaaagtgaaaagaatgaaacagctggtacaaaagggcaatattttcggtattttacggtatggaatatagtctttgcaattgtgctgttggcagtgaacgttgtagtataacgtataaggaaagtatgattgaagaatatagaaaataggaaacaaaataaaaggcgcagaattgcattttccacccctatttgtgaaaagaagaaatacaaaggagaaccgtcatcgaaacatattattataatcacatgaacaaaacgcagcagtctgcctaccataatatctttcagggatttcagaacatggcagatgagatcttgcttccacgtctggagccggaagaactctacaatgtgttttttcagctccgtctggatcacccagagatcttctgggcgacgggatttcgctacaaatattatcaggattccccgaatctgatctttgtgccggaatatctgtttgagaaaaataaagtaaaagaacaccagcgcgccatgcaggcgagagtagaaaagctggtgcgtccggtaaaggataagtccgagtgggaaaaagaaaaatttgtccacgactttatatgcgagaatgtccggtatgataaattaaagaaagcctattcccatgagatcatcggaccgctgggacagggtgtgggtgtctgcgaggggattgccaaggcagtaaaagttttgtgcgatgcactggggctctggtgtatgatcgttatctgcggcaacaacccggaaaaagggatcaaataccgccacacctggaatatcgtaaaactgggtggcaaatattatcacatggatgtcacctttgacaattccctgagtcacaatggcatccgttacgactacttcaatctggatgacaaaaatatcttccgggatcacgaaccgctgatcgcaccggctccacactgtacggatggggatcacttctattatagggaaaagaaactgtccttcacgaagcaggaggatgtgtataagcgagcattacagactgcaaaaaaaggtcgagtgtttacttttcactggcgtggaggatatctcacccgggagatcctcggagaacttctggaactgatccggaaagccggaaaagaaaaacagaaaagtgcccgtatcagcctgaactggccacaggcggtcctgtgtttcgattatgtgaaagatcagggacagccggaaacggaagtgacactggaagaggcgaatgagggggaaatggaataaaagacatgaaaaatctgatattttggttattcgcaaaaaaataaaaaacatgaaaataactgttgacaaaccatgtatacaatggtattctatcagagttgcgtctgagagatctcgcagagatcacaaagctgtcaaaaagaaataaaaaaagttcttgacaacagccggttggatgtgataagatatcaaagttgctgcaagagagaaacaaaaacaacttcaaaaaagttgaaaaaacttcttgacaagcagaaaacaacatgatataatagcaaagctgtttgagacaaacggcaatgcgaaaaatgatctttgataactgaacagtga

SEQ ID NO: 2496 - DNA, 2926 bp, Unknown
  gut microbiota DNA sequence
ccacagtgaagatagtttctgtactttctacaatcccgtccatcttcgatactcctttgcctcgatgccaaatggttccagcagttttgctgccagatgatagaccatctcatcaatgctctccggacagtgataaaaagtcatcatcggcggaatgatccggacgcccggcatcatcgagagttcctgcagattccggagatgaatcggactgagcggtgtttctcttgcggcgagtaccaggggacgctgttctttgatcgtcacatcggctgcacgaagaagaagattttctgcatagccgctgtggatgccggcaatcgttttcatactacatggaacgatcaccatcccggctgtccggaacgaaccactggccggtccggctcctatttcttccggatttaacacatgatctgccagcgcttccacttcttctactttccatgttgtttctgattccagcgtcagacgcgcactttctgtcatgatcagatacgattcaaattcttccgattcccggataatttccagacatttgatcagtagcggctgaccgctggctccggtagcacctacgacgattcgctttttcatttttctactccttgcatcatgatagattccggttatttatcggtgtgtttcagccatttttccggatctacttccataaagttcgcccggacaaaccgatgtttctgatcatacggcacggtacagtcaaaaatcgtcttgcaggcgattccgtgatcccggatactggaagaacaggttggatcattggacggatccagtggatggcaacgaacccccggaatcgtaataatatctgcatccccctgaaaacgggtattcatcgcccacaggacatcactcatatcaaagcagtcgacatcttcatccaccagaaatacatgtttcagctcactgaatgccgaaaatgccagcaacgcagcctggcgctgtcttccctcatcactggccgtcagtttcttaaactgcaaaactgccatgtattttccaccacctgcggaaccgcagtatacattctgcagtcggcccggcatcgctttttctaccattccgtagatacttgcctctgtcggaatacctgccatggaaacatgttcttcactgggtccgatgcaggtctgcatgatcgggttcttccgatgggtaacggcggttactttgatcagccagcactgatcacttgccggtccggtatatcccggaaattccggcatcgcatatccggtatgactgttctgatcttcctgcacacgaacacccggaatcacttcgccttcgatcacatattctgcgtttgcaatcgcacgctcttttacggtaacgcagtcgcacagaacgaccggttcttttcgaagtgctccggcaacggaaagttcatcatagccaagtggtgttgtcggcggctcgaaacaggaaccaatctcaatcgccggatccactccgatgctgatagatattggcagtttttgtcccagagcttcagctcgctctgccatcgctccgatatgtcttgctcccggtgtaaagaaaatggataactcatcttttccctggatgcacagacgatggatcgtcacatcgtgaacaccggtatccggatgggttgcatagcacatgccaagtgtgatatatggaccggcatcatccggtgtgttggtcggtgccggaaccagacgatacaggtcaaaatcaggatctgtcgctttatgtaccacttcctgacacggtgctgcctccttcgtaacaaccggcggaatcggatttgccacactttcatataacatctttccaagatcttccggctggcagtccaacaatgctgccactcgttttctgctcgccagaagcccgatcgccactttcgcctccggatgacctttcaccttgttaaatatcatcgccggaccttctttggtcggtcgctttaccgtaccgccggcgcccacataacggtatacaccagccagttccgccatcggatccacttctacgtctgtctcaatcagttggcccggcatactttccagaagtttcagggcacttctcaaatctcttactttctgttccatacgattgctccctttctattattttcattataaagtgcatttcctgataaattattttaaatagattctcatagcgaatcaattctttttgtgatatgattgattccagaatggaatgaaaaagaaacgatgcgaaaccaggaggattttccatgacttttgaacagatcgactgctttatcgccgctgtgcatgcagataccttttttgatgcggcagaactgctccatacaacacaatctaccctttccaaacagatacagaaactggaaaaagaattaaatcttcaactttttgaccgcagccgccgaaatgcagtgctgacacccgccggagaacttttttatcaggaagcccaggaactttcccggcaatatcaccagatgcttcaccggatgtctctgtatcagactgccaaggaacagcaattatctgtgggaacccttcctgtactctctcagtatcatcttaccggaagtttccgcctgtttcagaaagaacacccggagatttctcttgctcttaccgaggtggaagaaagcgaattaatggaaggcatcgaaaagaagcgatttgccatgattcttgccagagaatctatgatcgatacggaacattaccatttttttcctattgcaaccgaccggatctgcgtcatgcttccggcagatcatccactggcaacacgagaaaaactttctgtcacagcactgaccgatcagtcttttctgctgatgcatccatacacatccatctatcagctgtgtatgcagatttttcaaaatgccgggattcacccatcaattctccgaaccgcacgg

SEQ ID NO: 2497 - DNA, 36155 bp, Unknown
  gut microbiota DNA sequence
tctgaaaaaggcttttcgtgagctgcgagtcccagtttgtgggagattttatccgaataagggcggcgtagcgggctacgtcaaccgaatgagggtaaaatataccgcaaagtggggctcgcagattgcggaaatgatttttcagacacgctctacggctgttacctttttcagtcttttttattctccgtctgccggctcctcgatcagtttgattctgcggatgtggcgctcatcgttggaaaacggggtatccaggaatgtctcaacgatcttgattgcaagtcccggtcctacaactctgccaccgagtgccagtacgttcgcatcgttgtgttctctggttgcctgtgcacagaagcaatcggtacataatgcggcacggattcccggtactttgttggctgcaatcgagataccgattccggttccgcagatcaggattcctttctcacactcgccgtctacgatggcgtgtgctacctttcttgcatagattggataatctacagaatctgtgctgtcgcatccgtaatcgcggtactccagtcctctgctgtccaggtatgcctcgatctccttcttcagttcatatccgccatggtcacaaccaattgctatcatgttacagttcctcctcttcgtttaaccttgttactagttttctcattaataattccagctccgtataacactgactgtataccgtcaggggctgaccgtgcagggacgggatatctccgctctcccccacgtattcctttactgtatagacatggggtgcattctcatacgtctcccagatcagcgatttctgtttatcctccatcgtcaggatcaggacatcgttgttgatatcttcctgctctaactgcatggcaatatgactcggctggggatatccattgctggtcaacactgcctccgctttcggattcagcggttccggaaataataccaccattcccctcgactcgatcgtcagcggattggtaagaaattttctcttcagtatcatctccgccatcggtgccctgcaattatcattggtatctacaaaaatcaattttttataccgtattaccatagttcatcctcataccagaatctttttctgacctgccgccttcatcagacggttcatgatcgcctgtcccatctggggcgtatcaaaagcttctgaataaatataagtcactccacagtcgtcaaattcccgcagcacagcgaacagatgtctcgcaatactctcctcatctgcccttgttccgatgcattttacaattccttccggataagcctgcatgctctcctcggtggcgatcacgcctactttttctccggctttgatcttttcatccaccagtgcacagattttctcctgcacagcctccggagatccttccactaccgtcagatccgctttcggggcataatggcggtatttcattcccggagctttcggtttgactttactgtctgcctggatcagtccccggtccatctgtacctgaccgatcaccctgcttaccatctcctgattgatatatcccggacgcagaatcgtcgggatctcttctgtaaaatccacgatcgttgattccagaccgatcccaaccggaccgccatccagaaccatatcgatctttccgtccagatcttcttccacatgggaagccatcgtcggactcgggcgtcccgatgtgttggcgctcggcgcagccacatagctgccgcctgcccggatcagtgcctgtgccagcggatgatccggcatacgcactgccaccgtatccattcctccggttgtctcataaggcacaatatcacttttctcaaaaatcatcgtcaacggtcccggccagtagacagaagccagcttctttgcactctccggtacctcttttactatttttgccagatcttccatatctgcgatatgaatgatcagcggattatccgaaggccgtccttttgcctgatagatcttggcagatgcctgcggatccagtccgtttcctccaagtccatataccgtctctgtaggaaatgctaccagaccgccctgtttcagaatctctccggcttcccggatgccgtccatatccagctgttgcggattcatacgaatcacttttgttttcattttctttcaccttatttcctcacatctgataacagtatactagagtaacgtgcgatgggcaagtgtaaatttatcacatggtttctcattcatctatgattctgcgctgcctttacttttctctgtcaaactgtccagatattccaacgtcccactgctgatcgcctttgccacttttttttggtatttctcgtctgtcagaaggctggcttcccggtcgttgctcaaaaaaccacattccacgatcacaagcgtcgcttctgtttttttgagcatatagtaggtcttgttcccctttgcctgtctgtgattggttttatccagtccttccacgagatgtctctgtaaaatttccgccagttttttcccctccacagaatcctcataataaaagacctgtgccccgtggatcgcctcctccggataactgttctgatggatgctcagcacacagtccggctgaagctcccggaccaactcacaacgtcttttcagatcctgtaccttgctgtttcctccggttccatccgagagatccgtatccgtttctctcgtcatataaacctgtaccccattcttttccagctgctttttgagccggtttgcgatctgtaaattgatatctttttccttttcctgatgaatcccgatctttcccggatcactgccaccgtgtccgctgtcgatcagtaccacacctctgctctcccccgcacctgcgcctgtaagtcttgctcccgtccttgccagccagaacacaccgatcaggagcaacaatgtcattcccagttcccatattttctttttcaacgtaaaaactcccggagcatatttactaaaaatatatgcccgggagtctgcttcaagtcctctgtttttccgtcttcctagcggttcactctctgtttcagttcttcctcggaaaaatcttcctcttcttcgtcaaggtcatccccgtattccggatcgtctgtcttccggtttctctgtgcagccgctgatgctgttttcccgccatcgttctttctgtcttcgtcctctagctcctgcatggtctccggcattgcgctgacgatcttgtgtacctctttataagaagccataaaacggatctgcgcctgattgatcagttccacgatctcattcatctcgtcctgtacggcaatgtattttctcttgccttctgcaagcttcatatccacttccgcctgcacagcctccagacatttctccgcttctttcttcgcctcatccatcagggtatctctggtggcgattgcttccgtaacgatctgatctgctgctttttttgcattctgcgtcatgctttctgtctgctgtgtcgcatcgctgatcagtttttccgctttctcatttgccgcattggtgattttttccgctctctcctcggattccagcaccagtccgccgatcagatcatagcgatcgatatatttctgatatttttcactgatctggcgttccagtttctctttctgtctctgcttttcctggattttttcctccatctttgcgagttcttctttatgcgcctctctctgtttttgcagcgcttcctctttctctctgtccttctcttccagctgctttttcagatcctcaattactttttcctgatcttttttttctttgatcagtttactcttttctgcatacgccgcatccttcatctcgcggacctgatgcaatacatcatctttatcaaagccgcccattaacgtcgttttaaatttttcttctgccatgtctttatcctttcccttcttgtctatactccttttactgcaaatactgcgcgatcaccggccataccgatgcccgctcaaatcccagtttccactctgccactccggcgagctggttttcctgaatcagtttcattttctccccgatggactgctcatcttccacccagattgtatagatgccatcctcggcttccacacttgccacattctgtccggcttcgtcatcccagtaggtatccataccgtgttcactgatataatttgccgcaccgtccataccaagcacttcacttgtcagattacctgcaccaaacggctggatccagactctggtataaaacggaatcgcattgatcactttctgtgccggcacttccttcaatgtatcttcaataccggcttttacaaatccaagagaagacaccgaacctgcctccgtacttcccgcataatgctcatcgtatcccatgatgatcacatagtccgcaacaattccctgttccgttctgtcataatgcctgctgtaagtcggaaccgggtcatcgatggaaaatacaagtccctggttccggcaggcaatcgagagttctcttacaaactgaatgtaatgcggtgcctgttcttctgtaatggactcaaaatccagattgataccgtccattcccacagctgccgcctgttccatcagctgttgaataatatttgcccgtgccgctgtacttgacaggaatgtcaggttatccgtagcactgttaaaattatcgatcagtccccacacttccattcccatctcatgtgcctgttttacataatcagcacttgccagagaagagatcgtaccgttattgtccgtcacggaaaaccaggtcggggaaatcgtattgaccccctgtgcatccgccaccatctgtgccagcgttgcattaccgtccatgcttgtcacctgatggaacgcaagattgatcttgtaatctttgctgatactggtatattccggcgcagtgcttgcatgcagttccgtatcatccaccggatcagaaagcacttcttttttgatatagccactgtaaccatctgccgtggaaaccttactccagttgtccatctcttcctgcagatacagcgtatcatcttttttcactttggtgacaatcgaactcttgatgccgcccttctggcggatctcactgtttttctgtacgatcaccagctgcagatcattccattttgtgcgaatcaccacacgcgccggatcctcatagacagtataatccatatccgtatactgcttcacaaattccagatccagatagaagctgtccccgatctgttttaagatcacataatccgtggactgcgtaccggacgaagtcacatactgtgtgctctccggtgtaatctgaaattcttccgtcggcagcgtatacagcatcacctgctgctggctgtcccagtaaaatctgctgttaatatatgtaccaacgacagaatcttccacataatatcttccgtcaacaattttcacttttgcatcttccagctcatgattcaccaccagaccgacttcatcatctccggtgagctgaaaatatgtttttccatctatcgtctttccggatggagtatacttcttaataaatatagaaagaatccccacacagatcaccaaaaaaatcaatacgaccaccagaacaaccggtgttatttttttcttcatgtctgataacctcctactgcatcccattataacaacagaatgttttcccgtcatctttttttgacatatttttttgtttttttctgtgcacctggcgctcaaccggaatcaaaattggtccactggaccaattattgatatgcaatgcaacaacaagccacagtcgaaagaacctgaactcttccgctgtggcttcttttctgtgtaaaacagccttctgcatgcaagggagggaaccctgtgatcttttgatttatatctgctgttctacagtttcctcttttcctttacgatttctgtggataaccatcttctttcttcaccgcatcaaactccagtctgagcagtcttccctcaggatccgggacataatctctcatataggagacatcctccgcgatcttatgggctttccagatctcctttggactgctcggttctccgtccagccacagcggaattccctgcgcctgataggcatccagttccttacggaaatcgtctttttgcttcttttcatttttcatagtttcattttcctttgttcatattttcttttgtgatatatagatcctttcttaagtgcacagcaccattattttttgaaaagatgacactcgtcccagcaattaaacttaatcacattcatttgttacacttggggaaatacgaaattatacgtcttatgaattgagtagaattataaatagttgaaacgtttttgatatgatatagattttcaaaacagtggccggcctcacatcctttctcggaaccgtgccaccttttctgtcctttattatacctgatttttatcgtaatgcaagaaaaacattacaattttatcggaaatttattaactttttataatatattatgtattctctctgatttttcttttatttttcgacatttttatacatttcatcttataaaaggtttgtaaaccataagattttaatcctttacatccggtttgcatatagtatataataaaagtgattctatatacctgtctttcagacaggatcaatggttgatagtaaggatgtgatatctgtgaaaatagaaaaaattaatgatactcagattcgctgcacactgaccagcgaagatctggcagaccgccagttaaaattaagcgagctggcttacggatccgaaaaggcaaaagatcttttccgtgacatgatgcttcaggcacaggatcagtttggatttgaagcggataacgttcctttgatgatcgaagcgatcccgatcacaccggacagcatcgtactgatcatcacaaaagtggaagatccggaagaactcgacacccgtttttccaagttcgcacctggtgcagatgatgcggctccttctcagaccgaggaaccgtccgttgcaggtgcggatgatattttggatctcttccagaagttatgtgaaggccgtctcaaaaagtcatcggcttcttctgcgaaaaagaaagaggatgtttcctctgacagaaaaacaaagattcagccggaaggcgaagagacacacgctgacggagaaacagaggaaaataataccgcacagacccgcccggatctgacccgtatcttcacgttctccagtctggatactgtcatccgggcggccgccgctctgaacggctggtacaccggagtaaatacactctacaaagaccgcgaaactgcttatgtgctgattcttcatcagaccggcatgactccggagaactttaacagagtctgcaacatgctctccgaatatggtaccggcaaagcctgcaccgcagcaacggaggcttacctcaaagagcacgtggaagttctggtcgctgatcaggcattacagcagctgttattgttgaatgtgtaattttctaatatgaaatgtaacaaaaaagaaacggcaggaagaatcttacgatcctgtcgtttcttttttgttacatttcatattcatcattgatccagtggaccaattttgattttctttcttccttattgtgccagataatcgttaatctgatctaccagcaggtctgcgtccagtccgtgaaccattgctgcttcttccagagtctctccctgagctgacgggcagccgatgcagtgcatgccggcgcgcattaaaattacgatgatattctgatcgatcgctaccagatcggcaataatcatatctttggaaatttttctcatctttttatctcctttcctgtgatacgcacattataataccatttttccccggaagcaactgttgtattagtgacttcgtcacaactaatttttgttcgtttttgatgtatcaaaaaatcatacaaacaactcggattgtatgtaaatttgtacttgtaatccgccaccacttatattagaatgagcatatagccgagagagcatcggcaaaatacgaaaaggaggatttgtgttatggcatatgtaatttctgacgaatgtgtagcatgtggaacatgcgctggtgaatgtccagtagaagctatcagcgaaggtgatggaaaatatgttatcgatgctgatacttgtgtagaatgtggtacctgtgcaggtgtctgtcctacagaagctatcgttgaagaataattattatttttgaatataattatttccgcgcggaaaaggagctgtacacggtttcgtgtgcagctcctttttttactttttcttcttgcggttctcctgtgtggcagcgaccatttttctggactgctgatgccgccggatcgcttcatccagtctgcggtatcgcccctcttttcgctccttcagttcaatatcgtgaatcaggcgttccataatgacctgaaaacgttcttcttttgtcagccggtcggattttctttcctgcttttcttctcttttatcggaaggctgctctggcagaaacttctgcggggtgacgatcttcacctggatccgttctgtcggatatcccgtctctcgctgtgtggaaaccgcctcaccggatatccccgtctcttttacagaagggggctgttctccctcatgaattttctctttgatcgtccttaactgcaagccttcttttttcagttccttgatcttctgaaatatctctagatctttgtcggtatagtatcgatgtcccatctcattccgcttgatggacaatcccagttcttcctcccagtaacgcagtacatgaggttctacctgaaccagttttgccgtctcggaaatcaggtatctggtttctttcataatacaagtacctcctgcactcattatagagcatgcaggaggtactttacaagaaaatctcttcgccttctttagtcctttttcgcgttgacgaaccgcgtgtattccggcatccataccaggtttaccgtaccaatcgggccgtttcgctgtttggctatgatgatttccgccatatttttattttctgtatctttattatagtagtcgtcacgatagatgaacataaccacatcggcatcctgctcgatggctcccgattctcgaaggtcggaaagcatcggacgcttgtcatctcgtttttctaccgcacggctcagctgcgacagggcaactaccggaacattcagctctctggctactcccttcagtgcacgggagatatcggaaatctcctgctgacgggaatcaccgccacggccgctgccggacatcaactgtaagtagtcgatgatgataatgtcaagtccctgttccagcttgaactttctgcatttggaacgcagttccgagatcgagatacccggtgtatcatcgatgatcaggcgggaattgccgatcacaccggctccctcaatcagcttcgcccagtcttcatcttccagacttccggtacggatcttctgcgaatccactttcgattccagggagaacagacggtttaccagctgttccttactcatctccagggaaaagatcgctacggatttgtcctttcgaaatgccatgtactgtgccatattcaggacgaatgctgtcttacccatagaaggacgggctgccaccagaataaaatccgaaggctgcaaaccggaagttttatagtccagatccacaaaacccgtcgggattcctgttaccgttcccttcgtctgagaagccttttcaatcgtctccaatgcatttaacacgacctgccggatcggaacataatcaccgccggtacgggtctgcaacagctgaaacaactgcttttccgtatcctccatgatctcttccaccggttccttatccagataacaggtattggcgatatcttcattcatcttgatcagccggcgaagcatcgctttttccctgacgatctttgcataatgtcccacattcgccgaagtcggtaccgctgtcagcagatctttggcaaattccatgctgctgatctccggcggaacatctttttcctttaatttttccggaagtgtgacaaaatccaccggttttccttcgttatataattccaccatggaatcaaaaacgattcccatctgctgtcgatagaattcatccccgttcaggatctcggaagcgatcatgattgcctcacggttcatcatcatacaaccgatgacagagcgctccgcatcatcgctgtggggcagaattcgtttaatcagttcttcttccacggaagaattcctcctatgcttcttttactacaaccttcagttcaccggttaccttcggatgtaacttgatcggcaccatggttgttcccagttctttgatcggagcagacagctgcaatttctttttgtccagttcataacccagctgtgcttttgctgcttctgtgatctcttttgcagagatagagccgaaggttcttccgccctctcctactttgattcctacatccacctgtttgtctttcagttcttctgcaaatgcttttgcagcatccagattttcctgtgccactttatcttcatgtgctttctgcagtttcagatcgttcatgttctttccggtagcttccacacccagttttttcggaagcagaagatttcttgcatatccgtcacttacgttgacaatctgtcctttttttccaagactttttacatcttcaagcaaaataactttcatctttatatatctccttcatctagcattttctgtaaagtctgtttcagtacatctctggcttccgcgatggagtaatgctccagctgcgcgcctgcgatgttcagatgtccaccgccgccgagacgttccatcacgatctgtacattgatttcatcgatcgatctggcactgatatagatcgtattgcgataatccgtcaacacaaaggatgccttgacgccgataatattcaataactcatttgccgcctgcgcaccgaccacggtaggactgtccagtccctcgctcggacacacagagattgcaaaatgatcccggaacagttccgcatttcggattgcttctcctttggcacggtaatcttctacatgctcccggaacatctttcttaccctcgtcacatccgcaccgcaccgacgcaggaaagccgccgcctcaaaggtacggacaccggttttggtaaggaaattgttggtgtcgatcatgatacccgcatacaggctgtccgcttcgatattccggatccggataccatcggaaaaatactgcaggatctctgcaaccatctcacaggctgacgacgcatacggctcgatgtaagacagtaccgcattctggataatatccttgttctgtctgtgatgatcgagaactacgatcgtcttcgtcatatacagaagatcttcgcattccgtgtaactcggccggttcgtatctactacgacaaccacggtgttgtcatccacgatctctttcgcctcatggcttgtcacaaacatccgggaatcatagtcctggctgtgcaggaatccatccatcagcggacggatcgatgaagtcggattgttgattacgatgtaggctttcttctccagggttctcgccgcccggtagataccgatcgccgccccgaaagagtccacatccgtgatcttatgacccataaccacaatcttgtccttgctgctcataaactctttcagcgcatgtgccttgactctggcttttacccttgtggtcttttccatcatctgagatttgccgccaaaatacgtgatgttgttgccttctttgataacaacctggtcaccgcctcgtccaagcgccagttccatcgcgatccgcgccgcttcggaagtatgggcaaacgaatctgcgttgattccgataccgatactgatggtcactgccatctcatttccgatatttacggatttgacttcttccagaatattaaatttcttttcttttaactgttccagcgatttgcgccgcatgaccagaaaatacttatctttctccagttttttcaccacaccgtcaatcgcagcaaaatacttgttgatcttacggtcaatcagcgcgatcagcagagaacttctgacctcttcaacgctctctaacgcctcttcataattatccagatacagaagacccgtcaccagctgttcttctttgttctttcgcatatactttttcagttctgtctcatcaaaaagatacgctgcgatcagataattcttttctgcatccgcatcgataatctgagaaccatcaagcagttcatcgatctcgactcttcgcatgttcagccggaaatcgtgatcctgatatgcgatctcaagatctcttacttcctccggcatgggaagtttgttcatcgtcacctccggaaaaatatttccgataaacttccggtacttctggtcttttcccgtcagataaaggaattcatcgttcatccagaggatctttccttctgcgtccagcagtgcatagggcagtgcaaaattcttcatcagactcttctgcacctgtccgtactgggtagcaaaggaaatcagttcgttcaggatcaccggtctcctatgaaaatacagcagaataccaagtaacagatacaccgccgtaaatatggtaccgattcctcctgccttccagctgaccgtgtacaataatacatccatcaccaccagaagcagcgtcagaacaaacggccatcgcatataggttgccagctgacccttcaacttaattccatctttcatactctgtacctatcatcgatctttccctttcggttctttatcccttctaaggaaacatctccttttcaagtacaccttttccacattcagaaaaggtatgattttccggcaacctgtcagaaaagggcagactgccaaattactctcttattataccatttcccgcacaaagaaaaaagtcttttctttctaaacaagaaaaccgccaccagtttcctggtagcggtataacaaacgttttaaattagtctgttacatatggcataatagcgatatgtcttgcttttttgatctctacagtcagagctctctgatgttttgcacagtttcctgtgattcttctaggaaggatttttcctctctcagaaacatattttcttaatttatttacatctttgtagctgatttcattgttttctttaccgcagaatacacaaactttttttcttctgcgtccgcctcttctcttcattggagaatctggtctttcacttttattgtaagccatgaatattacctccttatcgaaatctaatgactcgcatccgggccagtgccttgtgcgtattagttaaatggcaagtcctcatcaataccatccggaatattcataaaaccatctgcggagccgcttccacctgctgtcggagcggatggtgcgcttgccggcccaccgaagttaccaccatgataactgtcactggatgccttgctctctgcaaactcctggtcttctactactacctctgtggtatagaccttctggccttcccggttggtgtagcttccggtctggattcttccactgattgcgatcttgataccctgacggaaatatttttcagcgaactctgctgctctgccgaatgccacacagctgataaaatcagcggttgcttccccgtctcttttgaatcttctgtcaacagccagtgtatatctcgcgattgccagtgaattgtctcctgctgaatatcttacctcaggatctcttgttaaacgacccattaaaataactttgttcatattcttacctctcttgtaaatgtatctacttttacggaatcttacaaacctttaatgggcttggcacttaagaaaaaattaagcttctttcttaacaactaaatatctcattacattgtccatgatacgaacgtgtctttcaacttctgcaggacaggttgcatctgcttcgaactgaatgaaatagtagaagccttctctcattttctgaacttcgtaagctaatcttttcttaccccattcttcaacttctgtaactgttccgccgtaacgtgctacataacctttagctttctctactacggcttcacgagcttcatcctcaatttttgcattcacaaccaatgctaattcatatttgctcatgctgttttacctccttttggacttttggcttccggtttcaggaccggaaacaaggataaattatatatcacaagttggtattctaccatgaatcaggaacaatttcaagtgttttcttcactctttttccgtaaatttcttgtgtttttttccaccagttttcttgcgatcatgatctggtgtccgcacccggtacatttcagacggaagtccgcgcccacgcgaaggatttcccattcgctgctgccacacggatgctgttttttcagttttacgatatctcctatttcatactgatatgtcatgttctgtttccccttactttcatctgtgaaaaaatctgtccgatcggtttctggatcagaagatccgcgttacgatcctgcggtgtcgcacctttgttgatcagcaccagtgcctttccccggaaataatcgagaagtccggctgccggatataccgccagcgaagttccgccaacgatcatcacctctgcttcggcgatcgtacggatggcatccgctaccacctcgttgtccagtccctcttcatataaaacgacatccggcttgatcacaccgccacactcacattttggaacccctgcggaatgcagcatgtaagatgcatcataaaacttatggcatttcatacagtaatttctgtgtaccgatccgtgcagttccatcacatgtttacttcctgccgcctggtggagtccgtcgatgttctgtgtcaccacaccggtaagctttcctgcctcttccatctcggcaagtttcttatgcgcatcattcggcttcgcatccagcgccagcatcttatcccggtagaaccggtaaaactcatccgtgtggcgcatgaaaaatgtatggcttaagatggtctccggtgggtagtcatatttctgattataaagtccatccacacttcgaaaatccggaatcccactctcggtagagactcctgcaccgccgaaaaatacgatccggtcgtactgatctacaagttcctgtaatttttccacatcctgttccattacgcatcctccttatccacatatttcgtgaagttcttgcacacgtccacattctgttgcttcattatttatacgttccaacccagcgcgcctgtaccacgaatcgcatcgattcattcgacgtacaggtagacagtgtcaccacataatcgtccttgctgagtccttttgtcttcatatttactttcgactgtttcgccatcttgtccacatacacaccaaactggtcgtcatgttcgctgaacagcgtatatacatcgctgtttacgtttgcatactgcatcgagaaaatctcataccgatattttccgtccggtgtacagatccacagatatttgctgtccttgtatttgccgctttcatacatctgttttaattttccgaacatcgaaccgtttttcatattatgaccgtagatgatcgtattacagtcagaaaaatccgatgcattcgtagaatcaataaagatcgatcccgcaaaattataggtctgtttgatcgtccggtgcagataatactcattgtcctctccctgtgtgatcggataactgatcgaagggattgcttcgagttcgagccatcctaccacatcgtcattgattgcctttagtgcatcaaaatccacctccggcggattgacggtaatctcttcctcttccggaatgatcagattaccctcctcatctttcttttcttccactacttccagcggttcgctgctctgtactgtcgttgcttctgccacagcatggtattcgtccaccccctgtttataccccaggtagatcgttaccagctgatacatggaaaaacagaacactgccagtgcgatcagaaacagcagtttccagaaaatcccgccgctcttcttcttttttttctttgctgtcatctcttccttatatcctttcttgtctctttgcttcgttatccctgaaaatgaaccgtgatcggacagatctcgcagtccgtaccgacacgcatcgccggtccccagacgcccacacctgaagttacgatactgtgcagatttccttttttcagatagccgcaggcattttcccacatcagtttgattgtcaggttacccgggaacatctgaccgtcatgcgtatgaccgcacagctgcatatcagcaccggctgcttccagttcctccagctgtttcggctggtgttccagtacgatgatcggtttggtcttattcagatcacccaggatctcttccggctccatccggttggttgttccgtcacccggcttctgtacatcttttcttcccaccagataaaaagcatcgtcgatcagcgtcacttcgtcatccagcatctgaatccctgctttttttgcaaattcttcaaaccgcggatcacgcacttcattttctttggaagtcacggaaaatccgccaagcagacgctccgttacatcgtgattgccgaacacaccgaacgaaccatatctgctcttgattcccgccagcgtttttgcgatcttgtccggattctgcaacgcttcgtattcattatcaaaaatatctcctgcaaataccaccagatccgcatcctgttcattgatctttttaaccatccgttgcatctgccgatctcccacactgtagcccagatgcagatcggcaatcagcaccactttcaggtcgctgttgtctccacagtttttccggatcgtcacttcataagggttcacctttacgatatgagaatgtgcgataccgtaggcactcattcctccgaccagagcggtcaaaaagattcccacaaacacataacccaccttgctgaaaaagaaatcatgcacttttcccgggattcttttcaggatcagtctcaaaatatctgcaactgcaataaacatcaggatatatacaaacgttcccagccagtaattgctgatgcgttttaccaacacctgaaatcccgaggacgggagtaaaaatgcaaacagcagagataacgccagcagggaataaatcacaatatacggcaccacgaaccatttcgaatgaaagcgttttgaacacgcagtcagccatttgtgtacccggtgcagaatgtaaaggtttaaagctatataaatcggtataataatcagtaaaatcatgtgctctcctctatgttgtgtctctctgttttacagatccagtttcatatcgccgtccttgataaaattatgctttctcataaactgtgcaaataccaccgaaaggagtgcaggcagcacaaactgaatcacaacaattttcagaagtaccacaaccggatgttccgtctgcgccatcacctgccaggtcatgatctgtcccacgaatccggcagatcccatcccggaaccggtcgcgttgtttgtcatatgcaacagcatcgtggagaccggaccaagcacggcacttgagaggagcaccggaagccagataatcggttttttcacgatattcggcacctgtaacatagaagttcccacgccctgcgcgatcagaccgcccacaccgttttcccggaaacttgccactgcaaatcctaccatattacaacagcatcccacggtagcggctcccgctgccagcccggaaagatttaggatcacgccgagtgccgcagaactgatcggcagtgtcagaatcatacccatcaggacagacaccacgattcccatcagaaacggctgctgctcggttccccagttgatcagtccgccaagccacgccataaaggaagaaatcggcggtccaacgaggatacccacagcggatcctgttccaattgatagtaacggaaccagaatgatatccagtctcgtctttcccgcgatcagatgtccgatctcaattcccacatacgcagcgacaaaagcgccaagcggttctcccggtccctgtaataccagattcccatccacaagcagtgttccagccagcactttcgatgcgtacccgccgatcataccactggtagccgctgataacacgaccatcggagattcctgaaacttgtacgccacacccacaccgattccggcacaggtcagtccggctgccacttttcccaccgcatagatcagcgccccgatggatccgcctgcaagcgtcccgatctgctggatgattgttccgatgatcagagtcgcaaaaagccccagagccattccgctgagcccgtctataaatacccggttcagatatttcttaatcagattcatacataacccctttcctgttcacctctttatttttcagtctgaccaaagtgtaacacggttattaccaatcttccagtactatttgacaaatccaccgcataagcatataatataattaatgacgcgggatggagcagtctggaagctcgtcgggctcataacccgaaggtcgcaggttcaaatcctgctcccgcaattttttatgcccatttttaaagcagatggactgatgagacatcatctggcaattttcagttgccaggtggtgtctttttattgcattgcaaatcaataattggtccggtggatcaattttgatttgtgcgagcaacgagtcaaagtccatgcttgcatgagaccttggcgactgccgcgataacgagtcaaaaaaagaagagtgactgcttttaacagccaactcttctttctatatttatcttctgtttttattttacagcagatgtgcacggatctcgtctgcgctcagcggggaaaggtatgccggagctacatcgaaaacagtcttgcatcctgtcattccttctgctttcatgcggctcagtgctcttgcataagcaaccagtacgctggaggtgaattccgggttggactccagtttcagagaatactcgatcatctgatgggtattttcattttcaccggtcataccgcttctcataacgaaaccaccgtgcggcatcttgttatgaacagcgtcaaattcttcttcagagatgaagtttactgtggtatcgtattcatcaaaatagtttttcatagttttgatggattcttcgatctgttttttatcagcaccttcctcagcaactacgaagcactctctggtgtgtttctgacgggttgtcagttccggctgttttccggctcttacctgatccatagcttcttctaccggaacggtgtactggataccacgttttacacccgggattctccggatcgcatcagagtgtccctggcttacgcctttgccccagaatgtataggtttttccgtttggcagaatggattctgcatagatacggttcagagaaaacagacccggatcccagcctacagagatcatagctagatgtccgttctcttttgcagctgcatctacatttgcaaaatgctgcgggatatttgcatgtgtatcaaaactgtcgatcacgttaaaatcttttgccagttccggtgtctgttttggaaggtcagtagcgcttcctccgcagatgatcataacgtcaatctgatctttcatattttttgcatcttccatggtgtatgcttttacgccaggtgttttgatggctactgttgcaggatctcttctggtaaatacgcctgccagttccatatctgcgttctgacggatcgccatctcaacgccttttcccagattgccgtaacctgcaataccgattcttattttttccatcgttcgttctcctcctgtactcttctatacgcttccgtaatcttctcatacctgatattacgaagattctccgcgcgcacacgctttgccgcctccgtacctgcggctttcggggatcctgtttttaaactgctgccttatatttatcactttacctcggcacagtcgtaaatctccttttgtatcctatcacattttaatgtcccgttcaagccattcataatgttcttctaatgcaaaaagtccttcctgaatatttccctcaataagacaggtggcaatatttttatgaagcgtaatccattcgtccgtgtcgatggatgccgcctgtcgaagaacgacctcgccctctgagcgcatgatctcggacaacgcatcggtcagaagaatcagcaggcggttctgcgagtattcaaataccagatgatgcagttcgtgatctgcccgcatccgttcctcgagatccccattttccatccgatggatgatctcccctgccttttcttttccttctgccgtgatcagcgcacatgcctgcacatacgcttgtttttccagaatcgaccggagctgattgacttcccggtaattgctctcttccatcagtaccagcatggaaaatacactgctgaggctttctcccatccggttcaccagaaaattgcctttcccgtgacggctctccaaaaccccggtatgttccaggatccgcagtgcctcccggaccgaatttctcgaaattcccagcgtctccatcagttccctctcggaagggattttcccgccgtaggaaatctctttgttttttatcagtgttttcagatattccagcacctggtcataagctttcggagaagatacctgtatcttttctttatccaactatatgtttctcactttcttattttctacttcttcctatgtttcaacaaaaaacttctatatgagaaaagcacgtccaaaatatcctctttcaacgtgcttttacttactataagtgaataatctgtctacatcagtcccgcaaaaacagacgcagttaccaccgtcagcagacctgcaaccgcgattgccagactgctcatcgcgccctcgatctcacccatctccattgctttcgcggttccgatcgcatgggctgccgttcccagtgccagtccctttgccaccggttcctccaggcggaagatcttacatgccagatccgcgatcacatttccaaggacaccggtaatgacaataactgctacggtgatcgtcaccacaccgccaagttcttccgatacacccataccgattgctgtagtaatggattttggaagcagggttacatacagctgcgagtccagatggaacgcccgcgccaggatgtaaacaccgaccatacttgccagcacccctgacagaatgcccgctgcaacggctttgatattattcttcagcagttcaatctgtcgatagagggggacagccagactgaccgtcgccggtgtcaacagataactgatatactggccaccttcgttataggtatcataatcaatatggaacagaatcagcaccgccattacgcagatgactgcaatcaacaacggattaaaaattgccagtttaaatttctttttcagaagagttccgatctcataagccaccagactgatcatcgcaccaaaaaatacggaatttgtcaggaaatctttcatttttcttttccctccttacgttttctctcccagcggatcacccgctgtgtcacctgtccggtcactcccatgacaagtacagttgttgccacggtcactacaaccaccggaaccacgaccggtcgcagcacatcccatgcattcaaaagtcctactgccgccgggataaacataaccggcataatttctatcagaaaatcagcggctccctctacctgatccagctttacaataccggtaagaagtgcagccagcaacaataccagcccatacacactggccggaaccggaagtggaatcaccatacggaaaaactctccgataaacgagaacaacaatatcatacaaaactgtcttacgtgcttcaaaatatttctcctttcactggtagtaccagtttcagattatactgacctgaccttttcctgtcaaggagcaaattcgttactgttcactccgtgcccagtaaaacgctgcgcgatgcacagaatttatgctgatcgcataaattcgcgcgatatatctcggtttttttgtgaccttcgctcacaaaaaacgcctcgcgggatattaccagtgaacagcaacacaaatttctcatagaaattctaaaatctccggcaatcatttacaaattgccggagatttttctttaaaaaatgctgctgtccattatcccagcattttctccagatcttcctttggatccccgatcgggctgatctgataattttctaccagatactgtagcacattgggagacagaaatgccgggagagacggtccgagataaatatttttgattccaaggtgcagaagtgtcagcaggatgcacaccgccttctgctcgtaccaggaaagcaccatggaaagcggaagttcattgactccgcagtcgaaagcttgtgcaagcgcgactgccactttgatggctccgtaggcatcgttacactgtcccatatccatgatccgagggaaaccgccgatgcttccgagatccagatcgttaaaccggtattttccacacgccagtgtaagaataatcgtatctgcaggtgtctgttttacgaattccgtatagtagcttctgccttttcttgctccatcacatccgcctaccaggaagaaatgccggattgctcctgcttttaccgcatccacgatctgatctgctgcctgcaggatcgttccgtgtccgaaaccggtggtcagcttttctccgccgttgattcccttgtactgcctgtcttcctcaaatccgccaagttccagtgccttttcgatcaccggtgtgaaatcttttccgtcatctacatgcaccacacccggataagaaaccacttccgtggaaaagacgcggtctgcgtagctctccttcggtggcatcagacagttggtcgtaaacaagatggctcccggaagaccagcaaattctttctgctggttctgccatgccgttccgaagtttcctttcagatgaccgtattttttcagttccgggtatgcgtgtgccggaagcatctcgccatgggtatagatattgatgccctttccttcggtctgttccagaagcagcttcagatcacgcagatcatgaccggtaaccacgataaacggccctttttccactttcagcgaaacctctgtaggtttcgggattccgtaagtctctgtgttagcacgatccagcagttccatacaggtcagattaacttttcccgtctccagaaccaccgggagaagttcttccatgccaagatccatagacaacgtagccagtgctttatataagaagaagttcacttcttccgactgatatccaagtaccatcgcatggtatgcatacgctgcaacaccccggatgccgaatagcaacagggattttaacgaccggatatcctcgtctgcattccagatttgttccatatcataattgtcggtattgccacattttgccacacaggttccgcatcccgatgcgattctgtttttttcctcttccacacgctcgatcatcacacgaatcgtctcttcgttgaaacttacattggtcagtgttgtaaataatccctcgatgatcacccggtcggtatcggcggtcttcggattgttgccgcaggtcttcgcaagaccgatcagtgcccctgtcagttcatcctgcgcttttgccacatctgcggtctttccgcacactccgcggcttccggtacatccattgcatcctgctgtctgctcacactgaaaacaaaacatatttttctccattttttgtactccttttatcatttttttatcgttttctttacttttaccttatctatctcataagtatccctgatttttccgcttttatccttcgtactatgtctctcgcacagatagcctcacggattacaccgtttggtttttcccatccgtctgcctggaaaacgttctgcccgttactcccggatcgtaccatcagttccgaccgtgatcacctgccatggcagccgttttccgctcgcttcaagggcacgttttgccgccatctcaagtcctccgcaacatggcacttccatacggacaacggtgatactctgcacttcattctgccggatgatctctgccagtttaacggcataatcggtactgtcaagtttcggacatcccaccaacaccacacggttttttaaaaattcatcgtgaaacttcgcataagcgtacgctgtacagtctgccgcgatcagcaggttcgctccctcgtaaaaaggtgcatgcaccggcagtaatttgatctgtaccggccactgacgcagacgggaacgctccgctttcgccttttcttctttatttttcagcactgccgcctcgtcataagcttccgcttcccgttcaataaaatgaatcgcatccatcggacatgctggaaggcaatcccccagtccgtcacagtaatcgtcgcgcatcagttttgctttcccgtttaccataccgattgccccttcgtgacaggccttagcacaggcgccacaaccgttacatttatcttcctctatctgaatcactcttcggatcatattcgattcctccttattttctatatgcactcctgaaatctctctatatctgattttacacaaatgcatttctgtctctgttatgctgtccttcttctctttgcaacagctcccttgcgtttacaaacagaggatactataatatcagataaaaatatgttgttttaaccacaaaaaggagaaaaaatgaattttccaatatttaaaaaaatccccctgttttatggtgtgaaaccggaggaaattccgtctattctgcattgtctctccggacagatccggtcgttttccaaaggggaaatgatcttttgtgccggtgaatctattacctctgtaggaatcgtactggaaggttctgttcatattgaaattgacgatttctggggcagtaaaaatatcctgaatcacgtcggacccgggcagcttttcggcgaagcctacgcctgttccccttcggaaccgctgatggtcaatgtcgtatccgtcacacccagtcagattttatttctggatgttccaaagattttgcatacctgtgaaaagccatgcagtcatcaccagcagatgattgaaaatctgctccgcatcatggcaaccaataacctgcagctttcccgccggatcctgcacaccacaccgaaaaccatccgtgaacggctgctcgcctatctttcctatcaggaactgctcaccggatcgcctgagatcaccatcgccttcaaccgccagcagctcgctgactatctcagcgtggaccggagtgcgctttcgaaagaaattgggaaaatgcagaaggacgggctgttggaagtgaaaaaaaatgaatttgtcctaaaaagcagagaataaagaataggatgccgtgtgcatcttcgcagagtgttcccgatttactgaaaaacagtttttgtaagacactaaacagggcgaatcgttcgaaagagcgattcgccctgtttgtgtttttatttacttgatttttgtattattcagcctcttcagctgtctccggttccggtacactgttgtgaactgcggtgcaggatacaacaactgcttccggatccgttttcagatcgatgttcggattcttggcaatctccagatctttgactttgatcacatcaccgatcttcatctcaccgacatccacctgaactttatccatcaggtcagcaggcagtgccttataagaaatctcttccagatcttcctgcagaacacctgcctctactttctcatggttgagcagaacgatttccgctacggaatgtactttctcggtacttaccagtgcctggaaatcaatctcatccacgcggtttgccattgcattgtaatcaacctctttgatcagtgcatcgtaggtcttgccgtctacttccagcataacctgacttcctttgttgtccgtcttcagcagctgatctactgcctttttcgtcatctggatcggaagagatccttcaatctctctgccaaacagattacctgtgacatagccttctcttcttaatttctttgctttgacgtccatgcttcttttttcagcttttaaagtattcatttatcttttcctccaaactgattgcttagcagccttctacaaagaggttttgttaagtattatatataaatgtgctaccgtctgccattcggcaaaccgtatggttaatagttacctgattcagaacttatccttcaatggcgatgtatttgttttcttccactgccggttttgcttctttcttcggaacgaacagtttcagaataccatgtttgaattcggctttgatctcacccggatctacttcctctcccacatagaagctacgtgtgcaggcacctgcataacgttctttacggatatattttccggtttctttttctttctcatctttatcaagacctttggctgcctcgatggtcatataaccattttccagagaaacctttacttcatctttggcaaatcccggaagatctatttcaaattcatatccattgtctttttctttgatatcggttttcatcacatgtccggctcttctgccgtacagttttttctctgctttgtgcagttccttgtcggtatcgaacggaaaataatcatcaaaaaagtcatcaaacaaattctctccaaaaatactaggcatcaacataagtcatctctcctttttattcatcatgtattattaccttgtttctttggaactgggatgcttcaggagctttcgaactttttcttcgttctttttgttcccttcctttgttctagatgtaatataacacttcaatcagcactcgtcaagggggagtgctgattttttttgtgaagattttgtgtccttctaaaatgaaaaacgaacttccgcccttactttgtttgctacaacatcaaggtagaagttcgttttttaattagttatcaggtcttcgtatgtcggtttacatatttcgccttatattttgagtacacgatcgtctggtctttatacagtccgtaatatccggacactgcatagctgaccgccgtagccagcagataatacgaaacaccctggaagccgaacagttcgaaggctattaatatagaagtaaccgggcagttcgtcacgccgcagaatacggcggtcatcccggctgctgcacttaacgacggggagaatcccatgatctgtcctgccaggcagccaaaggtggcaccaatggcaaatgaaggaacaatctccccccctcgaaaacctgcacgcatcgtcaatgctgtcagaagcattttccagaaaaagtcaaaggtctgcgtctgtccatgttccactgcctgctcgatcagctgattacccgcacccatataccggtctgtcccaaggatccagtacaggactaccaccagacaacccgccgcaaagacgcgcagatatggatttttcagccatttatcatatcctttgctcacatattccagcaacaaacaaaacaggatactgaccgcgccacatcccacagcgataatacccatcttgatcccgttttccatcgaaaatgccgggattcctgtgacatgaaaattctccggatgaatcccgaagcttcccgcaaaatcataagcaaccagcgatgccaccacgcatggcaacagtgccgcatagtacatcacgcccacgctgacaacttccatggcaaataccgcagctgccatcggtgtaccgaataccgccgaaaacgctgcactcattccgcacataacgatcacatggcggtcttcctcatccagatggatccaccgtcccagctgattgccgatacttccgcccagctggatcgccgcaccttccctgcccgcagaaccacccagcagatgcgtcagtgccgtagcgataaaaatcagtggtgctgaacgaagcggaacctcatcctgcgaccggatcgtagagagtacctgggttgttcctctgtcctcttttccaatcttctgatataaaaatacgatcaacaaaccgccaaaaggtaataataaaacgaccaccggctgatccgtccgaaactgtgtcacccagcctagacacccggcaaataaactgctggcaccgccaaccactccaccgatcaaaagtgccagcagaatccatttgacaaagttactcatatcctgctggattcgttttccataataatgcgacatcacttccagacggtgatgcccctttttcataggttccatatattcccccgcttcccttttcctcttttgtatattcttcctgtttccacggaatcatactttctttcagtatactctatcccctagcatttttccagcggaaggagcgaaaatgccagttaaaaagaatgctgtttgatttacagaaaaggaattttctgcacatcaaaagacagggcgaaactgctccccgttcagtttcgccctgtcttcccttatttttaatttttatttatctcccttatgctactgccttaccccttacgcataaattccttccgaatccgtaatctcatactcaaaggtcttcagatttgcacgcattgttgcgctctcgccctggtttgtccaggtgaaggtgatggtttcgccttctgtggataccgccagatctgcgtcaaaaccaaatgctttggatacgtttctgaaatgcagaagtttcaactgctcttttacgatatctgtcttcatcagttcttcgatctgtgctgcggacagattggtacggttgatttctttatgaccgccggcaccggcacgtttaacagcctcgtggtcgttcttgccagcgaaaagatccaagtaccatacctgcggttttccaggcatgaacatctgcagtgctctggccataagcatttttttgtcatcttcgcccagtgcactgtaataagttgcatttacctgataatatacatttttctgaccatgaagatctttcacatatccgcctcttgcaacaacagtgtcgatgatctgctggattctttcttccgggatcagccccttcagatccagaagcgggattccatcgtggcagcccagcatgttgactacatggatttctttttccatcagttcttttgcccatttttccagagtggaaccgttgccgctttccagtgcatcgatgatcattcccggaaggaagaaatcgtaggtcatgtaaccctgttttgcaatctgttcatagttcttctctccgtagcttgcatggatctccggaagcagcgtcaggttatatttgtctgccagtttgcggactttttccagcagttcccaggttcccggctcattcaggaagtttttctcacccggctccttcggcgcataggcaaatgcatccaaacggacgatctttgcgccgtatccagccagtgttttcagagtattctcatagaactcccataccagcggggatttgatgttcagatccatctgtcccaggtattttctcttgctctccagcagttccacaacgctgtccttacagctgtcatcgatggtgagttccgccggtttcttacctgctgcgatctcttcgttgactttctttgcgatcagatctgccttataatactgcacgttagctacctgcatgatatcctgtgcatccagaaccggatatttgatttcctgatagaaggtattccagtacggtacatttttcccatccgggaaacgtaccatcaggatcggaagacccggcttgcggaagaacatatgctggatcagctcctgatccggctggatgtagccttcctcggtcatggttcccttaccgtcccagaatttgttccagtcaatgaagaaatcacgatatttggaatcgtcaccatttttcagaatatcttgaaactgactggataatacagaagcgtgattcaggataaagtcgagtttcagattgatacccagtttatccagtgcttccagatctttccggtccgccagttcttcgttcagtgtgtaatcgatcacagaaaatccgcgatccagatccgtattaaatacacttggaagaatatagaaggaagaaaatacatcctttaattccggtttctgtaaaaatccggtgatatcgctgagggttccgcctacgctgtccggatatgcatttaacatcggttttgcatctgctgtaacggtcattttactcatgcttctctctccttatattcttccctgatccataatctctttgtattcgtcataggataacagttttcctgctttggatacgatcactttcgctttatgagcctggctttccagcatatcctgttccagttccagtaccatggtggtaaatgggctgtctacagcaccgtcacggtttcttgcttttctgtgtgccatagtctcctgtggagtactgtttaacagaaccggaatatctacacccttgtaattgtcactgtttccgtgtgtccactcgatgatcaggatctcggtatcagagaaatccacttcttcataccacagttcggtatcttctcttcccatccgtttcagccagatcttttctgccttgtttttaaagctttcaacgattccttccacttctttgaaatcgatttcattcagggtaccaagatatcctctcaggcctgtcttaccattttccagataagattcataccagtcgtagctctctttcagcttcggatctgcatccattcctgcaatctgtctttcatggataatgtcgaatctttcttttgtaaatgttccgtcttttaccataccgcggatcgcgctctcacgaaatacatgaagacgttctgcatcgttgtactttggaattctgtgcggatagttatctccggacagtgtataggctttcattccaatctgattaaaatagaaagaaagcagagaagcggtctctgattttcctactccggatccaccgcatacagtcagtacgatcttgcggtctgcgtcttcttttttcagttctctgatctgtcctaaaagttctctgaagatcaggtttgctttgttgatgtgatcttcaccaatctcgatcttgtctcctggcatgtcaccctgtgggatcttctccgggatcaccggtgcagtccatgcagaaggattttccacatatttgttcatgtttgcctcctcttgtccgctgccttccggcagctgctgaatcattgcgttttcacttgtctgtcagataaatggattacttcccgagattgttaaaagcatatcgggatataatcgctgttattatatgccagatacctgtttttcgtcaatatttcttcaaaatatttctccgtgtaatttttatgtaatatttatttaatatctttatgataaaatatttcatattttgtcgggcactcattatacaagtgcagcgctgttgtttcccggcgttcgtgctgtcatctttcgtcagcacggacacacaggcaccgcagccactgacaaatgaacgatctggcactgccagaaaaaaatttcaaaagaggaggaaatctatgaaaaagttttatgcgtggtatcaaaaacatatcacaagtgcaatcttcatcggtctgattctcggtattctgaccggactttttctggctggacgatttgaacctgtactgaccgtcaccagtcttctgggaagcatctatatgaatgcactgaatatgatgatcttccctctggtcttctgttccatcatcatgggtatcaccagtatcggtaatgcccgtaccaccggaaagattaccggttattccatgatctttttcctgtgtaccaccggacttgccagtctggcaggactgatcatcccacgtctgatccgccttggaaaaggagttaacttcgagatggcaacttccgatatccaggctaccgagatgaccagcatcctggataccgtaaaaaacctgatcccgtccaatccggtagctgcttttgccaacggaaatatgcttcaggttctggtatttgccgttatcatcggttttaccctgttggcgatcaaagaaaaaggggaacctctgttacatctgattgattcctgtaacgaggtatgtctgaagatcatcagcaccgtgatgtattttaccccgatcggtgtcttctgtaccatcgtaccggttgtagaagccaacggaaccaagacgatcctgtctctggctacccagctgatcattctgtatgtaactttctacggatttgcactgttcatctatggaggatccgtaaaaattcttggtaagacaagcccggtcaaattcttcaaggccatcatgcctgctgctctgaatgccttcggaacctgttccagttccgcaaccatcccgatcagcaaacagtgtgtggaagaagaacttggtgtctccaacaagatcaccagtatcaccattcctctgggagcaaccgtcaacatggatgcggtatccatcctgatgtcctttatgatcatgttcttcgccaatgcctgcggtattaacgtaagcatcagcatgatgatcatcatcctgttagccaacgttctcctttctgtgggaactccgggtatccccggtggagccattgcttctttcgcagctcttgctaccatggcagggcttccggccggcgttatgggtgtctacatcagtatcaacaccctgtgtgatatgggtgcaacctgtgtcaacgtcatcggtgacctggctgcctgcgtggttctgaaggagaaaatcaagttagacgaataaaacaattaattacataagtgcagaaaacgggatccacccggacatcgaaaatgattccaggtgaatcccgtttttattttctcatttctttcagcagattttctctagagcgtgtctgaaaaaggcttttcgtgagctgcgagtcccaatttgtgggagattttatccgaatgagggcggcgtagcgggctacggcagccgaatgagggtaaaatataccgcaaagtggggctggcagattgcggaaatgatttttcagacacgctctagccctcttacaatctttccgatctgctccatatctaccgaagaataattcatcacataagtattctcaattcctgctttcttttcataataaaacttagagagcggtgacagtttgatgccctgggcttttgccagttccattacattctcctcagctttctccgttttcaatttcatcagaaaatgcacaccggcctcttccccggatatttccacacatttgtgcaggccactatcccggatcgcagataagaatccatttttcttattttgatagtaattgcgcagccggttaatatgtttttcgaaatatccttctttgataaacagatccagggtatattgttcaaagtttgataccgtacaggaataaaatgataatttctggtaaaactgttccaaaagcggacgcggcaggatcatataactgatacgcacggtagaagccagcgtctttgtaaaggtattcatataaataactttttcggaaatatcgatactttgcagggtagggatcggtttccctcccagacgcagttcactgtcgtaatcgtcctcgatgatgtattttccttctcctttcgccgcccagccaaggagttcataacggcggctgatcggcatcacgattccggtcggataatgatgggatggagaaatatgtacaatatctacctttttttcctctaactgagaaacttccacgccttctttatccatatcgatgtatttccagttaacctgatagttctgatagatttttccgatcttctgataccccggattttccaccgcatagaccgcttcgtgtcccaaaagctggatcaaaagcccgcacagatactcggttccggctccgatgatgatctgctccggctgtaccgtcatgccccggaagtctttcagatagcccgcgatcgactgtctgagcgacatgattcctccacagggcgggttggtcatcagctggatccggctgtcgcttaatacctcccggaccatctttgcccagatggtaaacggaaactgatcggcttcggtctggttactggtaaaatccgctagatagctgttttctccgctggtcaggggaatgatctcctgcacttcttctctctgtttgctctccagtacgcccttaaaatccgttacatagaatcctcttttgggcatggaatagatataaccctccgcgatcagctgctcataggcattttctacggtgatcacgctgatacccagattttttgcaaaactccgcttggacggaagtttctctcctgcctgcaaattgccctgtaaaatgtcgtttttgatgcatttatacagatattcatacatcgaatctgaccctatatttgtaaaattatacgtcagcatggttcttcttttctcctatctggtcttactgaatatatttattttgataattttttcatatccactttagcattataatctacccatatatttttttcaagagattaacctactacttaaggaggaacattattatggaaaacagatacgaactgaacaaagaactggcacagatgttaaagggcggtgtcatcatggatgttaccacaccggagcaggcaaagatcgcggaagcagccggtgcctgtgcggtcatggctctggagcggatcccggcagatatccgtgcagcgggcggcgtttcccgtatgagtgatccgaagatgatccagggcatccagaacgcagtttctatcccggttatggcaaaatgccgaatcggtcattttgtggaggctcaagttctcgaagcaatcgagattgattatatcgatgagagtgaggtgctctctccggctgatgatgtgtatcatatcaataagaagaattttaaagttccttttgtatgtggcgcaaaagatctgggcgaggcgcttcgccggatcaacgagggtgcttccatgattcgtaccaaaggagaacctggaaccggtgatatcgtacaggcggtacgtcatatgcggaaaatgaacagcgcgatcgcacagatcaaaggcatgcgcgaggatgaactttttgagattgcaaagcagttacaggttccttttgatctggttgcttatgtacatgaaaatggaaagcttccggttgttaattttgctgccggcggtgtggctactcctgcggatgctgctctgatgatgctgctgggtgcagagggtgtctttgtaggatccggtattttcaaatccggtaatccggagaagagagcaaatgcgattgtaaaagcggttacgaattatacggatgcgaagatgatcgccgaattgtctgaggatctcggagaagcaatggttggtatcaatgagtctgagattcagcttctgatggcagaaaggggcaaataagatgaagattgcggttcttgctgtacagggggcttttattgagcacgagcggaagctggaagcgcttggtgtttcctgtgtggaacttcgcaaggcggaggatctgaaccagtcttatgacgggctggttcttcccggcggcgaaagtacggtacaggggaagcttttacgggagcttgggatgtttgatacgatccggaagcagattcaggaggggcttccggttttggctacctgcgcggggatgattcttctggcggattcgctggagggtaatgcgacggtgcatcttcagacggtcccgatggtggtgaagcggaatgcttatggacggcagcttggtagttttcatacggaggcagagtttaagggaattggggagattcctatgacgtttatccgggcgccttatgtgtcggaggtttcggatgggattgaagtgctggctgtagtacaggatcggattgtggcggttcggtatgggaagcagatggcgctggcgtttcatccggagctggatgaggatcatcgggtgcatgaagagtttttacgaatgtgtggggaaaaataagttcggttgggtttatgacggacgaagcgggagggcggacagcaccgggcagacagccgctgg

SEQ ID NO: 2498 - DNA, 9110 bp, Unknown
  gut microbiota DNA sequence
cactggaaaaagaagagacaaagctgaccagaacgttcccacggaaaccgttcgtgccgtcaggaaaagaagagcgtaaaaaacgatgtgacgagatcctgacgatccaggcgatgggactgaagaaacgtctggaacacactcacagccagagtgcggtcatcggtatctccggaggactcgattccacactggcactgctggtaacagccagagcatttgatttcctcggcatgccgagagaaaagatcaccgcagttacgatgccgtgtttcggaaccacagacagaacgtatcggaatgcctgtgaccttacggaaaaactgggggcaacactgcgggaagtagatatccgcgaagcggtaacaatccatttccgggatatcggacatgatatggaaaaccatgatgtgacatacgaaaattgtcaggcgagagagcgtacccaggtcattatggatatcgcaaaccagaccggcggtatggttatcggaacgggtgatctgtcggaactggcgcttggatgggcaacctacaatggcgatcatatgtccatgtatgcggtcaacacatcgatcccgaagacactggtgcgccatctggtacgctactatgcggatacctgtgaggatgaccggctctccgagatcctgctggatatcctggatacaccggtaagcccggaactgctcccgccaaaagacggcaagatcgcacagaaaacagaagatctggtgggaccgtatgaactgcatgatttcttcctgtattatatgctccgtgcgggatacgaaccggataagatcttccggatcgctgtacagacctttgagggcgtgtatgaccgggaagtgatcctgaagtggttaaagaacttctaccggagattctttatgcagcagttcaagcgctcctgtctgccggacggaccgaaagtcggtacggtagctgtatctccgagaggcgatctgcggatgtcgagcgattcctgtgtgcgtatctggatggatcaggtggaaaaattatcataaatggataacttccgaaaacttgcatggttcgcgtttggttggaagagaaaaggagaaggcagcaaatgacagagacaaaagagcagatgacagatctgatggcgacgatacagttgccggaagaaggtatccggcagcttctcgatgcgagagggcagctggaaaaagagggtcactgggatgtgatcgtacagaccgcagaacaggtgatgacagcagacggggaactttccgttctcacaaaaacactggaagagacagagggaagagaagaaacatttggtgtcaaccgttatcttctcgacgcactgatgctgttttgctgctgggaagaagtgaaagtgcggtatgaaaaacagggacttccgatggatgttttcgataagagtctggaagatatgaaatggaaaatgctggagtgctatgagattcatggcgtgtacggcaattttgtcggtcactggtatgacggattctttaatctgacccggtttggactgggaagattgcagtttgaactgcgtccgtttgagggaaaagaagactgtgaggtggatggtgtacagattcatccgggagataccgtgatcaatatgcatattccatccgcagggccgatgaaaccggaacttctcgatgatgcatttgcacgggcagaagtatttttcaaagaacattttccgaaggattacaccgtgtttggtgtggaatcctggctgatcgatccggatctggtacggatccttccggaaggaaatatgaaagcgtatgcggatcggttccatctggttgcagcagaaaaaagcgagacgattttcccggatggctggagggtattcggcgcagagtggaagaagaaaccggaagaacttccccggaagaccgggctgcagagagtgattgcagactatctgcagcagggcggcaaactgggaagtggttatggcatatttgtccggaaaaaataaacatttgaaattattgctgcaaaacagaagctttcgcgagtgcgcttttgatggcctctaagagcagcatggaagtgtacttgttgtcatcttcgtaggtgatgtcttcgagggactgcttttcatagatctgggaggcaagttcctcgagggcaggttccatcagcgggtacatggcggcggtggattcacttaagtttatcagctcgatggaattgatatggctgctgtccacggttacctgcacgtcaaaggtgttgtcgttcagctcgatggcggtggtgtagacacccggcaaatactgtccggtgagggcagaagttgtctggacagaggatgcggtttctttgtctttcgatggtccgaacatgatcagaagaagaacaatcatcaggagaccgagtacgagaaagatagcggtatagatcacttctttcatatgtagtacaacaatcctggttttggaactcatagatacacactccttttccgatgctttttattagtgtatgagaaacagccgggttttatgaaatcccaggagaaagtgacggctttccgaaacggagaaataaaaagaaacagggggaaaggaaacatgggaatggatacatgtacgctgtgtccgaggatgtgcggtgtaaaccgggcagccggagaaaagggttactgcggaatggatgcaacaatacgggcggcgagggcggcactccatatgtgggaggagccctgtatctccgggacgcggggatccggtgcggtatttttttccgggtgcagtctccggtgtatcttctgtcagaactttgagatcgcggagggaaactgtgcgaaagagatctcaggggaacgcctcagcgagatttttctggaattgcaggaacagggagcggcgaatatcaacctggtaacagcggcacattacgtcccggctgtgatcgaatcactcaaaaaagcgaaggcgcagggaatggatctgccggtgatctacaattccagcggatacgaacgggtggaaacggtgcagatgctcgaagaggttgtggatgtctggcttcccgattttaaatatatggattcgaagcttgcttttgcatattccagggcaaaggattacccggaagttgcccgggcagcaatccgggagatgatgaaagctgccggaacctgtgcatacgatgaggacggttatatccaaaaaggtgtgatcgtccggcatctgatcctgccgggacatacgaagaattcaattgcggtactcgatgagttgtatggaacgtatggagacgatctgaccatcagcctgatgaaccagtacacaccgcttccgcaggtacggaacattccggatctgaaccggcgggtgacgaaacgggagtacgagaaagtgctggatcatgcgctggatctgggtatcacccagggattttttcaggaaggcgggacggcaaaagaaagttttattccactttttgactatgaagggttataatgcaatcaaacagaacgggaaacagcatattccgtgtgaaccaatcagaaaaatgtaaaacacagttacgacccctgccggtaaaaagacaggggtcgtaactgtcagagagaagaagacagacgaaaagatgctgagcgcagacagaagcaggaacaaaaaaaggaggaaaagatccatggcgctgcaatttgtacccggcaattcgggggctggaaaatcctttcagctatatcagaaaatcttacaggaagccggggagcatccggagagaaattatctggtgatcgtaccggaacagtttacgatgcaaacacagaaagaactggtatcgttgagtccacggcacgggatcatgaatgtggatattctgagctttgaccgcctggcacaccgggtgtttgcggaagtaggcggagatcagacaccggtgctggaagatgtgggaaagattttggtgctggagcgtgtggtacaggaacagaagaaaaaactgggagttcttggcagcagtctggaaaaactgggaaccgtcagtgagatgaaatcactgttatccgagctgatgcagtacgatattcacccggaggaactggacgagatcggcaatctggcaaaagacaaaccgctgctgtatcacaaattaaaggatgtgcagaccatttatcagggattttccgagtttttgagaaaacgatatatcacggcggaggaagtgctggatcttctgtgtgagaagatcggaagctcccggctggtgagagacagctggatcgttctggacggatttaccggatttaccccgatacagaataagctgctgcggaaactgctgaagatggcgcggcagatctgggtgacggtgacactggatgagaaggtgtctgtggcacagttaaaacgtccgcagcatctgtttcggatgagtgggaagatgatggagtctctgacctggatggcagcggaagaacgggtggaagttctggatccctggtgggtgcatccgggagaacacagccgtttccatgaggcaccggcactcgaatttctggagcagcatttgtttcggtatgataaacggcagtaccggaaggaacaggaagaggtacagatctttcaggcaggcaatccgaaagaagagatggaggagatcgccagaaagatccgtctgctggtgcggacaaaaggctaccgatatggagattttgcggtgatcaccggagatatgacaacgtacggaagctatgccagacaggtgatggagcagtgcaggattccctgttttatcgatgaaaaacattcgatcctgatgaatccgtttgtggagtacatccgggcggcggtaaatcttgtggtggagcatttttcctatgagagtatgtttcgttatcttcgctgtgggatgtccgggatcccggtctaccaggtggatcagctggaaaattactgtatcgcagttggaatacgtggggaaaaacagtggaaggatcactgggtaagacggtaccgggggatggaagagggcagtatcgaagcgattaataagatccgggaacaggtctggaaaaagatcggtcctttcgcggaatatatgaaagaaaaagagcacacagtagaagaacggacgcggatgctctatcacatgatcgtaaaggacaggattcaggagcggttagcggaaaaagaacaggattttgctgcgcagggcgatcaggcgatggtcaaggaatacagccagatttacggaatgatcatggaactgctcgataaaatggtgcagatgcttggcagcgagacgatcacggcgaaggagtacggacagcttctcgatgtgggatttcaggagatgcgggtgggcatcatcccgccgacggcagatcaggtgttgcttggtgagatggagcgtacccgactgaaagacattaaggtactgttttttgcgggggtcaacgatggaattatcccgaaacacgggggaagagccggtctgctgtccgagtctgaccgggaatttctcgacagccgtcaggtagcactggcgccaacggcgagggaatccatgtatatccagcgtttctatctgtatctgaatctgacgaaaccttccaggtgtctgtatctttcctacgcccagtccaacgcgcagggacaggcacagagtccggcgtatctgatcgcgatgatccttcggatgtacccgaaactggtgatccaggacagtccgaaagacgagatcagccagatgcagatggcgcagcaggcgacggagattcttctgggaggacttcgaaaggacggggaacaggagcagaacgatggctggaaagaactgttttcctggtatctgcggtcggaagaatggcgggagcagtgtcttcgctggattcgggcggcatacgagggagcaccggagagcagcatcggaaaagcggcggcagtggcactctacgggaaagaactggacaacagtgcgacggaactggaacggtttgcagcctgtgcctttgcacattttctgcaatatggtctgaaaatcgaggaacgacaggaatacgaatttcgtcaggtggatctgggcaatgtgatccatcaggcactggaacagttttcacgaaatctcaaaaaaaaccggctgacatggcgcagtctgacggatcaggaacgggatcagctgattgatacgagtgtggaggaaaccattcacgactatggcaatacgatcctggagagcagtgcaagaaaccagtatatgatcctgcgtgtaaaacggatcctgcggcggacggtctgggcactgcagcaacagctgaaagcaggaaaatatgaaccaagccggtttgaaatctctttttctatggaggaagatctgaaagcatcgaattttcagttatcggaggatgagcgcctgcgcctgcggggacggattgaccgggtggaccgctatgaggaggacgatacgatctatgtgaaagtcattgattataagtccggcaatacggctctggatcttacttcggtgtatcacggactgcaattgcagcttatcgtatatctgaatgcagcactggaactggaagaaaagaatcatccgggaaaaaatgcagaaccggcggggatgttttattatcatgtcaaagatccactggtggatggaaaacctggggatgaggaagaggagattgaacggaaactgctggaaaaattaaaggtggacggactggtccgggcagaagaaaagatcttaaaggatctggatcgggaactggaagcagggaaaaaatcgctggtgatcccggcagcctacaataaaaacggcagtctttcaagtcgttccaaaacggcaagcaaagaacagttcgaagaactctgtgcctatgtcaacgataagatccgtgaaaatggaacacggatccttggcggggagatggagaaaaatccatataaattgaaacaacggaccgcctgcgactattgcagctttaaggaaatctgcggatttgatgaaaagcaggagggaaacagtttccggagacttccggtattttccgatgaggaactgtggaagaaaatgagagagaaaggggagaaggaagatggagatgaagtggacgccggaacagcagaaggtcattgaactgcgggatagaaatatcctggtcagtgctgcggcaggatccggtaagactgctgttttggtagaacgaatcctggggaaaatgaccagaaaagattgtcccatcgatatcgaccagctgctgatcgtgacatttacccgggcagcagccggagagatgcgggagagactgacggaagcggtggaaaattatctggaacaggatccggaaaatgaacacctgcaaagacagcagacgttgatccacaacgcgcagatcacgacgatcgacggattctgctcgtatgtgatccgaaactattttcataccatcgatctggatcccggattccgcacggcaaatgagggcgagatcaaactgctgaaacaggatgtggcaaaagaggtgcttgagagcaattatcaggaacggacgggaagttttgaccgctttgtggagagttttgccaccggaaaaagtgatgaagtgctggcggaactgatccttcgcatgtatgaatttgccatgagtaatccctggccgctggaatggctggacagctgtacgaaggcatatgagatccgaacccgggaagaactggcatcctgtgtctggatgcggaaactgtgggaggatgccggacatctgatggatcagatcacgtatcttcaggagcggtgtaaagaagtgatctacagtcccggtggaccgcatatgtacggggaatcactggaacaggatcttttgtttcgaagagacctggaagaggctttcgcagcacaggattttgacgggtgcagagtcctgctggatggctggaaaccgaaagcactgtcacgaaagaaagacgacagtgtgcaggaggataagcgggaactggcgaaaaatctacgggatcaggcaaaagaggcagtgaagaaactgcgggagaattatttttatgagacgacagaggaagttctggaggagctggaactttgcagggaaccgatgcaggagctgatccggctgacccggcagtttatcgaagtattttctgagaagaagcggcagaaaaatatcgtggattttacggatatggaacactttgcactggagattctggtgaaaaaagaagacggaaagatccgttatacacaggcggcagatgaattttccgaccgctttgaggaaatcctgatcgatgaataccaggacagtaatctggtgcaggagaccttattgcagagcgtatcgcggcttcgtttcggacagcacaatctgtttatggtgggtgatgtcaagcagagtatctaccgcttccgtcttgccagaccggaacttttcatggaaaaatacgaaacctacagtctggaagacagtgtatgtcagagaatcgatcttcacaaaaacttccgaagtagagccggagtgctcaaaggtgtcaatcagatcttttaccggatcatgggaaaagatctgggagcggtggaatacgatgcagatgcggccttgtatccgggtgctgtttttgaagaaaagccggagggaacaccggaagaaccggcgtgccaggtacttgtggcgcagaccggcacagacggtatggatgagaagatgcaggaacagagtgatcaggagctggaagcgcggatgatcggagaaaagatccgcagcatggtgggaacggaactggtatgggataagaaagaaaagcagtatcgtcctgcacgttatcaggactgtgtgatcctgcttcggacgatcaccggctgggcggagaactttgtcaatgtgttgatggatatgggaatccccgcttacgccacttccaaaactggatatttttccacgacggaagtgcagacaatcctgaactatctgcggatcctggataatccgatgcaggagattccatttaccggtgtcctgttatcgccgttgggcggctgtagcgcgagagaactggctctgctaaaagcacgatacccggaagaaaagatctatggatgcgtctggaactatc

SEQ ID NO: 2499 - DNA, 8600 bp, Unknown
  gut microbiota DNA sequence
ctggatctgcagggatacgatattgatccggaagtagtaaaaaatgcgagagaaaatgcggcagcggcgggtgtggatcatctgatccatttccagcagagagaagtggcgaagctgcgtcatccgaaaaaatacggatttatcatcaccaatccgccatacggcgagcgtctcgaagaaaaagaaatgcttccggggctgtaccgccagatcggtgaagtgtatgaaaaactggatgcctggtcgatgtatctgatcaccagttatcaggatgcggagcgctatattggaagaaaggcagataagaaccggaaaatctataatggcatgatccggacctattattatcagttccttggtccgaaaccgccgaaacgcagagagggagagacacgatgaaacgtttgatatttgctacgggcaatcagaataaaatgcgggagatccgggagatccttgccgatcttccggtggagatcctgtcgatgaaagaagcagggatcgaagcagatattgtcgaggatggaaaaacatttgaagaaaatgcgatcatcaaggcaaaagcgatcatggaactgaccggagaactggtccttgccgacgattccggtctggaaattgactatctgaacaaagagccgggaatctattccgcaagatatatgggagaggacacctcttaccggatcaaaaatgccagcctgatcgagcgcctggcaggggtgccggatgaaaaaagaaccgcccgctttgtctgtgcgatcgcagccgcatttccggatggaaccgtgaaaaccaccgagggagtgatcgaaggcaggatcggatatgaggaacgcggagagaacggatttggctatgatccgatcttttatgtgccggaattcggctgtacgacagcagaactttccgaagaacagaaaaatgcggtcagccaccgcggaaaagcactggaaaagatgcgagagatcctgaaagagagtgtgagcgcagaatgaagattttggtagtcagcgacacgcacggacacgatgagaatctgatgcgtgccctgcagcgggaattgccgatcgatgcactgatccactgcggggatctggaaggttccgaagagtatatcccggaggctgtggaatgtccctgttacttcgtgagaggaaataatgactttttcagcaatctgccaaaagaagaagagttcacgctgggcaattatcggatcatggtgacgcacggacatctgtacggtgtctcgatgagtacctgtgtgctggaggaagaagcgagaagcagacaggtacaggtggttatgttcggacacacccactatccgtatctggaagagatggaagatctgacggttttaaacccgggcagtctttcctatccccgccagcccggacgtaagccgagctatcttgtgatggaaattgatgagcagggcaaggcacattacgaacaccgatacctcgaaaaagcctgaaaaataaggaaaaatcgggaaaataaaaaaaattaaaaaaatttgaaaaaaggtgttgacttttagagaactatacactataatactccttgtgctgagcgagagagctcaacacgaggaacgaaacggggtgtggctcagcttggctagagcgcctggtttgggaccaggaggtcgcaggttcgaatcctgtcaccccgacttaacaactaaatatttcctttgcgggtgtagttcaatggtagaacaccagccttccaagctggatacgtgggttcgattcccatcacccgcttccatcagacaatatctgatgagtacgtgtttgtagctcagttggatagagcaacggccttctaagccgtgggtcgggggttcgaatccctccaagcacgtttcttttctctaaagaggaaaggtatggtgggtatagcgcagttggttagcgcgccagattgtggctctggaggcccagggttcgaatccctgtatccaccctgccgtaaggcgtacgttgggctatcgccaagcggtaaggcacaggactttgactcctgcattcggcagttcgaatctgcctagcccaggttatgggatattagctcagttggtagagcacttgacttttaatcaagttgtccggggttcgaatccccgatgtctcatcggacaagcctagtgcttgtccttttttcgttgtaggatacaggcggttatggcggaattggcagacgcgctggttttaggtgccagtgggcaaccgtgtgggttcgagtcccactaaccgcattattatagaaagtattgatatcatatcttagattctgattgatttcccagaggataaaaattatagaagaactgaaaaaggaggccattagcgtatgaaagaaagaaaatggctggcagatctgccgaaagttgatctccattgccatctggatggttcactgaatctggaaacggtacgaaacctgacgggcaagcaggagatttcatgggaggatctgcaggcggcagcagactgtgacagtctgaagacctatctggagaaatttgatcttccgctgctcgggatgcagacggcagaagggctgcgggaggcggcaaagtcgtttctgctggatctgaaaaaagaaaatgtgatgtatgtggaagtgcgttttgccccgcagctttccgttcatgaaggatttggctgttcgcaggtcatcgaggcggttcttgaggggctgcgggaggcagaagcaatctgtcagatctcctggcgggtgatctgctgtgcaatgcgccatcatacgatggaacagaatctggaagtgttccggactgccacagagtatctggatcgcggggtgtgtgcggtggaccttgcaggggatgaggcatcctatccggcatcacagtttacagacctgtttgcggaggcgagagcactgggtatcccgtttacgatccatgcaggtgaatgccacagcacggaaaatgtgagaacttcgatcgagatgggcgcaaaaaggatcggccacgggatcgcgatgaaagaagatccggaactgatgaaactggcagcggaaagagacgtggggatcgagatgtgcccctgcagcaattttcagacgaaagcggtgcaggagggagaagaatatccactggcgctcttttgggaacaggggcttctggtaacggttaataccgataatcgtaccgtcagtcagaccagcgagaccagagaactgaagatggcactggaactgatggaagcgtcccaaaaaccggtggaagatgagaagacattttgcaggaaactgatggaaaacagtatccggacagcatttttgccggaggaagaaaaggagcgtctgcgacatattctggaaaaattttcctgaggaaagcagaggcataagttgacaaaccgcagacacgatggtaggctagaaccatctcgggtgtcggatcggacatacagaaaggaatcatgaaatgagagaaaaatacgaatcattatcagccggacagcttcgggaagtagccaaagcaagaggactgaaaggaatctctgctctgaggaaagaggaacttgtacagcggatgctggatgaggacgccaaagagcaggaaaaacagattgaagataaaaaagcagaatttggacagttggacagtggcatcgaggcaaatgggattctggaagtgctcgcggacggttatggatttatccgcagcgataattacatgccgggtgaaaatgatgtgtatgtatccccttctcagattcgccgcttcaatctgaagacaggagatattgtacggggaagtacaagagtaaaaaaagaaaatgaaaagttcggtgcactgctgtatgtgacttctatcaacggcatgtcaccgaatgagaacaccaaacggtataattttgaagatatgacgccgattttcccggattcccgcctgcgtctggaacgcccgggcggaagcatggcgatgcggattgtagatctgatcagcccgatcggaaaagggcagagaggtatgatcgtatctcagccgaaagccggtaaaacgacactgttaaaagaggcagcgcagtccattcttcgaaacagcccggatatgcatctgatcattctgctgattgatgaacgtccggaggaagtaaccgatatccgggaggcgatccgcggagacaatgtagaagttatttattctacattcgatgaacagccggaacaccacaaacgggtatccgagatgacaatcgagagagcgaagcgcctggtagaacataaaaaagatgtcacgatctttatcgacagtatcacacgactggcaagggcatacaacctgaccgttccgccgagtggaagaacactttccggtggtctggatccggcggctctgcatatgccgaaacgcttcttcggtgctgcgagaaatatgagagagggcggaagcctgaccatccttgccacagcacttgtggataccggaagtaagatggatgatgtggtatatgaagagttcaagggtaccggtaacatggagctggtactggatcgaaaactgcaggaaaagagagtattcccggctatcgatatcgcaaaatcaggaaccagaagagaggatctgctgctgagccaggacgagcaggaagccgtctatatcatgcgaaaagccctgaacggtatgaaggcagatgaggcggtagaaaacattctgaacatgtttacaaagacccgaaacaaccaggaactggtaaatcaggtaaagaatcagaaatttatctaaaagcacttgctttttttcggagtacatgctataatttacaagctgtttaaatttgagaaaatagtaaaatatatataagaaaattggaagaggtgaaagaaatgagagaaggaatccatccagattattatcaggcaacagtaacatgcaactgcggtaacacattcgtaacaggttctacaaagaaagatattcatgtagaaatctgctccaaatgtcatccattctacactggtcagcagaaagctgctgcagctcgtggacgtattgacaagttcaacaaaaaatacggtattaacgcataagacaataaaaaaagacaagcgggttgaggtttttacaaatctcaacctgtttttctctataggaatgtaagggagaaacgatgaaatcttcaaatataggtggtcaggccgtcatggaaggtatcatgatgcgcagtggagatcagtattccattggtgtcagaaagccggacggtgagatcgaggtgaaggtggagccatacaagagctgggcaaaagacagtagcatttggaaactgcctgttttccggggtgtggcttctttttttgaatctttgattgtggggatccagtgtctgatgtactcggcaagctttatcgaggacgaagaagaggaagataccggaaaacccaaaaaagaaaagacagaagaacagaaagaaaaagaagaaaaatggctgatgtacggaacgatgacattttccgtggtattttccatcgctctgtttatcatgctgccttattttctggcaaactttctgcgacatgtgacaacatcggagggactgattgccgttgcggaagcatgcgtgcgtatgatcctgtttctcggatatctggtgctgatttccagaatgaaagatatccagcgggtatttatgtaccacggagcggaacataagtgtatcaactgtgtggaacacggactggaactgaatgtggagaatgtgatgaaaagctccagagagcacaaacgctgcggaacgagctttttgctgtttgtcatgatcgtcagtattattttcttcctgtttatccgggtgtcttccccggtactgcgggtggtgatccgtctgcttctgatgccggtcattgccggagtatcgtatgagattatccgtctggcaggaaaaagtgacaataagatcgtggcgctgttgagtaaaccggggctgatgctgcagcatctgacaacgagagagccggaaccggagatggcggaggttgccatcgcagcggtggaagcggtatttgactggagaagttatctgaaagagaactttccggaacagtacggagaacaatcatgagtacattgagacagctgctttcatggggaagcgaaacacttgcaaacgctgaagtcccggacagcggacaggatgcgtggatgctgatggaagaagtgttcgggattgaaaaaagctattattttcttcacggagatgataaaatagacccgaatacacagaaaagatatgaggatatgatccgggagcgtgcaaagcggattccggtacagtatctgaccggaaaagcatggtttatgggctatgaatttctggtcaattccagtgtactgattccgagatttgatacggaagtgctggtggaagaggcgaagaaacatattatgccgggatgccggctgttggatgtgtgtaccggcagtggctgtatcctgctgagtctgttggcagagtgtaaagacaggattgccatggcaatgggtgtggatatttccaaagatgcgctgcaggttgcaattgcaaacggaaaccggatggagcttccggcggaatttcgggagagcgatctgtttacgcatgttacgggtacttatgatgtgatcgtgtcgaacccgccgtatattgcgaccggagaactggcggatctgatgccggaggtacgggatcatgagccggtgctggcgcttgacggaatggaagacggattgtatttttaccggaagatcgtgtcgcaggcggatgggtatctggcgcagggcggatggctctgtttcgagattgggtacgatcagggagcggcgctgaaagaaatgatgacagaagccggctacggacaggtgcagatcatcaaagatctggcaggacttgaccgggtagccgtcggacagaaaatatagaagaatataccaggaggaaaaggaatgtttgataaattagaagatctgctggttcgtctggaagagattttaagtgaattaaatgagccgggtgtggcaaatgatccggcgcgttttcagaaactgatgaaggaacagagtgaactgcagccgatcgtggatgcatacaaagagtataaagcatgtcagcagacggtagaagagagcctgatgatgctggacgaagaatctgacgaagagatgcgtgagatgctcaaagaggaactttccgatgcaaaaagcagaatcgaagaactcgagacagagttaaagatcctattactgccgaaagacccgaatgacagcaaaaacgttatcgttgagatccgtgccggtgccggtggtgacgaggcagccttatttgcagcggagatctaccggatgtatgtaaaatacgcagagtcccgcagatggaaaaccgaactgatgtccctgaacgaaaacggaatcggcggtttcaaggaagttacctttatgatcaacggagcgggtgcgtattcccgtctgaagtatgagagtggtgtacaccgtgtacagcgtgtaccggagaccgaatccggcggacgtatccatacttccaccattaccgtagcgatcatgccggaggcggaagagatcgacttccagctggatctgaatgactgtaaatttgatgtgttccgtgcgtccggtaacggtggacagtgtgtcaatacgaccgactctgccgtacgtctgacccatatcccgaccggtatcgtcatttcctgtcaggatgaaaagtcacagctgaaaaacagagataaagcactgcgtgtcctgcgttcccgtctgtatgatatggaactgcagaaacgtcatgacgaagaggcagaagcgagaagaagccaggtaggtaccggagaccgttccgaaaagatccgtacttacaacttcccgcagggacgtgtgactgatcacagaatcaaactgaccctgcatcggctggatgcgatcttaaacggagatctcgatgagatcatcgacagcctgatcgccgcagaccagaccgcaaaactggcaaaaatgaaccagtgataccagggtcaaaaacatgagtaagtagccatttttcgaaggaaaatgagcggattacgaaggtttttgaggattgtgagagtacgaagtacggaacaatccggtatcacaacatgatatattattaaaaagatcggaggaaacatcatgggaaaatattttggtacagatggttttcgaggagaggcaaatgtggatctgaccgtggaacacgcctacaaagtgggaagatttctcggatggtactatggaaaagatcacaaagcacagattgtgatcggaaaagatacaagaagaagcagttacatgtttgagtattctctggtagcaggactgaccgcttccggtgcggatgtttatctgcttcatgtaactaccacaccgagtgtttcctatgtggtgcggacagaaaattttgactgcggaatcatgatctccgccagccataatccgttctacgataacggcatcaagattatcggcggtaacggacagaagatggacgcggaagtggaaacgatgatcgaagcctatattgacgatgatgttccgaagatcc

SEQ ID NO: 2500 - DNA, 2112 bp, Unknown
  gut microbiota DNA sequence
attcccggaatctgcgctggatacagttaaataacgccggaacagaaggattttgtgtaccgggaatcctgcccaaacaggcacagctgaccaatgcaaccggagcgtatggaatggcgatctccgagcatctgattgcgatgctgtttgcgctccagaaacgcctggatatttaccagaaccagcaaacagaccaccgctgggaaaaacagacccatatgatggtcacagagggaagccatgttctggtgatcggccttggagatatcggaacgacatttgcaagaaaaatgaaagtactgggtgcacatgtgaccggcatcagaaggagccagaaaccaaaaccggagtacgttgatgcacaatacacaatggaagccctgccggaactgttgccgcaggcagatatcgtggtaatgagccttccgggatacagcgataccaaaggtgtgattggagaaaaagaattacagttgatgaaatcgaacgcaattttgttaaatgtaggtcgcggaaccgccatcgacagtttggcacttgcgaaagcactgcaggggcgaagcatttacggcgcaggtctggacgtcaccgatccggaaccactgccggaagatcatccactgtgggatgctccgcactgtatcattaccccacatgtgtccggtggatatgcactgccggagacactcgagaagattctgaatctttcgattgagaacctggaacgttacgaaaaaggcgaagcccttcacaatatcattgacttttccactggatatgtgaaacggtaagacaggcgttcggaaaattgcataaaaaataaaacaaaaaaagagaagaattttcagggttcttctctttccttttgcagataaccgtgctatactgttgtctacaaaatgttgttttagaaatcagaaaaaacactatatatagtagtaaggagtggaaacaatggtatatattatcaagaaggacggcacaaaagaagagttcgatgccaataagatcaagcgtgcggtcaataaatcggcaggtcgtgtcatgtatcgttttaccgatgacgagatcaattttatctgtaaatatgcgaccgaccgtgcagaagccatgtccagagaacgcaagggcggaaagatcatgatccaggatatgcacaacatcgtggagggcgctctggaacaggtgaacccggcagtagcaaaaagctatcgtgattaccggaattataaagtagactttattcatatgatggacgaagtctacacgaaaagccagtccatccgttatatcggagataagagcaacgccaacaccgacagtgcactggtagcaacaaaacgaagtctgatctttaacgagctgaacaaagaattatacagaaaattctttatgaaccggaacgaactgcaagcatgcaaagatggttatatttacatccacgatcagtctgcgcgtctggatacaatgaactgctgtctgttcgatgtgggatccgttctgcgtggcggatttgagatgggaaatgtctggtacaatgagccgaagacactggataccgcatttgacgttatgggggatatcatcctcagcaccgcagctcagcagtacggcggatttactgtgccggaagtagataagatcctgtctccgtatgcacagaaaagctataacaaatattatgaagaatttctgaaatattccgatccgtcctgggaaggaagagaagaaaagggtcgtgtatatgcctgggaaaaagtctgccgtgactgtgatcagggatggcagggaattgaatataaattaaataccgttggttcctcccgtggcgactatccgtttgttactgtgacactgggactgggaacgggaagatttgaaaaaatgatctcaaaatctctgctgaaagtccatatgggcggacagggaaaagccggacataaaaaaccggtactgttcccgaagattgtgttcctgtatgatgaagagatccatggagatggaaaagaatgtgaagatgtctttgaggcaggtgttgcctgctctgcaaaaaccatgtatccggactggctgtccatgagtggccagggatatatttccagcatgtacaaa

SEQ ID NO: 2501 - DNA, 10654 bp, Unknown
  gut microbiota DNA sequence
ggaaacaggagacaatttcttccacagcgttctagtcagggcacagcgatggaaggataatggaattctcaataaaaagagtaatcaaaactgctccactggatcaactgttgctatacaatacaaaaaaaccggcagaccctcaaagcctgccggttctctcttgtttcttaaaattataattttacaacgttagctgcctgcattccgcgagcgccttcggttaaatcataagttacagcctgtccttcgtctaaggatttgaagccttctccctggattgcagagaaatgaacgaatacatctgctccgtcttctcctgtgatgaaaccatagcctttttcagcattgaaccattttacagttcccttgttcatgatattacctccataaaaataaaataaatagaaaatataatgcagaagaataattccagagataaaaaaaaccacccggctctggagattagcattgataaaataaataataatcccgttcagcccgatgggtaatattagatatatccaatttccttctacaatgctcattatagttggaatatttgtaaaagtcaagcagaaaaaggctttatttcagtacagttttcgtgtatgatagtagatggaaaacagggttccttacagaaagagggaacgaaaaaaagtgtgaagatatgcaaaagatgcagaagcttcaggaaaggatgcaatatgaaaatcctgataaaaaatggtcatgtgatcgatccggatacaaagctggatcaggttgcagatgtactgttggaagatgataagatccaggaagtgaaagagaacatcaaagaagaagccgatcgggtgatcgatgccagaggctgctacgtcatgccggggctgatcgatatgcatgtacatctgcgcgatccggggctgacacataaagaggatgtatttaccggatcgaaggctgcggcaaggggtggtgttacaacactggttgccatgccaaacacaaaaccggtcattgataatccagaacgactttcttatgtgaaaaataaagcaacgcagtgtaatctggtcaatgtcctgcaggcaggagctatcactcaggggatgaaaggcgaggaactttctgatattgaagggatggttcaggcgggcgcgccggcgatcagtgaggatggaaaatctgttatgaatgcgcagatttataaagaagcgatgcagatcgcagcacgcctgaatattccggtactggcacattgtgaagatattcatatggtaaacggcggctgtatgaacgaagataccaattccgagaagtttggtctgcctggaatatgtaacgcagtggaagatactattgtagcaagagatattttgatcgcaaaagataccggatgccacctgcatctttgtcattgttccacaaaagacagtgaagtgatgctgcgtctggcaaaagaagacggaatctctgtatccggtgaggtatgcccgcatcattttaccctgacttcggatgatatcgtggagggagacaccaattacaagatgaatccgccgctgcgtaccaaagaagaccggcaggcacttctggaaggtctgaaaaatgatgtttttgatgtgatcagcactgaccatgcaccacatacgatggtggaaaagggtgtttctatgaagagcgcgccgtttggtatcgtgggactggaaaccagtgtatctctgaccatcaccgaactggtggacaaaggatggatcacaccgatgcagatggcagaaaagatgagttacaatccggcaaagatcctgcatcttaccaacaaaggatccctgaaaccgggaaaagatgcggatgtggttgtgatcgatccgaaagaatcgtatgtgatcgatgtgaaagattttgtatcgaagggtaagaacacaccgttccatggtaaaaaagtaaacggcaaagtgaaagtgacgatttgtggtggaagagtcgtatatgaagataaataaacaggaaacagacaatatacagaaagcaaaaggcgaggagaaaaacagatgattaacaaattgattgagaaaattcagaaaacacatgcaccgatcgtagtaggtcttgatccgatgttaaattatgtaccggaacacatccagaaacgtgcatttgcagagtacggtgagacactcgaaggtgcagcagaagtcatctggcagtttaataaagaaatcgtggatgctacctatgatctgatcccggcggtaaaaccacaggttgccatgtatgagcagttcggtatcgaaggtgtgaaagcatttaaaaagaccgtggattactgccatgaaaaaggactggtagtcatcggtgatgtaaaacgtggagatatcggttccacttccgaggcttatgcggtaggtcatctgggaaaagtaaaagtaggttcccagcagttcgcaggatttgatgaggattttgctactgtcaatccgtatctcggttctgacggcatcaaaccgttcatcaaggtttgcaaagaggaaaacaaaggcctgtttatcctggtgaaaacttccaacccgtccagcggagagttccaggatcgtctgatcgacggtcgtccgctgtatgagtgggtaggagaacaggtagatgcgtggggcaaagaacatatgggcgattcctacagctatatcggtgcggtcgtaggagcaacgtatccggaacagggaaaagtattaagaaaactgatgccgaagacctttattctggtacctggctacggcgcacagggcggaagaggaaaagatctggtacatttctttaatgaagacggactgggtgcgatcatcaactcttccagaggtatcatcgcagcatacaaacaggaagcatatgcacagtttggatctcagaactttgcagaggcatctcgtcaggcggtaaaagatatgatcgcagatatcgacggtgcattgcaggcggcaaaataaactggaaaagacaggagtatcgaacatgaaaaagaaagaaatctgtactgtgatccgtcagaaagaaattggtgacggaattttcagcatgtggattcagacggaaaacatcgggaaagaagcaaaaccgggacagtttgtatcgttgtatagtaaggatggaagcaaactacttccccgtccgatcagtctttgtgagatcgaccgggaaaacagtcgccttcgcctggtgtaccgtgtcacgggagcgaagaccggaaccgaagaattttccggactgaaagccggagatacgatcccagtgatcggaccgctgggaaatggtttccctgtagaaaaagcagagggaaaacgagtttttctgatgggcggaggtatcggagtaccgccgattctggaactggcaaaacagatgcagtgcgagaaaaaacaaatcgttgtgggataccgcaacgcgcagaccttcttaaaagaagaatttgaagcagccggagaactgtatatttccacagaagatggcagcgtgggaacaaagggaaatgtaatggatgcgatccgggaacagaaactggaagcggatatcatctatgcctgcggtccgacaccgatgcttcgggcgatcaaacagtatgccgaagcaaataacatcgaatgttatatttcactggaagagcgtatggcatgcggtatcggtgcctgtctggcatgtgtctgcaagtcaaaagaaaaagatgcacacagcaacgtgaacaacaagagaatctgtaaagacggaccggtctttctttctacggaggtggaaatctgatgaatatgagtgtaaatattgccggcgtagaatggaaaaatccggtaactgtggcatccggaacatttggatctggagaagaattttcagaatatgtggatctgaaccgtctgggagcagtgaccaccaaaggtgtggcaaatgttccgtggagcggcaatcctaccccgcgcgtggcagaagtctacggtggtatgatgaatgcgattggtttgcagaaccctggaattgatctgttctgcaaaagagatatcccgtttctgaaacagtacgatacaaaaatcattgtcaatgtatgcggacacgcaccggaagaatatctggcggtggtagaacggctggcagacgaaccgattgacatgatggagatcaacatttcctgcccgaatgtcaatgcaggatttctggctttcggtcaggatgcacatcatgtggaagaactgaccggacagatcaaaaaaatcgcaaaacagccggtgatcatgaaactgacaccgaatgtaacggatatcacagagattgcaaaggcagcggaagccggtggtgccgatgcggtatctctgatcaacacactgaccggtatgaagatcgatatcaacagaaagacctttgccctggcaaataaaaccggcggcgtatccggtccgatcgtaaaaccgatcgctgtccgtatggtctaccaggtggcacaggcagtcaacatcccgatcatcggtatgggtggtatctcctgcgcagaggacgcaattgagttcatccttgccggagcaagcgctgtatctgtgggaaccgccaacttccacaatccggcagtgacgatggaagtgatcgacggaatcgaagcctatatgaagaaaaacggtttctcatccgtaaaagatatggttggtattgtcaaatagtaaatttattaatttaccacttgaaagtaacagaaccttttgctataataagagccgacaaaggcgtcagaagaaagaaatatttcttctggcgccttttgcgtaagattaaaaagcgtaagaaaaaaggaggatgttattatgaacgcaggagacactggatttatgttgatctgcacggcactggtattttttatgacaccgggtcttgcctttttctatggagggctggtgcgaagaaaaaatgtggtaaataccatgatggcgtgtacctttatcatgggactttccgtagttatgtggatacttttcggatattccctctcttttggtggcaatcacggcggaataatcggtgatttccgatggttttgcctgaacggaatcggaatggatgatgcaggaccgtatgcggcaacgattcctcattttgtttatattgcctttcagatgatgtttgcaatgatcacaccggcgctgatcacgggatccctggtgggaagggtaaaattcaaagccctgtttttctttgttctgttctggtcgattctggtatactatccgatggcacatatggtatggggcgaaggcggattcctggcagagatcggttctgtggattttgccggcggtaatgtggttcatatcagttccggtgtgagcgcactggtatttgccatcgtactgggaagaagaaaaggttatgaaaatacagcatatagagtacataatataccgtttgtagcgctgggagcatttctgttatggttcggctggttcggattcaacgcgggaagcgcattggcagcgaatggtttggcagcacatgcatttctgacgacagcggtgtccagtgccagtgcgatgctgacttggatgttgatcgatgtgatcaaggacggaaaaccgacactggttggtgcgtccaccggactggtcatcggtctggtggccatcacaccgggagcaggatttgttccgatctggtcttctttcctgatcggtggactggtaagcccgatctgctgctttacgatttctgcaattaaagggaaactgaaaattgatgatgcactggatgccttcggatgccatggaatcggcggtatctggggaggtatcgcaaccggaatctttgcaaaaagttccattaacccggtggcacgctgggacggactgatcttcggagagtattggctctttgtcgcacagattgtcggcatcgttgtgacggcagcggttgctattgtcggaacactgatctgtctgtggctggtaaaacgaattacgccgatccgcgtcagcgacaaagaagagagaatcggtctggatatctctgaacagggtgaaagtgcgtatccgaccttcaatggactggattcataaaaaggagaacagaaaattatgatgataaaagtagaagccatcgtcagagaggaagtctttgatgatgtcaaacaggcgttaaatgatatcaaagttaatggcatcaccgtatctcaggttatgggatgtggtactcagcgtggatataaaaaactggttcgtggaactcaggtggatgtggtcatgcagccgaagatcaaatttgagatcgtggtatcttccgaagaatgggagaaaaagacgatcgaggcgatccagaaagcagcgtataccggagaggtgggagacggaaaaatcttcagctatgagatccggacagcgatgaagatccggacaaaagagacaggatatgatgcgttgaattaaactaagagaacggcggtttttcactgccgttcttttggcatatatacagaaaagcgcaggttcacgcaacagttgaaaaaaagtgcgtaacgtagtatacttatcatagatatggaaaaattcgggcgcacgccgcaaaacaggaggatgacagagcatggaacagtataagcaggattttattaaatttatggtagagagtgacgtattaaaattcggtgactttacgctcaaaagcggaagaaaatcgccgttctttatgaatgcaggtgcttatgtaacaggatctcagctgaagagactgggtgagtattatgcaaaagcaattcatgatacttacggagatgattttgacgtattattcggaccggcttacaaaggaattcctcttggcgttgtaacggctatcgcctacagtgaactttatggaaaagaagtacgctactgctccgacagaaaagaagaaaaggatcacggtgcagataagggaagcttcctgggaagtaaattaaaagacggtgacagagtcatcatgatcgaggatgtcacaacttccggtaaatccatggaggagaccgtaccgaaagtaagaaatgcagcagatgtaacaatcgttggtctgatggtatctctgaaccgtatggaagtaggaaaaggcggagaaaaatgcgcgctggatgagatcaaagacctgtatggatttgaaactgcagcgatcgtatccatggcagatgtggtagaatgcctgtataacaaagaatgcaacggaaaagtagtgatcgacgatgcgttaaaagcagccatcgacgcatattatgaacagtacggtgcaaaataaaaagggaaagaggtaacagggatgaacaatgaaaaaatttaccggacaatttcccacagcggcggtgccagccttgcactcggcatcgtggtactggtgacaggaattgtctccggtgtgttgatgatcgtgacaggagcaaagcttctgaaacagaaatatcagattactttttagaaaggcgtaagccgaagtacggggatcaaggggtaaataaagaagtgaaaaaagaaacaaaaaacagaatccggatcataagctggattctgtttgtgatttatataggattgctggtctattttctgttcctttcggaggagtacggaaggacaagctttgatcagcggatatatcgatacaatctgacaccgtttcaggaaatcaaaagattctggatctatcgtcaccgggtaggattctgggtggcatttctgaatctggcgggaaatgtgatcggtttcctgccgtttggattctttcttccgattctgagcagacgcttacgaaacggagctgtggtaacggctcttggatttggcttaagtcttctggtggaatcgatccagctggtttttaaagtgggatgttttgatgtggacgatctgatcttaaatacactgggtgtattgctcgggtatctgtccttttggatctgtaacgggataaggagaatgatttatgagaagaaaatttaaatacacatttaccagaaaagaagagacagagggcggtttttcttcactggtttttgccggctgctcgctgctgctgtttctggtatctgcgtgtctctcttttttctgggaagggaaagcagaaagctggatcggagcgcttggtctgatggcagtgcttttttcggtcagcggctttgtgatcggaatgaagagttttaaagaaaaaggaaaaaattatcggttcagtgtgatgggggcgatggcaaacggagtgatctccgtgggctggctggcactgatcctgattggattataaaacgagaacaagtaaaaagaaatgtagagggattgcctgtggatgaattagcaaaagaaagatatgatctggctgtggaaaggatccgcgagatccgggaggaaaagacggtggcagagccgtatctggacttttttacaaaaacagccggatttctcgaagagatgatccgcctgcgcgaccgggtggaagccggagagatgaaaaaactgtccctggaagagctgcgccgggaaaatacgcagtgctatcaggatattctgccggagaactacccgacttcctatgcaagtccggattatgcggcaaagatgctgggagaagatttaggcgttttattaagttttctgtatacagaacttcgcggaatgatcgtgtatgcctgggagcagaaaaactgggattttctggtgggactggaactgtttttgcaggtgtacagcgagtttgaggacggggaagtaccgacgagagaaaatgtacggaaaatcttatactggtatgtgaacgattactgtcaggagatggtagaagaacgggtgcgccaggcggtggatccgtcactggattttgcagtaaagatcataaaagatgcagatctgaaggatcttcggtatctgtatcagttcggtgaatatgtgaccgaagaggaagaaaagactgccgcctttttaaatacattgccggaagaagaaattactgcgatggcgtgtacctatacggaaggttatcggatcggttttatcgctaccggcaaagatctgtccagaaagaaaaccgtgaatattcggtatgtgctgggatttgagcggatgatccgtgctgcgattacgcagtttgagcagatgggattacagccggtgatctaccggagtgctgtgcacatggtaaataagggactgcaccggatcggctattacggagcgattccgaatccacagtttgactatgaccaccgtaacgatattgcactgtatctggatgatgattttgtcagccggaagctgcgggcaacccgcggggcatacgaagcgtataaggaactggcgggtgtgcatgccggacctgccgttgtggaaatcttcggagaacggccatttgtaccggagacctgtgaatatgcgatgaagcttacggaaaagcagcagaagttaaaagtgcatatgcaaaatgagattggtcagatcacgaaccgctatatcaaaggcgaggagagaagtttcacgatcatcgcctatccggtaccggcgatcggagatcagtttgaagaaatctttcgtgagacggtaaaaatcaatacgttggactataatctgtatcagcagattcagcaaaagctgatcgatgcactggatctcggaacgagtgtgcatattctgggaaaaggtgaaaaccggacagatctgcgtgtacagctacacaagctggaagatccggaaaaacagacaaattttgaaaactgcgtggcagatgtcaatatcccggtgggagaagtctttacctccccgaaactgacgggaacaaacggaaaactgcatgtaacaaaagtttatctgaatgaactgcagtatcagaatctggaactggtttttacagatggaaagattacagagtatagctgcaccaattttgattccgaagaggaaaataaaaaatacatccgggaaaatattctctatcatcacccgacacttccgatgggtgagtttgcgatcggaaccaacacaacggcataccgggtggcgagagaatatggtatcgaggcgaaacttccgatcctgatcgcagaaaagacaggaccgcactttgcagtgggagatacgtgttacagctgggcagaagatacgaaagtatataacccggatggaaaagagatcatagcgagagacaatgaagtctcgatcctgagaaaagaagatgtgagcaaggcgtattttggctgccacaccgatatcacgatcccgtacgatgaactgggagctattctggtggagacggaggacggaagagagatttcgctgattcaggatggaagatttgtgcttgcaggaacagaagaactgaataaagagctggatgcgctggaaaaataaaaaagtacacagaggataaaaaagcgaccggaaatcagagagaaccttgaaaagttctgagttgatttccggtcgcttttgaaatttgagcaggtaaaataaaaattgacagaaattacaggcaatgctaatgtaaaagagaaaaaaagcaaaaaacacagtaactattcagtagccactgtaccgcgaagtgttttggcatgaatatgccaaaatcctgagacatacaagccaaaatgccatcaccgaaggtgattttaaatgcattttggctcgtaactgtgaaggtactgaacagt

SEQ ID NO: 2502 - DNA, 986 bp, Unknown
  gut microbiota DNA sequence
tgtatacttaacttatcaaatatgtgttgaaattatatttattacagggggattttttatggaaccatcggtgtatgatcttacttacaatgatctcaatccccgctttctgttctgctgtaatctgcttcgaacagagcctgagatgaattatcattgtcatgattttattgaatttgtgtttatactgaaagggaaaacaacatttcgtatagacgagaagctgtatgatgtggaagaagggtccgtgattttgctgaatcccggaacatatcaccagagccttccggcagccggaacttcttcccggaaattttatctggctttttcaaatgtggaatttgccggatgtaccagaggacattttcctctttttaaaaattatcagttgctgacaacattgccggacagttataaaaaaccgttgtttcggctatgtaacctgatggaacaggagtcgaagacctgccgaccggggcggtattttatgctgaagtcctatctgattcaggtaatctgtctgctttgcagatatcagaaacaggaacttgaggaagatgcaaaacgtcagtatgcaccacggtatgagttcaagtcggtaaataagaagtatgtggctcagcagattatgcattatatggagacacattataaagagaagatttcgctggatcagatcgcggcaaatatgtatctgagttctttttatatttcgaagattttcaagagtgagacgggggatacgccgatcaattatctgatcagtctgcggatgcagaaggcgcgggaattgctggataagaacccggagcagtcgattcaggcggtggcgatggctgtggggtatgaggatgcttatcattttagtaagttgtttaaaaagtattttgggttgtcgccgctttattataaggctcggattccgcagtaaaggatgagtttgttggagagggggtggatccctcctcggtgcgcgctcaggtctg

SEQ ID NO: 2503 - DNA, 2463 bp, Unknown
  gut microbiota DNA sequence
cgccatgtttacagaggagatagagaaatctaacataattatggctcctgttcttccaaagtcttcttgtattcatctaacattttctgcaattcatcaatcgtttcccgtgctttgacaggatcttcctccgtgtccaaaagcgcagagaccagtaacggtttcgaaagcgttttttcaaatgccagataatcagaagttacctcatgaacagcgaattcctcagaggtaatggtcggacggtaagagcgagataaaaccgtaccgctgtatacaatgtctgcaacttcgaccaactggtatttcagaagcttcagaagaactgcctgaacggtattaatagtaagatccggtcgacaatcggcaatttctgatgcaatcaaaggttttccgcttgtccagagaatattcataatatcaacttcgcgggaagtcagtttgggaaatttctttttcttaaataacaaataaaatcactcctttatttaaactgtaaatataatatataccgaaaaaaatggtgaagtcaatttgaaagtgttgacaaaacaataaagtaaaaatataatgagaatgtaaaataaatacaatgaaagcatttaaaataataaaaatgaaaaattacagatgacgaacggagggcatatgggaaaaggtagcggagtattttgtgcgatgttgttctcttgtctgttacttaccggctgtgccgaaaacccgacagaagacattgtggttaataaaaatgagggaaaactggaacaggcgattcagggagaaaataagaaagacagtgacgcatcagtaccggaaaaatatacggatcagtttcaggcagatggggaaaaaatagaggtatctgtggatgcgagtgttacgggactggaagaaaacaaaccggttgtgagagtaaaaccgcatgtgattacggaagaagaggcaaaacagtgggcggatgtgctgtttgagggtgcgacggcatatgaacctggagaaaaaagtaaaacagagatagaagacaggattcttcaactgaaagaacggataagtgatcaggacaaacttctggaggattatggaagccaggaagaggcagatcggataaaaaaagagctggaagaagaaatcaaagaatacgaaaaacaatatgcgtcagccagcgatgccgatgaaaaaattccgtgtacatgggaatttcatccatatggctattatgatgacctgccaatgcccacatccggtgatgcaaattatgaaggacttgacaaaaccagtcagctgatcgcgcaggcaaccgtgaacggacatcaggcgatggtggaagtggataacagagaagagagtgactatcggttaaatacacaatggttcctgtatgaagatgaacaggaatgggtcaaagaagaaacaggaacgttatccaaagaagaggcggtaaaacaagcagatgagataaaaaatcagctggggatggaaaactggaaatatgcggaatataaaacatcggaagcagaaagcatacaaaatataatggtaacctatacaccgtcttatgaaaatatcacggcatttcagggaccactgattgatctgaaatcagaagatctgtatgcggcaaattattattattcatctctgagtattggatttgaaaacggtgtactgacgagtgtggaactgatatctccgatggatgtggtacagatagaaaatgaaaatgtagaaacgatggattttgaggagatttatcagacattcaaaaaacaggcacaggcgcagtttacagaatcagcatttctggattcggatgcaacggaaaccggaacgattcagatcgaaatatctgaaatcacagaaggacttttcagaatcaaagaaaaaagcaatacggaagattttctgatggttcctgcatggtcgttttccggaacacttcgtgtagatggtgatgactggggaaaacaggagtttctgatgataaacgggattgatgggagcgtaatcaatacatcccttggatattaaacggagaaaatgaatgttaccgtatgatagaaaaagagcatttcgaaaacaatggctgtacctgggaacttttcttactgtgatatttcttaccgtaactaatctggaaatggtggcagaggtgctgagaagtggcaggaagctgggtgcaggctggacggaaagttatattttgaaagttctgacgggagatgggattcggttgtattttcccttgttgtgcactgttccgtatgcgaccggatttgtggatgaatataaaagtggtatctataaatttgtgctggttcgaaaagaacgaaaaaaatacataatttcaaaagcaatcacaaatgcagttgcaggtggaagtattctggtagcggggacagtggcttttattttgtgtacatggattgtttttctgcctatagaaaaaggattttcatggaggattat

SEQ ID NO: 2504 - DNA, 47797 bp, Unknown
  gut microbiota DNA sequence
catcttgcagaaagcctttttcaaacacgctctaggcatgatatatgtttctttagtcagtatatcattttaaatgggtattggggagaaaatataaaatattagtttgaaaatcaaaaagattttattgacaaagtgagaaacttatattatactttgaaagtcaaaacattagaaacttaaactattgaaaataagaagagcgtgtaaaggagaaaaaagatgttagaagaaatgagagagatgattgcagaacagctgaactgtgaggagagcagtattacagaaagcacttcttttaaggatgatctgggggcggattcgctggatctgtttgagctggtgatggcactggaagagaagtatgaggttgagatcccgtctgaggaactggctgagctgacaacggttggtgcggttatggaatatctgaagaataaaggtgtggaggcgtaatccacactttttctgaaagcagggaaggagacagaaagcagatgaagacaagagtaacagaacttttacagattgaatatccgataatccagggcggtatggcatgggtagcggagcatcatctggcagctgcggtatcagaggcaggcggatttggtctgatcggtgcggcaagtgcaccgccggagattgtccgggaagagatccggaaggcaaaagagctgacggacaagccatttggtgtgaatattatgcttctgaatccgaatgctgatgaagtggcgaaaattgtagtggaggaaggcattcaggcggttacgacaggtgccggtaatccggagaaatatatgtcgatgtggaaagaagcgggcgtaaaggtgattccggttgtcgcttcggtagcgatggcgaagcgaatggaacgatacggcgcggatgcggtagtggctgagggtatggaagccggtgggcatatcggaaatcagacgacaatggcactgattccgcagatcgtagatgcggtaaacatcccggtgatcgcggcaggtggtatcggagacggacggggaatcgcagcttcttttatgctgggtgcagagggcgtgcagatgggaacccgttttgtggtggctgatgagtcgattgtccacgagaattataaaaacagaatcgtgaaggcaaaagatatcgattctgtggtaaccggtcagagtaccggtcatccggtgcgctgtctgagaaaccagatgacgaaagaatatatcaaaaaagagcaggaaggcgtaccgttcgaggaactggaacggatgacgctgggatcgcttcgaaaagcagtgatggacggcgatattttaaacggcacagtgatggcaggacagatcgccgggctggtaagtaagagacagagctgtaaggagattttgcaggagattatgggcgaggctgagaagttgctgcactgttaaaataagaaaaataaaaagtggcgataaaaataacaagtatggaaacataattttgtcgccacaaaaatttaaataaatactttgaaaatcaaattataaaaaggagacattcatgagtaaagtggcatttgtatttccggggcagggtgcacagtatgtgggaatggggaaggatttttatgagcagattccggtatccaggaaagtgtatacgattgcatccgaagtgaccgggttgaatcttccggggctttgttttaaagagaatgagcagattgatatcacggaatatacgcagatcgccatgctggcgacggaggcggcgatgttggcggctttacaggaaaagggtgtgaaggcggatgtagctgccggactgagtctgggagagtacggagccatcctgacggctggagcgatgtctctggaggatgttttccgggtggtaagacagaggggaatcctgatgcagaaagcagtaccgaccggtggagctatgtgtgcggttcttggaatggatggcgagaagattgcgaaaatctgtgaggagacggaagggatcgtttcagtagccaattataactgcccgggacagattgtgattactggagaggaaggggcagttgcagctgcagctgaaaagttgaaagaggcgggagcgagaagatgtatcccgttgaaggtcagcggtccatttcattcggaaatgttaaaaggagcaggggaaaagcttgccggagtgcttgcggatgtggaactgaaagaattttccatgccgtatgttacgaatgtgacggcagattatgtgacagatatttctgagattaaggaactgcttggcagacaggtgtattcttcggtaagatggcagcagagcgtggagaggatgatcgcggatggtgtggatacctttatcgagatcgggccgggaagaacgctgacgggatttttgaagaagattaataaaaatgtaacgggattgcatatcgaaaaagtggaagagctggaggaggttgtaaggctgttgtgtgacaagcagtaattttcgcattgatgtatgcaacgagttataagctacgtttacacgggaaggtaatgagtacggtgaaaggagcagcgatggagaaaaaggtagcactggtgacaggggcgagccgggggattgggagacagatcagtcttactctggcaaaagaaggaatgtttgtgattgtcaattactgtggatcggaagcacgggcaaagggcgtgctggaagaaatccgggaaaatggtggtgacggatgtatttatcagtgtgatgtggcagattatcagcagacggaagcaatggcaagggatctgattaaaacgtatggtcatgtggatgtgctggtgaataatgcgggaatcacgagagataatctgatcctgcggatgagtgaagaggagtttgatgcggttgtggagacgaatctgaagggatgtttccatacgatccgccatctgtcacggtattttctgaagcagaggagtggaaaaatcatcaacatcgcatcggtttccggcgtgctgggaaatgcagggcaggcaaattatgcggcatcgaaggcagggattatcgggcttacgaagacggtggcgagagaactggcaagcagagggattacagtcaatgcggtggctccgggatttgtccatacggagatgacggaggtactttcggagcaggtgaaagaggcagcagtagcacagatcccgctggggagatttggagaaccggaggatatcgcgaatgtggtggcatttctggcgtctgagaaagcggattatattaccgggcaggttatctgtgtagatggcggtatggtgatgtaaaagcagataggatgctgcaaaggcgtacgattgtttacataatatagatgtgaaccgttggcaaaataagataaattatctggactgacagtatggagtacatattgctgactggcagtagtagctataatgtggcagaaaatatgtgccggacaaagctaacgggaagaaagagaaggacagaggagcgattatgagacgagtagttgtgaccggaatgggtgctgtgacaccgattgggattggtgtggaggcattctgggagaatgtgaagaaaaagacactgggatttggtgagattacccggtttgatacgacagattataaagtacacattgctgcggaagtaaaggattttgtcggaaaagactatatggactttaaggcggcgaagagaatggaactgttctgccagtatgcggtggctgcagcaaaagaggcgtttgaacaggcgggactggatatggaaaaagaagatccgtttcgcgtgggatgttccatcggatcgggaatcggaagtctgcaggcagcagaaacagcatgtcataaaattgcggagaaaggaccctccagagtaaacccacttctggttccactgatgatctccaacatggcagcagggaatgtttcgattcaactggggctaaaaggaaaaagtctgaatgttgtaaccgcgtgtgcaacgggaacccattccatcggagaggcatatcgcagtatccaatgtggagatgcggatgtgatgctggcaggcggtacggaagcaagtatctgcccggttggtgtggcaggttttaccgcactgaccgcactttctacggtagatgatccggagaagtgttcgctgccatttgacaaaaacagaagcggatttgtcatgggagaaggttccggcgtggttgttctggaagaactggagcatgcgagacagagaggtgcgaagattctcgcagaagttgtgggatacggtgcaaccagtgatgcgtatcatattacctctccggcagaggatggttccggggctgcgaaagcgatggaactggcgctggaagaagcaggagtgaaaaaagaggagctgatgtatatcaatgcacatggaactgcgacgcatcacaacgatctgttcgagacgagagcaatcaaaaagctgttcggagagcatgcgtatgagatgaaggtaaattctacaaagtctatggtaggacatttgctgggcgctgccggggctgtggaatttattacctgtgtgaaagaaatcgaggatggatttattcatgcaacggcggggtacacgacaccggacgaggaaatggacttgaattatgtggcaggtgacggtgtagaagaaaatctggagtatgcactttcgaattcactgggatttggtggacataatgcgagtattcttgtgaaaaaatgggacatataagaaccagcggaagagaatttgtgtggctgttaaaaaaatagtgtgatgaaaaatagaaaaatcggttcatgtatgaacagacgaaaaaatgacagaaaaggttgaagaattgtgtgtatagtgagaatcacaaaaaagaggagaataagaaatggaatttgaaaatcttctgacattgattaaaacagtttccgggtcggagctgacttcttttaccatgaaagacggcgatctgaggatctctatgggaaaggaaaaacaggtggtcgtggagcagaccgggatgcaggtgatgcctgcagtggcaggaaacgcagatacagtatcggccggttctggcagttttaatgggaaacaggagcagcaggagaaatgccagccggaaggaaagacagtaaaggctcctctggtgggaaccttttatgcggcttcggcaccggatgcggaagcatttgtcagcgtgggtgatacagtgaaaaagggacagactctgggaatcatcgaggcgatgaagctgatgaatgagattgagagtgagtacgacggagtggtaaaagagattctgattgagaacggacagatggcagagtatggacagcctttatttgttatcgggtaaggactgaaaatacctgaaaaccatatgtttgtgtgcaggaggtaacagagtttatgtcagtgttaacaacaaaagaaattatggatattatcccacaccggcatccgtttcttctggtggataccatagaagaactggtaccgggggtacgggcagcaggaaaaaaatgtgtgacatatgatgagtattatttccgtggacactttccacaggagccggtgatgccgggagtgctgatcattgaggcactggcgcaggtgggtgcggtatgtatcttaagctgtgagaagttcaaaggaaagactgcttattttggtgggattaacaactgtcgatttaagaaaaaggtggttccgggggatgttttgatgctggagacggaactgatcaaacagaagggaccggttgcgattgcaagagcaacagctacggtagacggaaaagtggcagcaacggcagaacttacagtagccattggataggagaacaaacatgtttcggaaaatattgattgcaaacagaggagagatcgcagtgcggatcatccgtgcctgcagagagatgggaatcgctacggtagcagtttattcggaggcagaccgggaagcactgcatacccagctggcagatgaggctgtttgtatcggaccggcagcggcgacagacagttatctgaatatggagcagattctgagtgcatgtatcgcaacaaaagcggatgcgatacatcctggatttggttttttgtcagagaacagccggtttgtggaaatgtgtgaaaaatgtaatattacgttcatcggaccgactgcggagatgatggacaagatgggaaataaatcgcaggcaaggttgacaatgatagaagccggtgttccggtggttccgggaacaaaagaaccggtctatgacgcaaaacggggagcagctatggcagaagacataggatacccggtgatgatcaaggcatcttccggaggcggtggaaaagggatgcggattgccttcggaccggacgactttgaggagaactttcaggtagcccagttagagtcagtacgtggattcggagataacaccatgtatatcgaaaaatatgtgcaggaaccgagacatatagagtttcagatcatggcagataagtttggaaatgttgtgcagttcggagaacgggactgttcgatccagagaaatcatcagaagatgatcgaagaatctcccagtgtggcactgacaccggaacttcgcagacggatgggtgatgcggcagtgcgtgcagcaaaggctgtacattacgaaagtgccggtaccattgaatttttactggataaggataaaaatttttattttatggaaatgaatacacggatccaggtggaacatccggtgacagaaatggtttccggcgtggatctgatgaaagagatgatccgggtggcagcaggggaaccactctcagtaaaacaggaagatattcacctgcagggacatgcgatggaatgcaggatcaatgcagaggatcctgctcatcattttcggccgtgtccgggagtcatcgaagaaatccatctgcccggtggaaatggtgtacggatcgatacggcagcctataacgggtatgagattccgccattttatgattctatgatagcgaaagtaattgtgcatggaagaaccagacaggaggccatcgataagatgcgcagtacgctgggagaactgatcatagatggtgtgacaaccaacgtggattttcagtatgagatattagataatgaggattttcaggcgggagagatcacaacggattttatcccgatgcattttaatctgtaggacagaaaacctgtccgggcagacaggaggttttaactatggcgaaattaaaacatatgtttaaaaagacggcagttctgttccgggacagagaagacaggaatcaggaaaaaaaagagccatcggcaccggaaggattgtggcttaagtgtccgaaatgcggagaagtagtataccgggatgatgtaaaagcacatggatatgtatgcccgaagtgcgagggatatttccggatcggaaccagaaccaggatccgcatggttgcagacacgggaacatttcaggagtggtttaccgatctggaaacggaaaatccgctggaatatccgggatatgaagaaaagattgcaaatctgcaggagaagacaaaacttcatgaagcagttactgtgggaaaatgcatggtgaatggtctggagacagtacttggtgtctgcgatgcccgtttcctgatgggaagcatggggtatgtcgtaggtgaaaaaattacgagagcttttgaacgggcgacggaagaaaaactgccggtggtactgtttaccagttccggtggtgccaggatgcaggagggaatcgtatctctgatgcagatggcaaaaacctctgcggcgatccggaaacacagtgaagcaggtcttttttatcttcctgtactgaccgatccgaccaccggcggggtgacggcaagttttgcgatgctcggggatgtgatcctggcagaaccgggggcactgatcggatttgcaggaccgagagtgatcgcgcagaccatcggacagaaactgccggagggatttcagagggcagaattcctggtggaaaagggaatcatcgatggtgtggttgaacggcaggaattaaaagagactgtgtggaaacttttgaatattcatcaggatgcgctgcaatatatccactatggagatacgcaaaatgtggaaaacctgccggaaatcaggaacagtcgtggaaaagcagcgggatgcgataaaaaagaactgactgcgtgggaacgggtggaaatctcaaggagtaaggaacgtcctacaacactttcctatgtgcagcaggtctttgatgattttctggaacttcacggtgaccgggcgtttcgggatgacggagcggtgatcggcggaatcgcgatgtttggtggacagccggtgacggtgatcgggcagcagaagggaaagaatgtaaaggaaaacatttaccgaaacttcggtatggcgtctccggaaggctatcggaaagcacttcgtctgatgaagcaggcagaaaaattcggtcggccggtagttacctttgtggatacaccgggagcggcctgcggcatcgaggcagaagaacggggacagggagaagccatcgccagaaatctgctggagatgtccggaatccagacaccaatggtcagcattctgattggagaaggcggcagcggcggcgcactgggactggcggtgactgatgaagtctggatgatggaaaatgcaacgtattccattctgtcgccggagggatttgcctcgattctgtggaaagatggaaaacgggcgaaagaggcttctgaggtgatgaagatcacggcgaaagatctgaaaaaattgcagattatcgaaaaagtgattcgggagccggaaccggcgaatgaggagaatcttccggagattgcagaagagatccgggaagatctggatggatttttgcggaaaagctgtcagaagacgagagaacagattgtggaagaacggtacgaaagatttcgccggatgtaggagaaaagatgaaaacattgaaaataggagaacttacagccaggattcctgtgattcagggaggtatgggtgtcggaatcagtctttccgggctagcgggaagtgtggcagcctgcggcggtgtaggagtgatttccacggcacagatcgggtatcgggatccggagtttgaaaaggatccgatcggtacgaatctgcgggtgatcggggaagagatccgaaaagccagagagattgcaaagggtggaatcctgggtgtgaatattatggtggcgacgaggcagtatgcggagtatgtaaaagctgctgtgaaatccgggattgacctgattatttccggtgcgggacttccgatggatctgccgaaactggttgcgggaagtaagacgaagattgcaccgatcgtatccacggtgaaggcggcgagagtgatctgccgcttttgggatcatcattaccagcggatgccggatcttgtggtgatcgagggaccgaaagccggcggacatctcggattttccagaaagcagctggaggaatttaccccggtaacctatgatcaggagatcaggggaattcttgccgaagtgaaaaaatatgcggacaagtatggaaaagagattccggtggttgtggcaggagggatctttaccagagaagatatgcttcatgcaatggaactgggagccgacggcgtacagatgggaacccggtttgtgacaacctgggaatgtgatgcctccgaggcgtataaacagacctatctgcatgcaaagaaagaagatattgtgatcgtggacagcccggtaggaatgccgggacgggcgatacgaaaccggtttttggaggaaaaagaaagcaggcgagagtcaattaaaaaatgctatcagtgtatcgctacctgtaatccggcgaacacaccatactgtatcaccagagcgctggtgcatgcagcaaagggtgagacagatgatgcactgctgttttgcggggaaaacgcatggcggtgtgaaaagatggagcatgtggcggatattatggcggaatttgcgtgagagagaaaaacgaataagaaatataagaacaataagacgtgtggaaaagaagaaaaatattttccatgcgtctttttttgaaaaacagagatttcattgccggaaatctggaaacggaatataataaaaacagtgaagatttacatctgtgaaatgaaaaaaggagcataactgcaaaaaatcaggcagttatgaatatatgggtgaaaaaagaacaggaggataaaattatgcaacgtattgggttagacaaaaactgggatttttatgagagtgatgagagcatgagctttgtatttgccacaccgccgagtcagaaggtggatctgccgcatgacttcattgtgggaaaaccgagaagtgccgatgcaccgggtggaccggcaaacggatatttcggaaacggggaaggtgtgtataagaagacgctggatatcccgaaagagtgggaaggaaagaaggtcattctggatatcgacggggcgtacatgaatctggaagtgctgttgaatacgacattgcttgcgatgcatccaaacggctatattccgttccaggtggatctgacaccggcgcttcgttttgatgggaagaaaaataaactgaaactgatcacccagagcagacagccgtcaactcgttggtacagtggcggcggactctaccgtgatgtatgcctgtgggtgggaggtccgatttgtgtggagccgtggaatgtgttcgtgaccacaccggaaatcggtgaaaaagaagcggtggtaaatgtagatgccgtgatcaccggaaccgatatcgaagaggccgtggactatcggtgtgaaatcctggacgccggtggaaaagttgtcggaaaagtggagaaaaccatgcaggtatgtggaaaacagaaggagaatgtacagctgactgtggaaaatccttcgctttgggatctggagcatccgtatctgtatacctaccgtattaccgtcagcaaagacggagaagttacggatcaggcggaagatacttttggtatccgaaagattgaagtggatgcggtcaacggattccggctgaatggaaagaagatgaacctgaagggcggctgtattcatcacgataacggattccttggtgcgtgcgcatacccgaaagcggaagagagaaagattcagattctgaaaaaagccggctacaataccgtccgcatcagtcattatccgccgtccatggcgatgttaaaggtatgtgaccgcgtcggtatgcttctgatggatgaggcatttgatgtatggcggcttggcaagatgccgttggactatcatctttattttgaagagtggtgggcgagagatatcgaatacatggtacgccgtgaccggaatcacccgtgtgtgatcacatactcgatcggaaatgagatcacagagcgtgatggtggaaacgatggcgcagagtggtcgagaaaactggctgcaaaagtccgtgaatttgacagcacccgttttgtgacttctgcaatctgcggcgtatttccgaagccggaagtggaagatgatgaggatgacagcgccggaaccaactttgacctgaacttgatgcaggataattcggtgtggaataaggcaacagaaaattactgtaaaccgctggatattgtgggatataactatctgagagatgtttatgaggagagtcatgaactgttcccggaacgtgtgatgatcggaacggagacacattcatttaccacttacgattactggaaaaaagtagaagaactgccgtatgtgatcggtgactgcatctgggcagctgtggattatatgggtgaagtcggtgtcggtaaggtatactgggaaaatgcacatgaggactttaattttatggcaccatacccgtggagaacatcctggcagtcggatattgacctgaccggagaacagcgtccgcagtcggtgtaccgtgagatcatgtggggaaatacgaagaagtccggtatttacaccacgcatccgaaacacttcggagagaacttccggggaacagactggcattggtatgatgtcaatgactgctggtgttttgcggatgaatggcttggaagaccggtgaaagtggatgtatacggagcaggagatgaggcggaattcgttctgaacggaaagagcctgggaagaaaaccgatcgagaaactgatggcttccatggacattccttatgaaccgggaattttggaaggagttgtctataaagacggagctgagatcagcagaagtacactggtaacaccgaaagaggcagcggtactggaactggttccggaagaggagagttttgtggcagacggcaaagacctgagttatgttcgcgtgacgctgaaagatgcagacggaaaccgcctgacacaggatgaacgggagattcaggtagagacagacggtgtgggaactttcctggcagtgggaagcggcaatccatgcacggaagaccagatcacagataccaaatgccatctgtatcgcggaactgcgatcgtgatcctgaagagcaaagaggcaggagagacgaagattacggtgaaagcggacggcgttgcggctggaagctgtgtggtagaggcaaaataaacattcacagttcctgaaatacatgttatactgattatactttctgtttggaaatgaaaaagaatcagaagaaagatgatatggaacgtaatacaaaggcgtatgaacccatacttgggtttatacgtctttttttgcgattttgttgtagttgagcggaaaagaagggagaacaattatgaaactggaaaattatgagatgcatctgccgagttattcgatcggcgataaaatttatgacaagatcggaccggtctgtgagtcttacggaaagacggttctggtgatcggaggaaagagagcgctggaagcggcatatgagaaaattcagaaagcagtggatcagactaatctggtgatcattggaaaagaactgtacggggatgactgcacatatcagaatgtggaacggctgcggaatatgaagctgtatcagctggcggatatggtgtttggtgttggcggcggaaaagcactggatacggtaaagtgtctgtgtatcgcggatgataaaccggtatttacatttccgacgatcgcatcgaactgtgcagcgtgtacttcggtatcgatcatgtacaaggatgacggaacctttttaaaaccgcatttctttatccgtccggcgatgcatgcctttattgatacggagcttatttccaaagcgccggcgcagtatatgtgggcggggattggcgatacctatgcaaaatattatgaggcgacgatttcttcgagaggagaacagctggagcattttgcatctctcggtgtggcactcagcctgatgtgccggaatccgcttctggagtatggtccgaaagcgtatgaagatcataagaaaaagctgtcgacatatgacgtggagcaggttgtcctggcaattgtggtgaccacgggaattacgtcgattttcctaacaaaagatttcacgccggattataacagcggactggcacatgcgatcttttatgcgctgacctcttatccggtgatcgagaaaaatcatctgcatggagaggtggttgggttcggtgtactgctggcacttctggtggatggagaggaaacagaatttgaaaaaatttacgaactgaataagaaaattcatctgccggtgtcactggaagagattgagattacggaagaacagtgggaagaaagtatgaaccggatcccggagatgtccgatgtggcacattacccgtataaagtgacaaaagagatgctttccgaagcgatgagcaagctgaaagagagggtacaggaagatggagaaaaataagaaagcaggatcaatgatcctcggcgttgcatttgtatggtttaccacacatttcggaggaggatttgcctccggtgcacagatatacagttattatgtaagatatggagtctggagccttttcatgccgtttctggcgatggcgtataatggtgtattttttgcatactgtctgtattttgcaagaaagcaccaggtatatgattatcgttcgtataacgatgcgttttacggaaaatatgcaccggtattttccaatctgtttgaagtgttgtatctttgtgtgatgtgtgtggcaccggcggttgcatttgccaccggaggggctacgttaagtacactgaccgggctgccatatctgctttgcacgttacttatcggtgtgtttatctttgtagtggcgatttttggaaccgatctggtgagaaaagtagctttggtgttatctgtatgtattattatcggtcttctggcagtgtatgtgccgaatatcatcgcaggagccggaaaatcgaggagacgatctcggtgatgacggaaagtcctatgccgtttggaaaagcgttgtatgcggctttcttatatggaacctttcagctggcaaatgtagccgtgttcgtacagcatgcaaaatcatttgaaaaaccgaaagatgctgtaaagagtatggcgattggtggtgtggtaaatgcgatcctgatggtgatggttgttctcggaatcatgaccgtatatcggaaccctgagatgagccagcagagtgtgccgacgttattcatggtgcaaaacggtgtaggaaaaagctttctgacaccgctgatctctgtcctgatcatccttggggcggtgtcaacggcggtcaatatggtagccgccatggtacagcggatctgtcatgggctggaaaagagaaaagtgcagaacaaacaggaagaaaagaaaaccattaccggaacacagatactggttgcactggtgtgctgtgtgattgactttggaatcgcgcagttcggattgctgacactgatccagaaggcatacagtattctggcgtatctggcgattccggtgatattgattccgtatgtggtacatatggtgatgacgcggttggataccaggaaaaattaagagagaagagactgtcacaaaaacaggtgacagtctctttttgggtggacagatgggggaattctattataatagattttatagaacagcagtcgggaggaatagcgtggagagattaattttaagtgagcagggttaccgggagcagatggaaaatgttgtggaaccgtatctggatatccgcaagtccgtgctgtggccggaacgggaagaggggaagaaaatctactgtgagcggtatctggcggatagtccgaagggtgtggtgatgatttcccatggatttacggaaactgcggaaaaatataaagaagtgatctattattttgtaaaaaaacagtatcatgtgtatctgccggaatattgtgggcatggaagaagttatcggttgataccggagagttcgctggtgcatgtggacgattatcagcggtatgtagatgattttctgtatgtggcaaagatggcaacaaaagaaaatctgggacttccggtatttttatatggacattccatgggtggaggtctggcggcagcggaggcagcgcaggagccggaacttttcaggaaagtggtgctttcctccccgatgattcgtccggataccggaaatatcccgtggccggtggcaaaacagatcgctttcggtgcgtgccagcagggaaaaggagcggaatatgtagtcggacaacacccgtatgagggacgggaaaacttcgaaaacagttcttccacctgcaaggtgcgttttgaatattatcaggataaaaaagagaaggaaccgttgtttcagacaaacggagcgtcctacagctggctgtatcaggcgggacggctgaaccggtacttgcagcggaaggcgtggaagaagattcaggctccggtgctgatcttccagtcggcggaggaccatctagtgtcaaaaccggaacaggtgcggtttgtagtaaaacttgccagacggggactgacctcgggaaccatgatcatcgtgccgggaacgaaacatgagatctacggatccggaagccggatcctgcgggggtactggaaacggatttttgcgtttctggaagaatctcaggtgaggaagaacagttcgggaaaataaagatacagggtaactattcagtaggtagtattccgcgaggtgttttggcatgaatatattgaacagttacgatacaggaaagtattggtaatacgaggggaaaaagatggcagtcataggaattgatcttggaacaaccaattcgcttggttgtgtctatcgaaacggaaaagcggaactgataccgaatgcatacggctcttatctgacaccgagtgtggtcagtatgatggaagatggacgtctggtggtgggacaaccggcgaaagaccggctgatcgcggagcattttctactggaacatggagttgcaaggcagcagctgcgtgcacaggaatatgcggtgcttctcaaacaggcggaacgatgtaaaaagctgctttccgagcaggacgaggttgtgatgcatgcgacagttggtgatcagctttatgagagtacctatacgatggaccggctgtttgaggagagtaaagctttgttaaaagagatccgtcaggtcatcggaagagcgttaaaagacgggaaaatgacgatccatgatgtggatctggtggtcatggcaggaggatccagcaaaatgccgctgatccagaagtatatccgtcatctgtttcatcaagcaccgatggtgcagagaaattgcgatgaactgatcgcacttggtctgggacttgtgtgcggtgtgaaagagagaaaagaggagattaaaggttatattctgacggatatctgcccgttttctcttggtgttgccacaatcaatgaggcagacccggatcgggcatatatggcaaatatcatcaatcgaaatacggtactgccgtgttcaagagtgcgaagattctatacggcatcggatcagcaggattatgtggttgtggaggtacaccagggagaaaatacttacgcacaggataatctgcttctcgggaagatcgagatatcggttccgccaaaaccaaagggaaaagaggcgatagatgtccgatttacctatgatatcaacggaattctggtggtggatacccgggtggtatctaccggtgttgtaaaaacgcatattatttcccagaaaatcccggaagaggagctggagcagcgcgtccgggaactggagaaactgaaggtgcatccgcgggatctgtcggaaaatcagcagatgctggaacgactggaagcgttgtaccaggaagtgtatccggagcaaaaagatcaggtgcagcagatgatccgtacatttgagggatttctggacggacagaatccgagacagatccagggataccgaaggtatctggagaaagcggtcagcgtgctggaatattatgatccgtttgaggaagaattcgatgcgtcggaggatgactgggatctgtgggacgaagaggaagcacaggatccggatggtgaagaaacgagtgaggaggagttctggaaaaaggaaggggatgatcattcgtggaccagctgacagcataccggatcttacatctgatgccgggaagtacgagaaaagaaatacggcaggcgtatgcacgactggcgaaagaatatcacccggaagaacacccgaaagaatttaaccagattcaggaggcttatcagcttctgaccggccggggggacggagaaaactggtcgtcagatgcgggggatgactggttttcgaagggagaggagacggaacctgacagggaaccggaagaacaatgggaatcttatacgcaggacttcggacacattacagcgtgggaatttctcagatctggattgccggaatcctgttctggctgtcattttttggagtagccacgacagtatctgacaatctgttttcggatgcagataccgggattttcctggcggtcatggtgtggtttgaaagtatgatctggatggtgattcttggcatccgggcgattattttgaaaataaaaaacagaaagaaaggacgatagagtgatgaaattagagatgcatgcacatgactgtgaagtcagccagtgtgcggtgattacggcaaaagatctggtggatggttataaagatgcggggtatgacggaatcgtgattacgaatcattttgaccagatgacgctgcatatcctcggggcaacgccggaggagcagtggaaggcatatatgcgcggttacgagcttgcgaaggaagaaggtgaacgggtaggacttacggtgatcctggggatggaagtccgcctgaactgcggaccggaggattttctggtatacggtgcgacggaggaatttatccgggaacatatggatctgtgtggatgcagccagaaggaactgtatgagatctgtcaggaaaatggctgcgtgctggttcaggcacatccgttccgggaaccatgtaagattcaggatccggcatatctggatggcgtggagcgaaactttaactccggacataacaaccacaatgaaaatctggatgcgtggctgaaagaaccggaaagagagcgtctgatcgtgacaagaggaagcgactgtcattcgacacagcagatcggtctggaggattttgtgatagacggagaagtgaaaaacagcacggaactggcgcaggcgttaaagaagcttgtatgaaaaacatcacgtaaacaacatacatatatcaaaaggagaagaatacgatggagattataaatggcgaaagactggtattgggaacctgttattacccggaacactgggatgagagcctttggcgggatgatctgcgaagaatgttggaaaacggtatcgaggtgatccgaatcgcagagtttgcatggagtaagattgagcggtacgagggagtatttaattatgatttctttgatagatttctggatctggcagaagagatggggatgaaagtgatcttctgtacgccgacagcaactcctccggcatggctgacagaaaaatatccggaagtactgaatgccaacatggacggtgtgctgtaccgtcatggcgcaaggcgacactataattataactccccgaaatatcaggaactgacccggattatcgtggaaaaatctgcctctcactatgcgaagcatccggcaattatcggatggcagattgacaatgagttaaactgcgagaaagatgttttttattccgagagtgatacgattgccttccgtaaatttctggagaaaaaatacgaaaccatcgatgcactgaatgctgcgtggggaacgaatttctggaatcagacgtataacagcttcgaagaggtttatgtgccgagaaccacactgagtaacagtacaaatccgcatgaggtgctggattataccagatttgtatccgacagcgcatgcagatttgcaaaaatgcagagcgatatcatccgcaaatacatcaaaccgggtgattttatcaccaccaacggtctgttcggcaacctggacaaccagagaatgacaaacgagagtctggatttcatcacatatgattcttatccgaactttgcttattgtctggatgcgtacaacaaggataacttcttgaaagaccgtatgtggagccgtaacctgtctgaggttcgtgcggtatccaaaaacttcggtatcatggaacagcagtccggagccaacggatggaataccggtatggcagctccgactccgaagccgggacagatgaccctgtggaccatgcagagtgtggcacatggtgcagactatgtcagctatttccgctggagaacctgtacttacggtactgagatttactggcatggtatcctggattattccggaagagacaaccgcagactggcagaagtcaaatcggttcatgagaaattccagaaactgtctgagattgtaggctccaagtatgaagcaaaagttggtttcctgaaagactatgacaacgcatgggacagccagctggatgtatggcatgaaaaagtagagtggaagagtcagcttggcatcttcgaagctgcacagagaacccatacaccgatggattatatctatctgcgcgacgatgtaaccgcagaagacctgaaaccatatagcgtactgttctacccgcatccggtactgatctcagaggagagaaaagtcgtactggaagagtatgtaaagaatggcggctgcctggttctgggctgcagaagcggatacaaagatatgtacggccgttgtgtcatggacaaactgccgggcaaatttgccgagatgagtggtgtggatattccggaatacacactggtatccccggacaacaaagatatcgtgatcgactgggatggcacgaagctggaagctgctgtatttaacgatcagctggcagcagtgggtgaacatgcagaagttcttggaagatacgagaactgctattatgcaggagaacctggactgattaagaatacttacggagaaggaaccgtatattacttcggcgcagcattctcagagaaaacagcagaagtattcctggagaaactgggtgtgaaagatccacacaaagcaaaactagagatcccggaaacctgcgaactggctgtaagaaagaaagacgataccgagtattgcttcgttctgaactacaaagacgcagaagccgagatccaggtcaaagaagagatgacggatctgtatacaggtgaaaaagtgagcggtacggttgtgctgaaaccgtttgaggtaagagtactgaaataagggtgtgaaaagaggcggtggaaagaaaatccatcgcctcttgaaaaataagatagacaaaaaaatcagcaggtgttaagataactgcaaagcatacgatttccattcattgaggaattcaattatcatttctaaaaacatatcttgattccatattcggagaagtctcaatgcttttatattttcaaaaatcagcagtgagattgcttcatggacggataatcagaatatattcatcttatatgaaaagatctcctgtgcaaaaacaaaaaggaggagattggtgggaaaaaaggataccataaccaaaaattacatgaaggagaacagggttttcgcggatgcctttaactatttactgtacaatgggcagcagatgattcaaccggaaaaactgagggaaatcgacacaacagaaatggcgattctgcagggtggtgatcagaaacatcaggattcggaaacggtacaaaaatatagggatatattgaagaaaaccgtagtgaaggaggatggggagacggtgtatcttctgcttggtgttgaaaatcagacggatatccattatgcgatgccggtaagaaatctgatctatgatgcgcttcagtatggaaaacaggtaagtgatattacggcagaaaaccgaaagacagggaagaaaagatcaggtggagagtatttatctgggttttataaagaagataagctcacgccggtaatcacgctggtgattcattttggtacggagttatgggacggaccggaatcattacatgaaatgctgcgtgtaaatgataaaaaaatactggattatattccggactatcgaattcatctgatcgatcccgcacgtttgacaaaagagcagctggaactgtttcagacgagtcttcgagaagtgctgggatgcataaaatatgcaaaagataaagaaggattaaaggaatatataacagaaaatactcgaatgtatatggaaaatgcggcggcgcaggtaataaaagcgataacaaatacaccgattacaatatcagaagaagaggaggaaattaatgtgtgtcaggcagtagatgaaatgattgaagatggaagagcagaaggcagaatgcaagcatatgcaggtcttataaaggatggcctgctctccgtgaaagaagccgctttgcgaatgcacatgacggaagaaaaatttgtagaagagatggaaaaagtgaatgaaaagtcctgaaagatattccggttttgacggaaacgttgtacactgggttataagagaaactgtacaaatgcagtagttattgggaggtagaaagctatggagtttcaggcaaaatggatccggacttcggaagagaccggtggggtgtgtccggtttttcgaaagggatggaagacagaaaggaaggtagaacgtgcgacgttatatctgacggcgctgggtgtgtatgaggcacatttgaatggaaaacgagttggaaagtatgtgctggcgcctgggtggacggcttatgataaaagattgcagtaccaggaatatgacattacagatctgttgagagaggagaatgaactgaccgtaacactcggaaaaggctggtttcgttcgccgatgcccggatgggaagatgcaccggacaagctgcagcgcataggccgtccgggaggtattcttggagaagtgcatattgtatacatggatggaagcgaagaagtgatcggaacggatcagagctggacgtggggagaaagtgggattcgtttcagtgagatttatgacggggagacctgtgatgccacttttgtgacgaaagagtggaatacagtaaaagaattcgcatggtcaaaagagattctgattccgcaggaaggggaagagatccgggagcaggaagtggtgacagcaaaatctgttttccgcacaccggcaggagaaatggttgttgatttcgggcaggaaatcaccggatatgtggagtttaccgtggacgctcatgcaggtgacaggatccatatccttcatggagaagttctggatgcagaaagaaatttctacaatgcaaattacagaagtgcaaaagcggagataacttatatctgcagtgagggaacacagacctggcatccggcactgacgttctttggttttcagtatcttttactggatgaatttccgggagaagcaacgccggaacagttccggggaatcgcggtgtattccgatatccgaaagacaggagaaatccagacttcggatccggctctgaatcagctgatctccaatattttctggggacagagagataacttcctggatgtgccgaccgactgcccgcagcgtgacgaacggcttggatggaccggggatgcgcaggtatttaccaagactgcaagctataattttgatgtggagcgattctttacgaaatggctgcatgatctggcagcggatcagatggagaatggcgcagtcggtcatgtggttccggattatctggttggcggaaatgccagtgccgcctgggcggatgcggcaacgatctgtccgtggcagatttatcagacatatggcaatccacagatcctgaaagatcagtttaccagcatgaaaaagtgggtggattatgtgacggatcacacaacaaccccatgtctgtggactggtggagaacacttcggcgactggctcggtctggatgcaccgcagggaagctataagggatcgagcagagaagattttatcgcttcagcattttatgcacattcgacagaacttgtggtaaaggcagggcatgtgatcggggaagatgtgacggcatacgaggcgcttcatgaaaacatcgtggagaccttccgaaacacttatccggagtaccggacacagacggaacatattctggcggtgcagttcggactggcggaggactgtcagaaaacagcagatgcactggcacaaatgatccgagatgacggctgccagatgcggaccggattcgtcggaacgccttatattctgcatgtactgagcaattacggacatacggatcttgcctatacactgttatgcagaaaagaatatccgtcctggctgtatgccgtgggaaaaggtgcgacaacgatctgggaacattgggatggcatcatggaaaacggagagttctggagtactgatatgaattcatttaaccactacgcatacggctctgtggcagactggatctatgaacaggcggcaggtatccgggtagtggaggaacatccgggatttgaaaaagcgtggatccagccaaaaccgggagatcagctggagtggctgggagcatcgattgagaccagacacggaaagatcagctcccggtggacgcacacagacggtgtgattcggtacgagattgtaacaccggttccggcgcagattgtaatcggaaaaaaagaatatgctgtggggccaggaaagtatattttctgggaataacaaacataggcagaaaaacatataaaacaggaagcgaaaattttttcgcttcctgaagtaaaaatcatttattttttagagagagccagtataatcgctgttaaatgaacaagggtctctttatctattttagtcaatgcttccaataattgccgcgtagtatccggcgattcattgtcataatcaaaaaattcttttggagtaattcccaaatattcacagatgtagaaaaaaactgttatagaaggaaaattatgtccgttttcaatattgttgatgtaccctgcattttgtccaagtgaaaggctcatatctctggcagagactcctttttcctgtcgaagagcactaagtcgtttggcaaagtcttcttcttgcatatcagtgtatcacctccatacataacccaaatataaatatagcatttaatatgacagatatccgattgaagaagtaaatatccgaatattagaagcaagtagctatattttacaccatacaaaaacttaaatgtcagatttaacacgacattaatggtattatcatttattaaacaggatattcggaaagggttaataaatataaaaaataaataaaatttacctgtcggataaaatcatgggaaaatccttaaagatatagtatttaatctgatataatttaaataataatttattaaacatgatacaacgcgtataatattataaaaaaagtataaagaagtcgaaacagatacctgaatatagaagaaacaggagaaaggaagatacaaaggataaaaatatgagatatcttatggcagatcatacggatgtagggatcaaaaaaaagacaaatcaggattcttacatgataaaagaagcacagacaaaacttggaagagtatttttctgtgttttgtgtgatggtatgggcggattggcaaacggagaattagccagtgccaccgtgatacgagcgatggaacaatggtttgagacagattttcctcagatactccgtcaggtcacggatgttgaggagattctggaaaaagtaaaaaataactggtacggaacagcgaacgcactgaatctgcaactggcacagtatgtggaaggaaccggtaagcggatggggactacgattgttgcgctgctcatgataaaaaatgaatattttatcatgaatgttggagattccagggcgtatgcgatcagcaatcaggtataccagctgacgaaagatcagagcctggtgcagcagcagattgatctgggacgggttcgtccggaggatgcggaaagacatccgcagagaaatgttctgttacagtgtatcggagcatcggaggaggttcttcctgatttttaccggggaactgttttgccgggaacccttttccttttgtgcagtgatggattccggcatgagatcagtgaacaggagttatttatgcagttaaatccttccggattggtgaatgaggaaaaaatgaaagaacggcttgtatatctgacagaactggtgaagtccagaatggagatggataatatctcggctgttgcgatcaaggctgcgcaggaggggtaaagatgctggaaataggatctgtcatagatggaaaatacaagatactgagccagattggtcagggtggaatgagtgttgtatatctggcactgaatgaacgtgccaataagacatgggcgatcaaagaggtcagaaaagacggtgtgcaggattttgccacagtcaaacagggactgatcgcagaaaccgatacgttaaagcaactgaatcacaaatatctgccaagtatcatcgatgttattgatgatgaggatactttcctgattgttatggactatatcgagggaaaatccctgaataaagtcctgaaagaaagcatggaacagaccggactgccgatcgggattgaagatgtgctctcctggggcattcagctgtgtgatgtgctgaattacctgcatacgagggaacagccgattgtgtaccgtgacctgaaaccatcgaacattatgctgcggccgaacggtgagatcacactgatcgattttggtacggcaagagaatttaaaatagaaaatatagaagataccacaagtctcggaacgcccggttatgcggcaccggaacagtatggaagtcagaatcacaagggaaaagcccgtccgcagagcgacatttactgtctgggagcaacgctgcatcatctgatcaccggacggaatccggcggaatcgccgtttcattttctgccgatcacacagtgcaggaaaacgcttttggaggagacaccgagagaattccgcaatgaactgctcggacttgagatgattcttaccaaatgtacacagcaggagccggaacagcggtatcagaactgtgcacagctgcaatatgatctggaacatccggaagaactgggactgccgtacagacggaaactgaaaaacaagatgcttgcattttctgcaagtctggcactggcggctgtgctgggagcaggatctctgaccggcgcggcactggcaaagaacacagagacatccgggtacgactattatgtggagagcgcacagacagcatcgacacaggagaaactcagctgttataaaaaagcgattgcactgaatccggaagcggaagatgcgtggctgggactggtgaatgccgtcggggaagacaatacattcacctccgaggaggacagctacattctttctatattaagttcccgggacaacggaagaatgaaagacaataaaacactgtttcagaaaaatgaggcgggatatgtacggtttgcctataacatgggtatgctctattactatacggaaggaaccggacagaacaaggcatctgccggaggttggtttgatatcgtaagcaaggcagatctgaacagtctgaatctcggcgaggatgaagataagaagaacgcatggaagacgagatcggatattctgggtaagatcagtgcgtataacagtaagatcggacagacaaaccaggcgggggacgcgcaggtttcctataaagattactgggaagatctgatggctctgatgagtgatgatatcgcgggacaggataatgtgatcacagaacttcgtctgtacaacgagatcgtatatcagatttgtacccattatgatgcattccgggaagcaggtcttacacagaatgagatgcaagaagcacttgaccggatcacggaagcggtaaatgcggcggacgtgacagacaatccggtggcaaaggaactgaaagaaaatattctggatgctgccgttcttggagaaaagcagattcaggcaatgtttgcggcaaatgcggtaacaccttctgaaggaggtgaggaatgatgacagtagtagcaacagctgtgcagggatttgaagagaaatacgccttttacagaaatatttttctgtactgcggaattgcagcactggtttttttggcaattgccatcattttattcttcgcattgcgaattccgcaggtcttcggtgaactgactggaagaactgcgcggaaagcagtggaggaaatggtcagcgggcagacaccgaccgtgaggaaaaagaccgctaaaaaaacaaaaagaaagacagacacaaagcgaccggaaatcgaagccgggcagaaaaaacaggtctacagcgatctgatcggagaaaatgacacaccggtccggctggtcacacacgatgacctaccaacgccaactctgatgccgatgagagaagaagaaacagagatgctggacggaactgtggcagaaggcgagacagaagtactcgaaacggtttctttagaagcgggcgaaccggagacggatgtattacaccatgatgtggacttcgtggtgatacggagtctcgtggagattcatacggatgaggtaatcgggatatgagaaagagaaaacggaaaactttaaaatatatgagattatcgctcctttgtttcggacttcatgcctgctccctttttctggagccgtttgcaatcaatggagaaaatgaaatgacgactgcggggtatgcacttggagggatcttctgggcatcgcttctggcggggacagttctttttgaaatctgtcggaggaacctgtcaggagatgccggttaccgggagtggaaacagaagaaggttccgggaatctttggattctttcgaaccaaggcagcacggattgtggatccgatcctgttactgtcaatggtcatcaccatcgtgagcaatctgacgggaaacatcccggaggggcttcttctggtggttctggctgttatggtattcactttttatctgcacatgatggtaaatggcagagtttacagatatatgacactaagtgaaaggaaggaaaagaaaagtgaaaacaaagaaaattaagagggtactggcatttttcctggcagtggtcttcgccttttctacctgtatgacggcaagtccgtatacggtacaggcaacggaggagccgaagctttcggtgaatgtaaccctggaggatggtgtatcgacagaggatctgatttttgatggtctgaatctggaatttacggacagaaatgatcaggaaataggaagtatcagtattgcgaaagaagatctgggaacaacaaaaactacagagattttgtattctaaaatttctgatatcagcaatattataatcacggatacaaaacaattatatactgtgactacatcagaagcggattttgatgatgaaacgcatacaatggcgctggaaattcagagtttcagtgtgaatacaagtgagaacagcatctcaggagcagacagtgtatatgcagaggatacaaattccttttctgtacagggaacatggggatcatatattgacgaatgggtaattgaagataacgctgcaaaagcggaattttcagatggtaagaatacgaatacaagctgtgtaattaaagcagcaaatggaaacgaaacagcatttacccttatagccaaagcaaagggaaatgagattgcaagaaaacagatagatgttatccggaaagacacaaatcttgaggtgacatgtagtaatgagttacagtcatggggcactccggtaaaagttacttttaaactgacttctaacggacaggcagttgcgggaaaacagattcaatatcagtatatagacggaaagaacaatcagataacaggaacgtgcccggaactgacaaatgaagaaggtgtgacaactgcggaaattaccttaaatggttatcagagcacagttgaggtgaccggaagttttgtaggagatgaggtatataaagactgtaagaattctgatacatataggccgaataaggaagaaggaactatggagtttgacagagaaaacagtcctgttgaacagttagaactgacttatggaacggatgctacagaactcacgatcaaattacaacataaaacggataatattgaggaaccttttagttctattaatattaactatacagcggattcaaatatcagtgtaacttcgaatccggaggagagaacactgacaattacaccgcttaaagtttctgatgaagagattccggtaacaattgatgcagaaacagaaagttatatgtttacaaaaacaatctatgtaaaagtaaaaccgtatccactagctgtgaaagaaggaagtgttcacgtttttgcgcctggaaaagcaaatctggaaaatgcggttgaggatgtgaaaatctacgatggcacatcaacggtagatgtaaaagcaacgttagtagatgcacaagtaaaaggtataactccgacaacggaaacaaaagacgagattaaattatttcaggagattgtttttggaggctatgacagcaaactgaaaaatgttcagggtgaggaagagaaacagaatatgatgtttgctccgaaaaatctcagtacggtatcaaatttgcgggaagatctgaaaacaaattataagatcgaggaagtggaaatggaggttccgctgacgattcagaaacgaacactgaagcttggtgtgcgaggtgtaagcagaggattccgtgatctgaaatatgtgtatgaaaacgaagaggagacagaggggaaagatctgaaagacctgaatctggtttttgcaaccggttttgtgaacggacaggatgaagacaaattaaaagtagaaggttttaagtttccgaaggtagtggatacaacagctacggatctgacagaggaaaatgtaaaggaaaaggatacggcagaatacggtaaacatacaggcgctttagtgttgcaggaagaagatcagataacaaatccgacaaacaattacaaatttgatctgacagcaaccggaacactggaaattacaggagaaaaagacgctgctgggtatctgtctgttgataacattaatagtacccatgcatatgaagcaggtggaaagcgttactatggaaagaatgcaaatggaaagaatgcaacggttcggttttctgaaactggtggatacaacagggtttactgggtcaatggaaaagataaaacggatgtcacggattccggtctggaaatgaaggaaaataacgacatcaaccgtactttttatctgagaaaagtggatgaaagtggaaagattcttgcacaaacggaggaatttgaacttcaatttatatacgatgcagagcctccagaatgtggcattacgtttgacaaagataccaaaaatgtagttcgtaacatagaacaggcagttacttttggattttataaaaaagatacaatagaagcaaatgtgacactcagtgatacgcaatcaggtgtgaatgaaatgtcttaccttgtagtgaatacttctgaggataaaaatcactattgggaattattgacaacggaagaggactatgaaactgcgctaagtaaagtgaagttcgagagtggggaaggattaaaaacatctggaaaagaaaactcatggacaatcaaaaatattggaaaattgaaagggggagaggacctcgaatgtaacaattatattgtctttgtaaaagcagaagataatgtaggaaatgtaaaaatctacggatctaacggtgtcgttctggaaaataacacacaagatatttcagtaacctacaaagagaccccagagaaaaatgatgatggtaaaaatggcaaatatggggatacagatgtggtctattatacgggaaatgtcactttgcatatgcaagcagatgaaagtggatctgtttactcaggactcacacagatgggatatcaggtgtctaatatcgatggaaaaggtaacaagaccacaaacgaattcgtttcctatccagaagataaacaatttcctaagaatgtaacactcgaaaagctgaacaattatcgcaaaatcgaagaggatctgtactttgaaagtgataaagatagctctcaggtgattacggttattgcaccagccagtgagacgaaagataatgcaggaaatactatggaaaacgatgcagtccataccctggttattgattctaagccaccgacagttgaagccgaatatacacagaaaaatctgaatgaaaataacgaacaacgtttcagaaacaaaaaatatgcaaacagcgatgtgacttataccgtcacagtgacggaacgctttttaacagacataaaagtttgcattaacggaaaagcttattcgtttgataaactgaagaaaaataaagagagtctcggtatcaaagaaataacaaaaaatgaactgccggatattaccaaaacaacggatcagacaaagtatgattttagtattgtatttaataaagatggtaaatataaagtaaagacaattgcaacggatgcagcagggaataaggggtatgatgctggagacattgatgaaaataataacaacggattcgaatttatcatcgacaccgtagcaccaacccttgatcttacttacacagccaaacaaaacaacacagaaacccagcttgcgctggatccgaaatatgactggtttggagcgaacaatgcaacagcaggtgacaatggtacgattggtattacggctgttctgaccgaagaaaacttctcagctgaatttgcagacatcgctgtggaagcgacagacagtaccggggtggcagttgatattaccgattataaaaatgctgtaacgaaggcagtcaaaacacaggaaagatggacagagagcaatacggatgagggcagaaaatatacgctcgcacttccggagatcgcagtggatgcaaattataaaatcacctatagctgtacagacctggcgggtaattcgttagaaaagattacagatcatgtgacactggaccgtaagaatccggaaggagaagtaaaagcagaagatctggagaataacggatcatcggcgcagatctggaacagtctgatagaaaccatcacctttggatactttggaaagaacaacgtgcgggtgtctatgacaagccaggatgcgacttccggagtggaatccacacagtatctgaaatcagcagatggactgacaagagaagaactggaaaaccgcacggactggacaccgtatgtttccggtctgtcgtatgcggcaaaccagcaccttgtagtatatgaaaaagttactgacaaagtgggcaatacagaatacttcagcaccgatggaatcattgttgacaataccagtccggtaccggttgttatgatcacaccgaccagtccgggatggggaaaaggcgtttacagtgcaggcgatcatccgggattcagtattcgtgtggaagatccgattgtaaatgacgcgtatgccggattgaaaaagatcacctatcggatcgagaacggaacgaccggatatgtggaaagcaatacactggcagatgaaaataccggtttatccaaggcagcacaccagaaagtatggaccggtcaggtgtcgattgatccgaacctgttctattccaacgatgtgaaagtcagtgtgtacgctgaagactggtcagcgaacagcgtgacatcacagccacaaacactcaaagtcgataacaaagcaccgattgtaagtttcagctttgataagagcgatgtacataatggaaaatattacaaaaacgataagacactgacgatcacggtagatgagagaaacttcgatgagtcctatttgccgagagtaacttccaccacgggaggcggatacagtatcagcggatggagccataacggagagctccataccgcaaccgttacgttctccggtgacagtgattatacggtaagttatgactgttacgatcttgcaggaaacaaatccaacaccgaaaatctggaagaatttacggtggataagactgttccggttatcaaagtttcttataacaataacagtgcgcagaacggcaattactacaaagcagcaaggacagcgaccattaccgtaacggaacacaactttgacccgtcaaagatcaccgtgtccacgacggcttccgcaggcggtgcaccttccatcggtggatgggcaaacagtggagatacacataccgccaatgtggtattcaatcatgatgcagattatacctttaccgtcagcggactggatcttgcagacaacaaagccgcagattatgcacaggataaatttactgtggatctgaagaatccggaagtgaagatcaccggtgtaaaagacaaatcggcaaacaacggtacggtagccccgcggatcagtatttctgatacgaactttattgcaagtggcgtaaagatcacactgaagggtgtcaataaaggagaaatcaagattgattctctggcaagtatctcaagcagtgcaatcggcatgaatgtcatctttaaggatttcccggagggtatggatgatatctatacgctgactgcgaaagcaaccgataaagcaggaaatgagacaaaatcttcgatcacattctctgtaaaccgtgacggttctacctatgaacttggcagcggtacaaaagcgctggttgacaagaaatatacaaacaaaccacaggatttggaaatcacggagattaacgtagatgatctgacaacgatcgagatcacctacagtctggatggaaaaatcgttaccctgaaagaaggcgaagattacaccatcacaaaatccggtgaagagggacagtggaagaaatatctgtaccggatcaaagcttcctgttttgaagaggaaggaaattatgtgatcaatatctactctgaagatgcggcacataactctaccaccaacaagacaaaagcaaagacgattgcatttaccgtagataagaccgcgccgacgatggttgtatccaacctgaccgacagaggccgttacaaagaaaacatgcatgagttcactctgaatgtgaaagacaatatcttcctggcttatgtggaagtatatctggacggggaactgttcaaacgttttgaagaagatgagattgcacagctgaacggagaacttccggtagatattgccagcagcaaccagtatcagactatcgaactggtatcgtgtgacaaagccggtaatatctcaaaagaggtatacgatccggagaccaatgcacaggtgccggcttcttaccgggtactggtaacacagaacagctttgtacagtttatcaacaataccccgttactggtcagcgtgatcgtgatcatcgttgccatcgcagggatgatcgttgtactggtgaaacggaagaaagacaaagagaaataaaacatcgcagataaaagcaaagagacgggcaggagcatgaaaatgcccctgcccgttatgaaaaaggagacagcttatgatccaggaagacagagcattatggaaatatatagtatttggactattaacctgtggaatctataacttttattttatctataagatggcgcaggatgtcaatgaaatgtgtacgggtgacgggaagaagaccagtggtctggttgcatttatcctgttgtcttatctgacctgtggaatctatccgttgatctggtactactctctgggcaatcgtctggcagaaaatgcaccgcgctacggactgaattttcaggaaaacggaacgaccgttcttatgtggcatatcttcggtatgctcttatgcggacttggcgcttatatcgccatgaatattctgattaaaaatacgaatgcaatggcaaaagcgtataacggtggtcagaaaagggaaccggatcagatagaaagcgttacagaggttccggtaagaaccgtgtaccagcagaacagttatacggaacgcgaaaccacgatgctgtctatggaacaggcacaaaagcaggcagcgtcacagatgccgccgagaggggtgctttactttgtacagacacagcagagtgttaccgtggacaaagacgagttccggattggtaaaaatgcgggcatgtctgattatgtgatcaccaacaacagttttgtaagccgccagcatgcggtaatccagcgaagaaacggacagttctttgtgacagatctcggatcaacgaaatgaagacattttttctttcctgatttgtcagatcacgaatgtcattgttgacgatgtcggctgcaagaagagaagtaaaacggagccagtttgtttttgcagaattaaggaaacggtaaaaagtgttcttagaaaaatcttccttaaaagagccggttcgttgctgcatatacatacttcttccgacaaaaatgttgctgagtttgtaacgaagcagagaaacaggtgaaatacctttttctttcattccgttgcatttggcaagaagtttgccgacatgatgtttggaaaaaaatctctgaacacagtcaattaagttgttctcatcgaaatggttttgtagtatactggacatggcataaatctcctttgtaaagatggtttctagtcaactccattataccaaagtgaacaggtttatgcctttttattggctgaaatattgaattttcaaggttcaacacaccatatcggtgtgggaagttttagttagtaagtaagaaaaaataataactgctatagtggtcatgctgctaattgcgataggcttagaactatagttgattgtcagcagagattaacaacttttttgatttttatgaaagtgctttgcttaaaattaggacagactgcactgtttgactgccaatttagaatcatgggtcaaatgattgcgcttaggcatggaaggaatgatatacaggcttttgaaaaagtaatgacattaagcaaagcggaaataatcgacaatccagagccggcgtccagaataattgaagcatttaattagtatgtgacgaagatcctgaattactttaacgatacggaaggattttcactgacaggatttgaaacactgatccgcgaactgaaaaatcaaagggtaccggtacagacacaggaaagtccgacgatgtcggttctgcttactccgcaaaatcagagcgtgccggtacagaatccgatacctccaatgcgggaggctgaggaacttctgacagttccgctggtacagcagacaccgaaggtacaggagataccgccggttcagcaggatacgacatatgatccgggaaccacgatgttgaatgcaggagcggcaccggccggtggttatacacaacattatgtgaatccgaaccttacccacagccagagttcgataccggtatccggtggaaatattccaaaaacctatccgggaacaaaacaggaggagtttgataatgtgccacagccggaacagcagaaagaagaagcaccggtaaaggaaaagaagggaattttcggaagaaaaaggagagaaaccacagaaaacaggactcttcgggaaaaaagaaaaaaccaagagtacagctgtttcaaaagaggaaacaccgaacagaccaaaaagttttcatgggatagcaattcccggttctgatgtggttccacaacaggaaaatacggcaacaacggcgacagtgattccggcgcagaatgtatccattccggttcatgcagcgccgattcagaattttggtgatacggtagatctgcaatcctatacaaatgccacacagcacacagtagctccggcagcgatgaagaatccgtgtctgatccgcaaggaaaccagggaacagttctttctgaaaaaagaggtgaacagggtagggcgaagccgtgaaaatgtggatgtttatattacggataatacaagtatcggatgggtacatgcggtcttatatctgcgaaacggacgggtctttgtggaagatcagaactccagaaatggaactttcttaaatgggcatcgggtgatcggacaagaagaacttgtgccgggtgcgagtctgcgtctgagcaatgaagagtttgagattacatttttataaagcataagcaagggagaatgtcacgaaatgtcaggtgacattctttttttgtaaagaatgaaacctgttgaatacaggaatattccccatcaaaaagcaacatcacatatttcttttctatctcttgtcctgtatagtaaagataaaagcagaacgatcatcaggaggaaatacaatgggatatacatataacaaaaactatctgataaaagacgataaaccctggttcccggtcatgggagagtttcactacagtcgttaccgggatgatctttgggaggaatcattgcggaagatgaaagcaggaggagttacggtagttgccacctatgcattctggatccaccatgaggaagaggaaagcgtatatgattttaccggatgccggaatgttggaaagtttctggctatctgtaagaaactggatcttccggtgttcctgcggatcggaccatggtgccatggagaagtgcgaaacggtggatttccggactggctgctggaaaagcagatcccgcttcgctgcgatgattcggcgtatcttgcgctggcgagacggtactgggaggcgctgtatcagcaggtaaaagggcagatgtatgaggacggcggaccggtcatcgggatccagattgaaaatgaatatggtcatgtaggcggtcagaccggagaagccggtgagcagcatatgcggaccttacagaagatggcaaaagagattggcttttgcgtgccattgtatacagcgaccggctggggcggtgcggtgacgggcggtatgcttccggtgatggcagggtactgtgaggcaccgtgggacagccggttgacggaactggaagcaaatgagaactatgtatttaccggcaaccgaaacgatacactggtggcaaatgatcatcatgtttcggaacagctgacctttgatccggcagaatttccttatcttacggcagaacttggcggcggactgcagcctacggagcaccgaagaccggttccggtaggaaccgatatcggagcaatgtcactgacaaaacttggttccggggtggcgatgcttgggtactatatgtatcacggaggaacgaatcccaaaggaaaattctctacgctggaagagagtaaggctacaggatatccgaataatgtatcggtactgagttatgatttccgtgcaccgatccgacagttcgggcaggtctcagatacttataaagagattaagctgctggcactgtttgcgaaagactttggacaggatctggtgacacttccggcggaaatcgatctggtgggtgtggacccggaagatatgcacacgctgcgtctgtcctggcggcatgatgacgatcatgggtatgtgttctttaataactatcagagaaaacgctggatggatgcgcataacggtgtgacactggaaggcagatgcaaagaagcaccggtggagtttccgaagctggatcttttgccgggaagctatggatttttcccgtatcatttccgggaaggagacggggaactgctctcggcaaatgcaacaccgctttgcagactgcggggagaagacggaacatcgtgtgtggtattttacggtgattgggatcctgcatttgtgtggaaggatgaaaagcattttccggtgcttcatctggaccgggaacgtgcactgcaggcgtggaaagtgacgctggatcgggagtatctgatcctttcggatgactatgtgtgggaggaagatggaaagctgcacatagaaggagggaaggagacggtgatccggtgttatccgaaactgaaagatttttcggttcttccggatggtttcgaagcgtgtggtctggatcacgagtttaccctgtatcggagaagagaaaaagcggaggataccagggtaaccgtgacagaaggaactgttggcgaggattcacggatctacaacctgaaaataacttcaccggaaacctggcgggatacgatactctctctggacttcggcggagacaaaatagagattttccgggatggcgagatgctcaccgacagctactacaccggcgagccggtacagatcagcctgcgctactttgatttcccacaagaattgcaggtaaagatctaccccctgaaagaagacgccccaagattcctggaacgctggccacagatgaaagacgggtgtgcgtgtgagttgtatggagttggagtgaagaatctggtgtggtaaatgtaaagatgtaaactgaaaaaaaggaaagttgttgataatattcttgtggcacaactttccttttttgttacagtgcatatcaataattggtccagtggatcaattttgattattatatccttgcacagaaaacagatttgagataaaatgtttaaaaggtttaaaataaaccgttgtcaactgaactataaaaaccgttgtgatgaacagatagggggcttctacatgaatgtaaaatccatagatatcgccagggcacttggcatctctaaatccactgtatctctggcattgaatggaaaaccgggcgtgagtgaacagacacggcaggaagtcctcgcatgtaagaaacagctggaagagcatggggtagtgccgccgggaatgttttcgagacagccggaacaaagaaaaagacagcagatcaagattgtcaaaattacaaatggaatgaaaaatatacagggagctgagctggatctctggacagatgtgaatcaggtatttgagaaaaatctgcaagcaaatggatattcgcttggattactgtatgcagatttcagggaggaagatcagtcccgcatgattgccgaatgtaatgcggatgatgtggcgggtgtaattattttcggaacggaattaaaacaggaaaacagtccgttgcttgacggaatccgaaaaccgttggtgatttacgatgcggcgccggacattgaaaaatatccggtgattctgatcgataaccgtcagggagtagaacttgcggtgaacgaacttctggcgaaaggaaatacagatattcagtatctgtgtaatccattaccgatgtataattatctgagccggcgcagaggttttcaggaaattatgaaacagaaggggctgggagatgcttctgatcgtatcatcaatacgggaagcagtatagaagaagttcatcagatgatgcgagagtatctaaaaacagcaaagctgcctcaggcatatattatggagagttatcatgtttccatgggaacgattatggcaatgcatgaattgaatattcgtattccggaagatgtgagtctgatcggtattgatgctctgccaagttttctcaccggaggcattgatatgacaagtatccgtgtcccccatacagaaagagcatactgggcaatacagttgttattgaaggaaatagaacacccggtaaaagaaaaatgtaagttgtatacaaattgtgtgtttgtagatggtgaaacagttaagaaaagataaaagagaacagtaagtgaaaaagttcagattccgtgtgggaagctgaacttttttcttactttacaggaaagcaatttcctgtaaagtaagaaacgctccgcgaggatgtaccgaggcacattcttagttctatggacaatgagcaaagacatatatttacggaaaaagttgaaaatgaaaatgaaaaggtttaaaatacaaacaaaaaataaataaaataaacatatatttaaataaaagaggaagaatatgagaagatacaattatgaaaaacaggtggaaaaatgggatgttctggaagtgactgtagaaggtcattctgataagaacccatttgtagattatgagattcaaggaatctttacaggaaaacatgagacagtaactgtggacggattttatgacggagaaggtgtgtacaaagtaagatatatgccgtctttcgtggaattatatacattcgaagtgacagggagcgcgatagacggggaagtgctcaccgggaaatttcaggtaacaccggcgagcgaggaaaatcacggaccgatccgtgtggcaaatacctatcattttgcctacgaagacagaacgccgtattattccatcggcacaacctgttatgtgtgggcagagcgcggtttcagatgctgcagtcaaaaggtattttgcccctgaaaaagaggcgtcattgcttttatgtgaagaacatcacagagagcaatggcgctttttgaattggcaggaaaaggccttttctttgttattaagtagtcacatcaggtataccagatgtagtgacatagaaagatgaaacacgatatgttgataaaaaatattgtcacatgagaaaagttcgttaaaataacgacaaatagcactaaaataaaatatttattgtgcaaaatgataaaataaagtataatagtgataatgacatctgtataaaatgcaaaagtgaacggcagcaatatggaggttgaaactgcggtttgcgcaaaactgttcagaggggaaactgaacaggtacggaaagttatcgaaatcaaaaaagaaaagggcaatgaagtgaaaggaggaaactacatgctggatcaatcttattaccagaaaacggatgagattatcgaacactacggccgcaaggcagcttccctgatcccgatcatgcaggatattcaggcagaatatcgttatctgccgggagaactgcttacttatgtggcaaaagaaatcggagtcaaagaggcaaaagcctacagtgtggcgacattctatgaaaacttttcctttgaaccgaaaggaaaatacgtgatcaaggtctgtgacggaacagcctgtcatgtaagaaaatccatgccggtaaaagaagctttgatgaaagaactgggactcagtaataagaaacacacaacggatgatatgttatttaccgtagagaccgtatcctgtctgggggcttgtggactggcgccgactctgaccgtgaatgacgaagtacatccgaagatgacaccggaaaaagctatcgagctgttaaatgaattgagaggagaaagcgtatgagtataaattgccgtgaagatctgttaaacagacaggcaaaggtaaatgaagaaatcaaatcgtatacctgtcgcgttcttgtctgttccggtaccggctgtatcgcatccggtgctcagaaaatttatgaagaaatggaaatcctgtgtcgggatatcgacggtgtcaccgtggagatgcagaaagatgttccacatatcggagtcatcaaaacaggttgccagggtctgtgtgaactgggacctctgatgcgtgtcgaaccatataattatcagtatgtacatgtacagccggaagactgtaaagaaatcgtagagcgtacgattctggaaggacagccggtagagagactgttttaccgggatcatgagacggtctgtccgcatccggacgatattccgttcctgaatcagcagacacgtattgttctggaaaactgtggaaagatcgatgcagagtcgatcgacgaatatatcgcagccggcggttatcaggcgctggcaaaagcacttggctccatgactccgcaggatgtgatcgaagaagttacaaaatcaggacttcgcggacgtggcggtgcgggattccctgcagggaaaaaatggtcacaggtagcccgtcagaaagaaaaagtacgatatgtggtgtgtaacggtgatgagggtgatccgggtgcgttcatggatggctctgtaatggaaggtgatccgtataagatgatcgaaggtatgaccatcgccgcttatgcagtaggtgcagaagatggatatatctacgtgcgtgcagagtatccattatccgtaaaacgtctgcgcatggcgatcgaacaggcagaggcaaatggtctgttaggtgatcatatccttggttcggatgtgaacttccatctgcatatcaaccgtggtgcaggtgcttttgtatgtggtgagggatcggctctgacggcatccatcgaaggaaacagaggtatgccgcgtgtaaaaccaccgcgtaccgttgaaaaaggtctgtgggaaaaaccgaccgtgctgaataacgtagaaacttatgccaacgtaccgaggatcattctggaaggtgcagattggtttagaaccatcggtaccgagggaagcccgggaaccaagaccttctcgctgaccggtgcgattgaaaatactggtctgatcgaagttccgatgggaacgacgcttcgtcatatcatctatgatatcggcggtggtttgaagagtggtgcagcatttaagggggtacagatcggtggaccgtccggcggatgtctgatcctggatcagctggatgcgcctctggactttgattcggtaaagaaactggatgccatcatgggatccggtggactggtagtcatggatgaaaacacctgtatggtagaagtagcccgtttctttatgaactttacccagcgtgaaagctgtggaaaatgtgttccgtgccgagagggaaccaaacgtatgctggagatcctggagcggatcgtagacggcaagggtgagatgtcagatctcgatgagctggaagaactggcgcacatggtacagagtatggctctgtgcggtcttggaaagagtgcgccgcttccgatcatcagtaccctgaaccggttccgcgacgaatacgttgaacatatccgtgataaaaagtgccacgcaaaagtatgtacggctctgcgtcagttccatatcaattccgagttctgtatcggctgtggaaaatgtgcgaagaactgtccggcgggagcgattaccggagctatcaagcatccgcatcagatcgacaataatctgtgtatcaagtgtggtgcctgtaaagataactgtaactttaatgcagtatatgtggaaatgtaggaaggagggtgtcttatgagtcatatgatcatcgatggaagaaaagttgaatttacggatgagaaaaatgtcctgtcagtgatccgaaaggcgggtatcaatatcccgacactgtgttaccactccgagctttccacatttggtgcctgtcgtctgtgtaccgtggaagatgacagaggaaagatgtttgcatcctgttcggaagagccgagagacggcatggtgatccataccaattccggacgtatcagaaaatacagaaaactcatcgtggaactgcttctggcagcacactgccgtgactgtaccacctgtgtaaagagtggagaatgtgttctgcaggaactggcacatcgtctgggggttgaaaatgtccggttccagaatacgagagaacagagagaactggatctgagttccccgtctctggtgagagatccgaataaatgtatcctttgtggaaactgtgtccgcgcctgtgaagaactgcagggtatcggtgctcttggatttgcattccgtggtaccgaagcgatggttatgccggcgtttgaccggaagatttccacaacggactgtgtaaactgtggtcagtgtagagtattctgtccgaccggagctatttctatccgaaccaatatggatgaagtgtgggaagctctggcagatccgaatgtgcgcgtggtagcgcaggtagcaccggctgtccgcgtagcagtcggcgatcattacggactgaccaaaggaagaagcgtgatgggcaagatcgtcaatgctctgcatctgatgggatttgatgaagtatacgatacttccttcagtgcggatctgacgatcatggaagagagtgcagagttccttgacagaatcaaaaaaggagaaaaacttccgttactgacttcctgctgtccggcatgggtcaaattcgtaaccgatcagtacaaagattatattccgaacctgtccacctgccgttctccacagggaatgctttccgcagtcatcaaagagtatttccgtgatccggaacatgcacagggcaagaaaaccgtgatggtttccatcatgccgtgtactgcgaagaaggcagaagccgttcgcccgaacagctataccaagggagaacaggataccgatgttgtaattacgaccacagagctgcttcgtatgatcgataacttcggccttgattttgcagttcttgaaccggaagcatgtgatatgccgtttggatttggttccggcggcggcgtgatcttcggtgtgaccggtggtgtgactgaggcagtgcttcgtcgcctgaccaatgaccacagcaaagaagcgatgcatgagatcgcagaaagcggtgtccgtggagaagaaggtatcaaagagttctctgtagattatcagggaaccgaaatcaagatctgtgtagccagtggtcttgccaatgcgagaaaagttatggatcaggtaaagaacggagaaaaagaatatcatctgatcgaaatcatggcctgtcgtcgtggctgtatcatgggaggcggacagccgaccagagccggtgacagaacaaaatcactccgtgcgaaaggtctgtacaacgcagataatacaacgatcatcaagaaatccgatgagaacccgctggttcaggaactgtacgccggattattaaaaggcaaagaacatgaactgttacataacgaaagttatgaataaattttaaaatcatataactcctggaactattccgtatttgcataggtagatgcgatcggaactgttgaattctgacagaacggatgctatcatttttgagaaaatatttcaaaaagaaaatctatgaaaaatgtataacggaaaatcaggaggaaaaatgagaggactgtattcatccaagacagaaatcagacacaaaatatttacggagattgcccgtatggcatacgaagagcaatctccggaggaggtactggaagaacttccatataagatcatcccgggagaggttgcaacttacagagacagtatttttctggagcgggcagtcgttggtgagcgtctgcgtgtggcaatgggaatgtcgctgagaaaaatcacagagcatgcgccaatctccaaaggtgtggaacccagtattatagaagaaaaatattacgaaccgccgcttatcaatgtgatcaaattcgcctgcaatgcctgtccggagaagagagtcatgacaacagaaggatgtcagggctgtctggaacatccatgcgtggaggtctgtccgaagaaggctgtccatatggaaggtggaagatcttatattgatgagtcttcatgtatcaaatgtggaaagtgcgtggaagcctgtccgtataatgcgatcatcaaacaggagcgtccatgtacaaaagcatgcggaatgaatgcgattggttccgatgaatatggaagagcggagatcgatcaggagaaatgtgtatcctgcggtcagtgtctggtaagctgtccgttcagtgccattgtggataaggggcagatttttcagacgattatggcgataaagagcgagacaccggtttatgcgattcttgcgccggcgatcgcaggtcagttccaggatatgaaaaatacaaagatccgtggcgcttttcaggcactgggatttaccgatgtgagagaagttgcgatcggagcggatctgtgtacggtggaagaagcaaaggattttctggaagaagttccggaaaaactgccgttcatggcaacatcctgttgcccgtcctggtctatgatggcgaaaaaactgttcccggaacaggcaaaatgcatttccatggcgctgacgccgatggttctgactgcgcgactgatcaaacagaaagaaccggactgcaagatcgtctttgttggtccgtgtgcagcgaaaaaactggaggcaagccggaagagtatccgcagttatgtggattttgtactgacatttgaggaagttgccggaatgtttgatgcgaaaggtgtggactggaaggatattccggaaggcgaacctttattccgtgcaagtgcagatggacgcggttttgcagtcagcggaggggttgcacaggctgtcgtacatgc

SEQ ID NO: 2505 - DNA, 1784 bp, Unknown
  gut microbiota DNA sequence
ataaaatgtttgtaaaagcagaaaagattctgtcttataatgcacctctgatgcagtttgcagtatacagctgtatcctcgggatcagctggctgggtgcaaagatgatcgtaaccgatcagctgaccaccggagaactgatgagtcttcttacttattgtatgaatattctgatgagtctgatgatggtgtccatggtatttgttatggtatccatgagtgtggcgagtgcagaacgaattacagaggttctggaagaaaaaccggaactgaccaacccggaaagaccggtgatggaagtggaagacggaagcatcgtcttcgatcatgtgaacttcagttataaaaaaggcagcggtgaatatgtcttaaaagatatcaatctggatatacatgcaggagaaaccatcggcatcatcggtggaaccggaagcgcaaagtcgagtctggttaatttgatcagtcgtctgtatgatgtgaccaacggaagtatccgggtcggcggtatggatgtgcggtcttatgatatggagactctgcgtaatcaggtagccgtggtactgcagaaaaatgtgctgttttccggaacgattctggaaaatctgcgctggggtaacaaagaagccagcaaagaagaatgcatccgcgcctgccagctggcctgtgccgatgaatttatcgagaagatgccggaggggtatgaaacctatatcgaacagggtggttccaacgtatctggtggtcagaagcagcgtctgtgtatcgccagagcattgttaaagaaaccgaaagtactgatcctggacgattctaccagtgccgttgataccgctaccgatgcacggatcagggaagcttttgcaaaagagattcccggtacgacgaaactgatcattgcacagagaatctccagtgtacagggggcagaccggatcatcgtcatgaatgatggtcaggtagacggctttggtacccacgaagaactgcttgcaaataatcagatttacagagaagtatatgaatctcagacccaggggggcggagattttgatgagaaaggaggtgcctgatcatgccaggaccaggaccaagaggaccgagaggtccgaaaccccgggttgaaaatccgggaaaactgatgggacgtcttttaaaatatgtcggaaaaaattatggaattcatctggtaattgtggcagtgtgtattttcgtcagtgtcatagccaatgtccagggaaccatgtttatgaagaatctgatcgatctgtatatcatgccactgatcgggcagagcagtccggatttcggtccgctgcttggagcgatcctgaaggttgcggtattctatctgatcggtgttttggctaccttttcctataaccggatcatggtatatgtgacacagggaacactgaagaatctgagaaatgatatgttccatcacatggagagcctgccgatcaaatattttgatactcatgctcacggcgatatcatgtcaatctacacaaatgatattgatacgctgcgtcagatgatcagccagagtatgccacagctgttatccagtgtgatcacgattgtcagtgtctttgtcagcatgatcattctgagtataccgctgacactggtatctctggtgatgatcgccattatgctgtttactacgaagaaagtagccggactgagcggcagatatttccttgcacagcagaaatcactgggtgcggtaaacggttatattgaagagatgatggaaggacagaaagtagtaaaagtgttct

SEQ ID NO: 2506 - DNA, 1095 bp, Unknown
  gut microbiota DNA sequence
acagaagacgggatgcagcagaatgagtcaaatgctgatggcagcgaagaggtcatcggaggaacggaggatgcacagtgattcttgagttaaaagatatctgcaaagattaccttcagggaaaaatggtgattccggttctgaaacatattgatttccagatggaacagggagaatatgtggccattatgggaccttccggttccggtaagacaacactgatgaatattgtaggatgtctggatcaggcgacttccggccagctttttttggatgggcaggatatcagcaaatgtacggaaaatgaaatgtcagatctgagactgaaaaagattgggtttgttttccagaactttcagctgttgtcgagacagactgcattggaaaatgtggaactgccactgacctatgcgggagttgcgaaaaaagagagacgggaacgggcactgcaggcactgacccgcgtaggtctggaagacagagtgaattttcagccgaatcagctttccggtgggcaaaaacagagagtagcgattgccagagcactggttaaccggccgaagatccttctggcggatgagccgaccggcgcactggacagtacttccggagaacaggttatggaactgtttcagagcctgaacgatgaaggagtaagcgtattgatgatcacccatgacagcgagattgcagcgaaagcacagagaaaagtaattatccgcgacggcataatgaaaaaggaggagcagccatgaagaaaaaatggattgtggcttttattgctgcaggagtactcctgcttggaggggtgactgtatatgcggtgaaaacaagcagtcagagtacggtaaaggtggtatctgtcagtgacatgtcaggtggcggtggatggtccgacaacagtctgtcaggaaatattacttcagatgtatcacagaatatttatctggcagattcacagacagtaaagaaaatacatgtaaaagaaggagatacggtaaaggtcggcgatgatctgctcacgtatgatatgaccctggagaatctggatctggaaatgaaaaaactggaaaaacagggaatcgaactgaacat

SEQ ID NO: 2507 - DNA, 640 bp, Unknown
  gut microbiota DNA sequence
atttcctttctttataaatgtatcatctgtggcggtcaaacgagaagtgaccgtaaacccgtcagcatacaagtttcctgaacataaaaaagtagccatatccttctcaaaagtcagatacaactacagacacacaatccctgtcttcagactgaaacaacataataatgcttttcgatcttttggagttctgctttcttcggaagctcatcaccaactttcccagcaggtttcctgactcacagatcatcgccttgtcaaaccttcttacatgatctctccatgcaatggcatcccatgacaacactccctgttcacagtgaccggatcgttcaggactcccacctgattccctattatccccgcaacagcaactgccaccttgaggcactggaaaactctgtcatcagtaagtataacaaagtccccaaataagtcaacccttctttcccgctaattctccctccatcgaatacctattttatttgcataatcgctcccacgttttctaatgaatgactctcttttcacttttttcacttcacaaatacatattttaaatatgtgtgtaaaaagtactattattcttttcaaacttatcagttaccaccaaactcagaaacgcagaaccacccgacag

SEQ ID NO: 2508 - DNA, 22240 bp, Unknown
  gut microbiota DNA sequence
tagaaacaatactcaggcgatcgtggtaaccgccatgtgcatcgcgctgacttatatttttacagcagttgttaatatccgtttaccatttgcaccaaacggcggactgatccaccttggcaatgttccgttattccttgccgctatcatcttcggcaagaaaaccggcgcactcagcggtgctttcggcatgggactgttcgacctgttctccggctggactgcatgggctccgttcactttcgtagtcgttggtctgatgggattctccgttggcgcgatcaccgaaaagaaaaaaggcttcggctggaaagttgttgcaatcctggttgcatgtgtgatcaaaatcgttggttattacatcgcagagggtatcatttacggtaactggatcactccggcatcttcgattccgggtaacctgctgcaggtaggtgttgccgctgtcattgttctgattatcgctggccagttacagaaactggcagaaaggatgggcttatgtacaaaatgatgactcccggtccttcccaggtccgtgaaaatgttctgctggcaagaagcaaacagtttcagaacccggatctggacagtgacttcgtggaatattaccatgacacctgtaaactctacagcagtctgttacacaccgaaaacgaatccctgattctcggtggagaaggcatcctcggtctggaggccgcctgtgcttccctgaccgaacctggcgaccgggttctggttctggataacggcgtattcggagaaggatttaaggattttgtctccatctacggcggcacaccggttctttacaccagagactactccagaccatttgacatggatgatctgaaaaattatctggaaaaagatcatgatttcaaatatgctaccgtcgtacactgtgacacaccaagtggtatgttaaatgatattgcttctatctgcccgctgttaaaatcctacggtattcttaccgttgtagattctgtagccggtatgttcggtgaagatgtccgtgtagatgactggaagatcgacctgttatgcggtggctcccagaaagcggtgtccgctcctccgggacttactatggtaacgatcagcgctgatgcaaaagctgccatggaaggcagaaagacacctgttgcttctttctatgccaatctgctgacttttaaaggatattatgaagccaaatggttcccatacaccatgccggtcagcgatatctatgggcttcgcaccgctctggaaaatatcaaagctgacccgcagatgctggagcgccacgcaaaggttgccgcctatacccgcaaagctgtcactgccatgggattgaagctctatccggaatccggatactccaacaccgtgaccaccttccaggttccggagggacatactgccgaagagattcttcacgctatgcgttatgagcataatattctgctggcaggctccttcggatgctttgccggaaaactgatccgcatcggacatatgggtgaaaatgcttatatggaaaaggttcaggaagtgctggatgcactgcaggaagtgttaaaaaaataatttttgcttctataaataactccggaagtcgtcttcaatcatgacttccggagttatttatatataatgttttaccaaaatatggctgatatttattcaaacaaaaaatggaagcaagggggctcgaacccctgacctctcgcgtgtgaggcgaacgctcatcccagctgagctatgcttccatacctgttattatagacttcttcttttgaaaatcaacccttttcggaataattttatgataatcggtctactagaccaattattgatatgcaaagcaagaaaaacagccgccatatgcatggccgctgtttttgtattttctttagatgatataattgcccacatctgtagtgtctaccatcagatctgcgatcgtaatcccgtcaaagtactcggtgataaccttatatgcaccttcccacatcttcaatgtcttgcaggtagcaacacgttcacactggtttggttcatgttccagacaggcaaccggtgccagggagccttcggtcagtctgaggatgcttccgacggtatattcttccggagctcttaacagctgatatccgccgccttttcccctcagggaacgtacaaaaccgttcttactcagtgatgccacaatcgcttccagatatttctctgagatctcctgtctttttgctatatccatcaacggaatatattctccggtattatgctctgccagatctaacattacacggatcgcgtaacgtcctcttgtcgatattttcatgctttaacctccatatttcctatatacctagtttaccacaaggttattatggttttcaagagggaatttgtatttctatcgttttttcaaacatactccagatgtcttattctttttttgtacggatcggtaacaaatcaaacatcatctagctcgttgtctacataaatgacagtataggtatactgtttcataccgctatgcaagctgcaactacaaacttgggctcggtgttcgtgtaactacaagaaacacgctttgcgagtttttcgtagttatcgcggcagtcgccaaggtctcgtgcaagcgcggactctggctcgttgcttgcgtaaaatcaaaattgatccactggaccaattattgatatgcaacgcaaaaaaatgtcacatgaaaacggtcttcttgttttcatgtgacagccatatcttgttttttattattctctgtgatcttaggcgttttatttattatttcagctcttttacatgtgctttcagtttctgtgctgcttccttcggatgctctgctttcatgatcgcagataccacagcgattccatccatgtttccgcctttcagcacatccatatttccatcgttcagtccaccgatagctaccgcaggaatcggtactgcctgacatatctcgttcagtgtttccacggaggtccggattgttaccacctttgttgtcgtcggaaagattgctcccacgccaaggtaatccgcaccctcttcatatgctttcttcgcagcttccaccgtctttgccgtagcccctacgattttatccggtccgagcagttttcttgccacagaaaccggcagatccgaagatcccacatgaacaccggcagcatcacaggcaatagctacatccacacggtcatcaatgatcaacggaatctgatagcggtctgtaatgacttttacctttctggctttctccagatattctcttcctccacagttcttttcccgcaactgtaccagggtaacgccaccctgacaggcttcttctatggttttataaaaagattcctctgtatgatacgtgctatctgtaaccagatataatgtcatatctaaatttgctttcatatcccttatatctcctatgtttctttttggcattctccccgcgattttacccgctatcatgacagtctccgggggctcatgcaagcaaggacttttttgcacccatacgcttaaactcactgttcacgtatgttacgcttctgtctcgcggatccgaagtttcgcttccagtacttcctggcgcatccctgccactgcgtccagcagttctatctggaagcttccggggcctttcgaagaccgttccgccagttctcctgcgattcccatgacagaagtgccaagcacggctgcggtaaacggatctttttgtgccagataggcggcagtaagcgctccaaccatgcatccggtacctgtgatcccggacagctttgtggtaccattttccagtatcagacaccgttcctgatctaccagcagatctctggctccggtagccagaagcacactgcctgtccgttgtgaaaacgtccggaagatccttcttctttcttcttcgttttcatctgtcatcgcatcttcttttcctgcatcgattccggttccatgaaaggactgtccggcgattgccagaagttcagatatatttcccttcaggatctgtatctgcccaaacccgatcagttcccgggcaagctccatccggatcctgctgcaggttactcccaccagatctaataatatcggaatcccacactccatggctacccgggctgagcggcgcatagattccatcctggcatcggtaatattgccaaggttcagcatcagtgcacctgctgtcctcgtgatatcctccacctccagcggatgttctgccatcatgggtcttgctcccaccgcaagaatcatattggcacatccatgaatggagatgggattggtgatgcagtgaatcagcggactgttttctttcgtggcattacgcacgttcctcagctgattttctaactgttttatcataaactttcgctccaagacttctctgaaattttgccagcagacctgcacggctcagcgcttttaaaaatacataagctgctgccccgcccatgatcgttgcagatacaaacatcggggtatagaaaaatgcattcaggccatctcttcccatgataaatgccatcaccggatacgatacgatagatccgataataccggttccgaaaatttctccaagcaccgcgcagatgatcttaccgccggatacccggtaaaaaacgccagaaagaaatgcaccaaatacagctcctgtcagggcaagtggcggaattcccataaacagcatgcggatcactccgatcatcgttgcacaaagcagagaataccatggtcccatcagtaccgagcagacaatattgatcagatgcgctgtcgggcacatcccttcgatacgcagaatcggagatattaccaccccgattgcaaccatcatagccagcattaccattcgaaatgtgttcagtctttgtttttccatctttgttttcctctctgatttccgggaaaactttactttttgtctgtgggcataaaaaagcgcagtttccctgttttttcggtcgaagttcccttacttcctctcactccgaaacacggattcccatcgcttttttctgcatgccggatctcagggcgctccccctcagattcacctgcacttcttataaaattttatcttacagattctttctttgcaaaatccgtaaaatcatacgttcataagctgcctgcatcacagatatcttcttttaaagaaacaaaagtcttgttatcacagcagtcgccaagatctcgtacaagcacagactttggctcgttgctcgcgtaatcgaaattggtccaccggaccaattattgatatgccatgcaaaaaaatctgcccgcatacctgcggacagattctaactttctctttctcatccctccgttggcattacccaaatcaggtgcggtcgaagatttatcttcctctcagcctgtcacacaagctcccgtttctttatacttgtacatgatagcacttatgtatagagttgtcaaacagaagtaattttctttctgcttcgttcccgtctcttcagccatccgaagaaaatcacgcagatgatcacggaaagcaaagatcccgtcgctgttgccagtcccataggaaacagcgtatccgggaaaaacctcgaagtaagatatacccccggaatacggacacacagaatggcaatcagattatgaataaatgaaatttccgaccttccgtaagcgcaaaaatatccactgaagctaaaatgcacactggcaaagatgcaatcccagatatagccacgaatatactgtgcacccagaataacgaccatcgtatctgttgtgaacagtcccactacaggttccgcaataaactgaatcaaaactgccacacatactccaaatcccactgcgattcccatggcacagcgaaggatctgatctgcccggtcgtattttcccgctcccatattctgtgctccaagcgctgagaccgtagacaacatagaagatggtaccagaaaaaggaaactgattattttttccacgattcctacagccgccgctgcacttagtcctctccggttggcaatgatcgtgattatgataaatgcaatctggataaaaccatcctgtgccgcaataggaataccaatcttcagcacctgacccatcgtctgtttctccggtgaaaaatctgcttttttcatcgtaatgcctgtctgcttcttcaagattacccacaaagagatgataacactgatggtctgggaaagagtcgttcccaaagccgcaccggccggtcccatatgcatggctcccataaacagataatccagtccgatgttgatcacacaggcaagcgctataaaatacatggggcttttcgaatctcccattccgcgaaagatcgatgcgatcacattatatgcagtgataaaaggaattccgataaaacagatcgtcagatagcggatcgttccatcgaccgcttctgtgggtgttgacatcacacttacgatcggccgaaccagaaacagcaacatacctgccaggataatggaaactcccaggaacaaaaccgttgtatttccaacagtctttgatacttttttggaatcgccggctcccaccgcacgaccgatcgttactgtcgttcccatagccagccccacgatcataaccgtcagcatatgcatcacctgactgccgatcgatactgctgttgtgcttgccactccgtcaaactgtcctacgataaacagatccgccattccatataacgtctgtaaaaaatacgataacaggtagggcagagaaaaatacaggatattcttccagacatttccagatgtaagattcttttccatagttctttactcctttgcttctttctatttggtaagcgttttctatgatataaccactttttattacctgcgttgcattataaaccctacaataattgtagagtcaacgaaaaaaacaggtatctgttctgttttcaacaaaatagatacctgcctctgagattatatttcgatcatccacgcttcatatggtttcaatgcccatatttctttcccgatcgcttctccttcatagttatgaatgagaacttttccatctgtcagatcctgcgtcgcattcatctgtgccggtgtttctccaaaattacataccactacgacctttcttccatccagactccgttcataagcaaaaacctgtggatgtttttcatccagaaggcggaagtttccatagatcagcacatcatgctcttttcgcagagcaatcagtttcttgtagtaataaaacagggaagccggatcctttctgctgtcttccacattgatctctttataattttcattggcttccatccatggggttcctgtagtaaatcctgcgtgagcctgtgtattccactgcatcggtgttctggcattgtcccggctgtttcgcagaagatagctcaggattttctcctcgctccagctcagttcctgtttttcttttctgaagttcacagactcgatatcctgataccgggagctttctgtatagatcacattggtcatgccaatctcatctccctggtaaatatatggtgttcctttcatgccgaagatcatagttgccagcatttttcctgatacggtccgatactccggtgtatcatttccaaaacgggaaagcgcccgcggataatcatggttgcccagaaacagactgttccatcctttttgttccaatccaacctgccatttttccatcagttttttcagatcatgcaacgtataggactttggatcccagttaccactccggaccccgtcaattcccatcagttcaaactggaataccatgtccagctcctttctctcagggtctgaatacactttcgccatctccagcgttgttcctccggtctccccaactgtcagaagattgtcctgcagtccgaacgaatatttgttcatttcctgcaggtaggtatggattttctccgactgctgatcatttccgccatgaccgttctttacgatgttatcaatcgcatccagacgaaatccccggatacctttttccatccagtatcggatcatggcatacagatcttttctcatatcttcatttttccagttcagatccggctgctgtatgctgaaggtatggtaataatattcctgaatctgcggtgtccattcccatacatttccaccaaagaatgccccttccccctgtggcggctgatcctcggtaccttcttcccagatataatagtcatggtactttccgtcccggtctttcgccgcttccagaaaccacggatgttcattggagctgtgatttaaaaccagatccatcataacgatgatatctctcttctcacattcctttaccagctcttccagatcctccgtcgtgccaaaatccttcagaatagcataataatcactgatatcatagccgttatcataattcggcgaatcgttaaacggggagatccaaattgctcccacacccagttcctgcagatagtccagtttgctgataattccctgaaaatcgccgataccatctccattgctgtcacaaaaacttcttgtatagatctgatatgcggtcagatgatgccaccattttttatccattttacttttctcctattattcgtattatcatagtcattcgttctatgacgcctggtttactgattccatcgttatcgttccaggaatcctgtctttacaatattttggctgaaaatacttttcttttaccgtctataccattataatgatatcaaactatacttttctacctttattttaggaatttatacaattattttgactttttttaatggagatcatatatgaaagaaccaattggaatcagagattataccatccatggaacggaactggaacctttccatatttatcatcagaattacattcatggaggcctgcaggttccttttcactggcacaaagaaattgagatcatctgggtggaacagggacagttggaactgacactgggaactcagcataaggtactcaaagaacgggattttgtaatgatcaacagttacgaactgcatcagctacaaagtatcgggaataccgcatctattcattacgcactggtatttcttcccgacatgctctctttttcctatccagatcagagtcagatgtcttttctgaagccgctgctgtcccatcaacttcggcttccttcctatgtatccggaaatcatccctgcgcatcatctattcgcaaagtatttctggagattcttcatgattatgatacccggcccatgggatggactttgtttttaaaaagcaatctgtaccggattctgggaattcttgtttcggaaaatcttctggtgcagactactgtacaagattctcagggcaaaaaccgggaagcacaatacaagcagattcttcggtatatccataagcattatgaccagaaaatctatctggaagacctggcggcttctcttaacatgaatccacaatatttttgtcggtttttcaaaaagcagtttcagatgactcctgtggcctacatcaattattatcgcacacttcaggctgctgatctgctgaaacatacttctttatcgattctggaaatcggattacgggcaggatttgaaaatccaagctattttgcgaagattttccggaaatattttgactgttcgccggaagaataccgcatgcatcctcaagattcagataacgtaaatggaagcacattctaaccttagaaaaagccacaggcaaatcgcctgtggcttttttacgtttggacatatattaactttcgttaagtagttttaagtatttcttagaatttaccagctttgtgagcttcctcgatggaaactgcaactgctacagtcataccaaccatcgggttgttacctgcaccgatcagacccatcatttctacgtgagccggtacggaagaagaacctgcaaactgtgcatcagagtgcatacgtcccagagtatctgtcataccataggaagcaggacctgctgccatgttatccggatgcagagtacgtcctgtaccaccaccggaagctacggagaagtatttcttaccagcttcgatacgttcttttttgtaggtacccgctaccggatgctggaaacgagtcgggttagtagagttacctgtgatagaaacgtcaacgtcttctttccacatgatagctacaccttcacgaacgtcgttagcgccgtagcagttaacttttgcacgaggaccatcagagtatgctttacggaatacttctttcagttctcctgtatagtaatcatactgagtctcaacaaatgtaaatccgttgatacgagcgatgatctgagcagcgtcttttccaagaccgttcaggataacacgcagaggtttctgacgaactttgtttgctttctcagcgataccgatagcaccttcagctgctgcgaaagattcgtgacctgccaggaatgcgaaacactctgtgtcttcttccagaagcattttacccaggttaccatgtcccagacctactttacgctgatctgctacagaaccaggaatacagaaagcctgcagaccttcaccgattgcagcagctgcttcagaagcttttgtgcatccttttttgattgcgattgccgcacctgtgatgtatgcccagcaagcgttctcaaaacagattggctggatgcctttaatctggttgtatacgtccagaccagcatcttttgtgattttctctgcttcttccagagaagcgattccatagctgttcaggacagcattgattttatcaattcttctttcatatgattcaaataaagccatttatttcatcctcctattatattgacggtatgcataaaatccgattactctttacgcggatcaatgattttagctgcatctgcaacacggccgtactgtccttttgctttttcccaagcagttgtcggatcatcaccctgcttgatgaagtcagtcatcttgccaaggcttacgaactggtaaccaatgatgcatccttcttcatccagtgcaataccggtaacataaccttctgccatttccagataacgaggaccttttttcagtgttccgtacatagtaccaacctgagatctcagacctttacccaggtcttccagaccagcaccgatcggcagaccatcttcagagaaagcggactgtgtacgtccataaacgatctgcaggaacagttctctcatagctgtgttgatagcgtcacataccaggtcagtgttcagagcctccagaagagttcttccaggaaggatttcagaagccatagctgcggaatgagtcataccggagcatccgattgtctctaccagagcttcctgaataataccatcttttacgttcagtgtcagtttgcaggcaccctgctgtggagcacaccagcccacaccatgtgtcagaccggaaatatctttgatttccttggactgtacccattttgcttcttccgggattggtgctgcgccgtgattaacgccctgtgtaaccggacacatcatttctacttcatgtgaataaatcatgttaagactcctttcaaacttgaaatacttattttgagacttatgtatctcaagcaagtgaacatacttcacccgcttatcatgtttattgtcgcataaacctttgggttagtccagccgaacttacatttttttttatttttttcacttttcttgccatatatatcaataatctgcccaatgaaccaattttgattgacatttttttcggtactgctatacttttttcagaatatatgcatgcctgttgcaggaagaccataccattccataaaagaatttcctaaaattcaaagattttcaaaacacgtttgaaaatgcttcctgcgaaatgtggttacatctcccccaaaaaatcaagaaaggaacatcacaatattatgaatattcccttattaaaaaatggctgcctctccggcagcaccctgaaaatcatagccatcatcgccatggcgatcgatcactttgcggcaagcatcatcctatatggtattctgatgcaggaacatccggctttcctgggacacccgatctccatggctattccctggtggagcatataccaggtcatgcgctttatcggccggatcggcttcccgatcttctgtttcctgctgatcgaaggtttcttccatacttccagcaaaaagaaatacgccaccaggctgtttctctttgccctgctgtcggagtttcccttcgactatgctttattcgacacaccggtaaatttcggttatcagaacgtttttttcactctgtttctcggacttctgaccatctggggaatcgacactctgtgccacaaagccggaaaccagacacgcctctggatagggaaaatcctgattgctgccgccggctgtctcgccgcctggcttttacagaccgactacgactacaaaggcatcatcctgatcctgttactctacctgttccatgatcagaaatttctctgtaccctggtttcctgcctgagcctcctgtgggaagcccccgcctgcctggccttcatcccgatcaacctgtacaacgggaaacggggaatctccctcaaatacttcttctacctgttctacccggtacacctgctgatctacggtctgatcctgcattactgtttctgagtcagtgtgaactttgattcgtataaacaaaacatatcaaaactccatacagacacaaacttcagcttcattgctcattgtcaaggcggttatcaagttctcatgcaagcacgaactttgactcattgttcacatcgatcataaaaggctgtagctaatggaatcatctcccaaagatcatccatcagctacagcctttttaaattttctcaaagccactaactctgcaattaacttctattttcttaaaccctgttcccctatttacttctctatctcacagaaaattttacctagcatcctatctcttcgccacaacatccccggccttcttaaagatagacttctccggcacaactccgcgaacacaagacagcggatagatattactctcccgtccgacaacagttcctggattcaacacagaattacatccaacttccacattgtcccccagcattgcgccaaacttcttcataccggtttcgatatcgtatccatctccatgcacaaccaccagcttcttatcagacttcacattggaagtgatcgatcctgctcccatatgtgccttatatcccagcacagaatcacctacatagttataatgcggaacctgaaccttattaaacaaaatcacattcttaagctctgtagaattaccaaccacagcaccctcaccgatgatcgcgctgccacggataaatgcacactggcgcacttctgcatccttaccgataatacacgggccatttaaagcaacggtaggcgcgattgtagccgattttgccacccagatatcctcaccgatcttatcatactcttccgggctcagggtatttcccagctttacgataaattctttgatcagcggcagaacctcccacggataggtctttccctcaaaaatctctgccgcgatcgtctcattcagatcatacatgtttttaatctggatactttccatactcatagttattttcctccttttttataattcgctgcgatgctgtcatatctgcttcgcaatgctgcctgataattcacctggagcactccgcctacttttacccggataaaatgttccagtttatccatatattcctgggaagtgatacttccttccgccacataattcaatcccttttcccagcttgccgtaagctccggattcagcagggcgcggatggatgcgttgaccacttcatagatcatctctccaatctgtgtgggcgtgatcacctgtgtctttttattcagactgatgtacttgatatttaccagttttttcaggatctccgctctggtcgcactggttccgattccgcttcctttgatctgtgcccggagttcttcgtcttcgatcagctgacctgcattttccatggccaggatcatggtaccggaattataacgtttcggtggagaggtttccccttccttgatggcaaattcttccaccggaagaacctctcccttctttaactgctgcaggcaggcgagaaatccggcatcgcactggatatcatctgtcttttcttctgcagtcttcggatcttcttcttttcttctggaaagaacgttggcaaccttcagatatccttcctccaccagaactttaaaactggaaaacagtttttcttttccgatcgccgacaccagactgaccttctgataaactgctgccgggtagaacacacttaaaaagcggcgcacaatcacctgatatactttctgggaaatctgtggcagacggctcagattctgcagaccctgtccagtaggaatgatcgcataatggtccgtgatctgtttgtcgttgacgtatctggtcttttctatgcctttaaaactttctttttccagaatctcctgggcaaacgaagctgccatctggtatctgatcaatcctttcagattgcgactgatttctttggctaccgcggtggaaaggacacgggcatccgttctcggatacgttaccagttttttttcatacaattcctgtaccacccgcagcgtttcatccggactgatcttgaacatccgggaacagtcattttgtaattctgccaggttatataataacggtggatttttcttttcttttttcttctcaattttttccagaatggcctgatgcgccgccgataccgaaacggatcctgtatccgattgtcccgaatgaccgcctgttatcccgttcactacaggctgcgacagttcgtgcatccccgcatctgcctgtgtaacagcactttcccgttccagaatttccttcaattcttctgcccggttccggtctttaaaaccattttctttgtacagatccggtgactggaaatatcggctgccttctaccgctctccactctccctcgaacgaacgtccttccagggagaactttccgagtacacggtaaaatggcgttttaacaaattcccggatctcccgttctcttcgcaccaccatgccaagaacacaggtcattacccttcccacagagatcacctggtatttatttcccagataattcgacacactgtttccataccgtaaggtaaggattctggaaaaattaattcccatcagataatcttctttggcacgcagataagccgacgcactcaggttatcataggcactcaggtctttggcttctttgattccacgaatgatctcttcttccgtctgggaatcgatccagactcgtttttctttttttccttttacaccggccatctgagccaccagacgatagatgtattctccttctcttcccgaatcggtacagacatagatggtttccacgtctgcacggttcaaaagtccgctgacgatctcaaactgctttctcaccgccgggatcacttcatatttgaattttcccggaaggaaaggaagtgtctccagagtccagcgtttgtatttgatatcgtagacttccggataactcatggttaccagatgacctacacaccaggtcacaatggtattttccgactccagatagccgtcatgccgcgtggtcttcacctttaaagctttggcaaattcctgggcaacgcttggtttctctgcgataaatacggattttttcatgtattttaaccctttcttatctcttcagaaccctgtaaccgccagagtgtgtttgaaaggactccggcacatgggcaccaaagagtataccttttttcacagataaattcaagtgttacggtttttgagtcttgcaatttagaacatataatataacaatcttctctcacgcaggcgttgccttttgctcgttacttgcataaaaaacaggatcctgaatatgcaagcacacatccaaaatcctgttcgtatatcgtttcttatcttatttcttattttgcctgaatatatccttttgctttcagagtctctgcacacagaacagcgccgcctgcagctcctcttacggtgttgtgggacagacctacgaatttccagtcgtatacagtgtcctctctcagacggcctacgctgattcccataccgttttcgaagttgacatccatcttaacctgtggacggttatcttcttccagatactggataaactgcttcggagcactcggaagttctgcttcctgtgggaatcctttgaagcttaccagtttttcgatcagctgttctttggtaggattctttctgaattttacaaagactgctgcggtatgtccgttcagaaccggaacacggatacactggcaggtgatcaccggctcggtagcttttacgatctggccgttttctactttaccccagatacgaagcggttcctgttcgctcttttcttcttctccaccgatatacgggatgatgttttctaccatctccggccagtctttgaatgttttacctgctccggagattgcctgatatgtagtagcaaccacttcatatggctcgaactctttccaagcggtcagaaccggtgcgtagctctggatggagcagttcggttttacagcgataaatccacgggtagttcccagacgttttttctgagattcgataacttcaaagtgttccggattgatctccggcactaccatcggtacatccggtgtccatctgtgtgcactgttgttggatacaaccggtgtctctgtctttgcgtattcttcctcgatggctttgatctcttctttggacatatcaactgcggaaaatacaaaatcaacggtggaagctactttctccacttcatttacgttcataactaccagtttctttacagcttccggcatcggagtgtccattttccagcgtccgcctacggcttcttcatatgtttttcctgcacttctcggggatgctgctacggttactacttcaaaccacggatgattttccagcagagagatgaatctctgtcctaccattcctgttgctcctaaaatacctactcttaatttgctgctcattgtgatttcactcctcattcttcttactcaatgcacaaccgttactttttgtatttctctcgcgtacatttgtatttacttggtaatactataccagttttttgaaaaaatcaacacttttttagttttcttccagatattttttattccactctacgactttcgtcatcgcatccggtcccggagcaccgatcgtcatacgtttttccacgcaagtcttgatgctgatggcttcgtaaatatcctcttcaaataccggactgatggctttgtattcttccaggctcatctcatccagtgagattttcttatccagacaatacagtaccagacgtccaacaataccgtgtgcgtcacggaacggtacgccgtggtttaccagataatctgccgcatcggtggcgttggtaaatccgtgttttgcgctgttttccattacatcattccggaacttcattgtggaaaccataccctcaaacagagccagacatccctttacggtatcgatggcgtcaaaggtcagttctttatcttcctgcatgtctttattatatgccagcgggattcccttcatggttgtcagaatggacatcagtgcgccatagacacgaccggtctttcctcttaccagctcggcgatatccgggtttttcttctgcggcatgatgctgcttccggtgctgtaggcatcatcaatctccacaaactgatactcgttggagttccagatgatgatttcctcggaaaaacggctcagatgcatcatgatcgtggacatggcagataacagttcgatcacataatctctgtctgctacggaatccatactgttcatcgtaggaccggcaaatcccatcagttcggcactgtaggcacgatccagcggataggtggttcctgcaagcgctccgcttcccagtgggcaatagttcattctggcgtaaatgtctgccagacggcttctgtctctgcggaacatctcaaagtaagcacccatgtggtgagccagcgtgatcggctgcgctttctgcagatgggtaaatcccggcatataggtatgcaggttttcttccatgatcttattcagtgtcaccagcagcttcttcaccagttcatccagttctttgatctcgtctctgacatacagtttcatatccagtgctacctggtcgtttctgcttcgtccggtgtgcagtttcttacctgcgtcaccgatccggtcgatcagatttgcctccacaaaactgtggatatcttcgtactcactggtgatctccagtttaccggcatccacatccgccacgatactgtccagtccggcgatgatctgatttttctcatcttctgtcagaatcccctgttttgcaagcatcgtcacatgtgctttgcttccctgtacatcctgatggaaaaacttctgatcgaatccgatggatgcgttaaaattatatacaagtttgtccgtttcttttgtaaaacggcctccccataactgtgccatattgtttcctctcttccctgtattttccggcagacttcttttcctgttcctcacttaaattatccgggaatcagcggattcactgccatttactttctcatagtaaagtctgaaatcattctatcattaatcctgtgtcggcgcaagtcgctttttatattccgttattctgcaagatttcctgctcgatccgggctttttgctcttcacgctcccgcatcgagaacacacatccgcagtaatcctgccggtacatcccgtattcttttgacagttctgtggatcgtttgtacccgtttttcttcttaaaatccgacggcagccacgccacttttgtatcccggcacagttcttctccgatctcatttaatttctgtgcatttttcatcggactgatcgtcagcgtggtcgtcacatagtcaaatccacccttctcggcctctttgattgcctccgacagccgcaggcggtaacaggcaaagcaccgctctccgccctccgggatcttctccatgccttttactgtctcataaaaccgttctttttcatagttgccttccagaaaagagattttatgtttcgcaggcagaagaccgataaaccgctcctgttctctcacccttttccagtattcttcttccggataaatgttgggattgtaataaaacaccgtgatcgcaaagtcctcactcagtgtctccagacagtaactgctgcacggcgcgcaacagctgtgtaaaagcaaggcaggaactttctgctcctgcctgttgtgtgcgatttcattttccattaatttctgataatttattttctgcatcgtttcaccttatctcccacagcctctccctgggttacttttgtctcgtaaccatcccggctgtttttcagaagatcttcatccggatgtacccgtccccgctggtaaagcaccacgatcgtggatccgccaaatgcaaatcttcccttttcttcgccccggtgtacaaacgcttcttcctgatcattctcgatctttccgaccatcagcgcgccgacttccatctgcaggacggttcctgcatcggttgtcctgatcaggcagaactctctggtattttccttatagatcggctcctgatcgtttgcaatcgggttaaccgtatggaagattccgggtatcttatagttgccggatttttttccggtttctgtataaatatacctgtgatagtcgtccactgtcaagcggtaaacgaatccatagccgccttcataggcacgagccagtttttcactctttaacagttcttttaccgtatacggcgtatgcttgatcttcatgatcccgtactccgtgatcggacagacggtaagtttggcatcacagggactgatgatccgcgccgtatcttcttccaccggacgttgtcccgatttcagctttctcataaaaaaatcattataggaggtaaatctttgtttgacccagctggactgatccatcggatgtccttttaagaataacgggatcagccagcaggatgctttctggctcaatatccagccacccattccggaaacccacggatgtaccagcacttttaccaccgcacgccccggtacgcttttatataatttttccagaaaacgatcctggaatccggtctcttcccagcgatttccgtatcgatctgcgtatttcatatgctctctcccttttacatatatgttctcagaattattctgtacctgacttttcgaaaaaacatgtataaaacacaagccaaaatgttgtcgtatgtcatctgcaatactccgtaatacatttcggcttttgatcatcattattaaaaactaaaaaatatgaaagatttttaagattgccagggcaacaacgccgaccaggactgccagtgtggaattcctgggttttttcacctggatattcgtcacaaacaacgtaccgacaacaagcatagccacatgaagtgccactgcaaaatggttcctcagcaccgtatgcagcacaaacaccagcggcagcacgacagcgatcgatgtgatcggcagaccgctgtaatattttctcacttcctccgtctcttcctgacgttttgtctcacagacattaaagtagccgagacggaccacaccattcattccgtaccatgcaaggatcacgataccaatcggtcctctcataccaaggctgtaggccagcagaatcggaaatgctccaaagcagaccatgtcacacagggaatcgatctgaataccaaaacatttttcatcatccgtacggtctgtctttcttctggctatttttccgtcaaacatgtcacacagtcccgaaagagccaggcacaacactgccatcttataccatccgttcacagtaaacagcatccccgcaatggaacaaaacagactgatatacgtcagaatcaccgtgtaattgtaataaccaataaaacttatcatgagttccccctctttctttcgtatccttttcccttttcctgtatcgttttcagcttttcgctgatcttttctctgtgttctttttcattaccaagaaacagctgcgcagctacagtcatgactgcactgatcaatagctctgtgtaataactcagtccacggctcaggatcagtcccgccagaacctttacctgcccgaaaatccctgtaaacagcatggaaaacagcttttctgagattcccatacctccgggcagcggaagcatatccacagccacggaaatcataccctgaagtattacaatatcatacatactgtactgatgtaaaccaaaagatcgataaacaaaatatgttacaaaaaacaatgcaacacgctgcagacaggtgatcagaaacacgatgcctaccacgcccggatgatttttcagatattctgctgtcttctgatactcgtccatggcattttccagtttttccagacgggaggtcttctttttcaggatatgcatttttacaagcagttcatgtcctttgaccagaatctggcgcatcagctgcgggtgaaaggtcagcagcagcataaatgccacacagaacacatttaaccacagaccaatccacatcaccggcatcacatcctgcatataggtatccttgatccgcggctgaaagaacagcacaaacagtccaagcagcaccagtaccagtttataggtgatcgttacgatcatcagcaccaccgaggataccgagatcggaatcttttcttttttcagatacaccatctgcatcggctgtccgccgcttgccgacggtgtgatgcagctgaaaaagaaacctacggaagaaatcaggaaacacttccattttttcagccggatctgcaacgtatagagcagataatgaatgatgatcgactctccccagataaaaaataccacacagataaccgccgggaagagataacggatatctgcttttttgagattttcccagatcagtcccagatcttctccgtgaaagacaccgtacagggtaagaccgagaactagaaacaggaaaataccgtttcctatgatttttttcttattt

SEQ ID NO: 2509 - DNA, 3652 bp, Unknown
  gut microbiota DNA sequence
agaatttcctgtaaagtgaaaaagctgccggcggatatttacatacatccggcgacagcctgcattgcattttcttatttaactcacaacatttccaaccagaacataagataccacatacatgatcacggttgccatggcgattccgcacaggatggccagtgaggattttttgatatcgatgccgagcagagacgcgatcagcgcaccggtccacgcgccggttcccggaagcgggattcccacaaaaagcaccagcccccagaactcatactgctggatcttgtcgcttcttcccatcgcccgattttccagtttgatgatcagtccgcggaagcattttactttcttcatccactggaagatctttttgataaacagcaggatgaacggaatcggtaaaatatttccgatgatacagatcgggattgcctgcacggcggatactttcagaagggagctggcaagcagtcctcctcgaagctccagaagcggcatcatcgaaatcaaaaaaacaactgctttctccgatatataaggtcctaaagttgcggcaaaccatgtaacaagtgattccatatatttctcctattttttataatttttcaagaatttaattaacatctccatatcttcctgtgttccaatcgtgatacgcagataattgttgattctcggtttgttaaagtaacgcacgataatgttggcttcccgaagtgctgcaaacagttctgctgccgggatctccggatgcgaagcaaaaataaagttcgctttggagtctccgaagacaaatccaagcttcgccagttccttcttggtccattctctggtctccaccactttatgcaccgtttcctcaaaatatgcccggtcagagattgcagctgcgccaagcgccagggttgtctgatccattgtgtaggaattgaaggaatatttgacatcgttcaggtacttgatcagcaccggattgcccatcgcatagccgatacgcatacctgccattcctctcgacttcgagaaggtctgtaccaccagaaggttgtcgtatttttcaatcaatggcatcgcagaagccgcaccgaaatccacataggcttcatccacaaccacgatcacatccgggttggctttgatgattgcttccacatcctgcatgccaagttccacaccggtcggagcgttcgggttcggaaaaataattcctccgttttcccggaaatagtcctctttacggatcgtaaaatcatcggtcagcggaaccgtctcatacgggatccgaagcatatctgcccacacatcataaaaagaataagtgatatccgggaacagaatcggttttttagaattgaaaaaggtcataaaaatcattgccagcacatcgtcagaacctacgcccacaaatacctggtcttcctgcagctgatagaaatcagcgattcctttgaccaacacggaagctgccggatccggatacagacgcatacagtccacatcgatcgctttcagtgcttctgccactttcggtgacggtggatatgggttctcgttggtgttcagtttgatcaggttctgtacttttggctgttcgcccggcacgtagggaactactttccggacattctcttcccattttttcatcggtatctcctcattctttcctgctgtctgtgtgggactgcctgtttttcgtcctttacacaatttttacacactactgtgtattataaggatattccccgttcaagtcaacgggagatatacacagaaaatgaccggcagactttcgcgtaccggtcattttcctgttttaatcacatattagaattgcatattatataatcccgcatagatacccccctgtgccagcaaactctcatgcgttccctcttccgcgatgccgtcttccgtcagcaccaggatccgctcagcatttctgatcgtcgataatcgatgggcgatcacaaatgtggttctgtcttttgccagcagttccagagaatgctgcacgatcttctcgctctcattatccagtgccgaggtcgcctcgtcgaagatcagcaccggcgggttctttaagaatactcgggcgatcgagagacgctgtttttgtccaccggaaagcttgacaccgcgctgtccgatgtccgtgttgtatccttccggcaggctcatgataaattcatgggcatttgccgccatcgctgcatttaccacttcctcgtcggtggcttccggttttccgtagcggatattttcgagaatcgttcccgcaaacaggtaaacatcctgctgcacgataccgatctgtcttcgcagatctttcaacttcacatcccggatatcgatgccatccagccggacagcccctccggtcacatcgtagaaccgcgggatcagtgaacagagcgttgtctttcccgcgccgctgcttcctactaacgccacgtattctcccggtttcacatccagattgacatgggacagcacattttctttattttcactgtaatggaaggatacatcctcaaactgaatctctccttgcacccgatccagcgattttgcatcctctttgtccttgatatccggtgcgatattcatgatctccacgaaacgctcgtaaccgctgtagccgttctggaactgttctgtgaagtttaccagttttttgaccggttccgtaaagttattgatataaagaaggaaggtcaccagatccgccgcggaaagttcccctttcatcatcagccacgcgcccatcagaagagatcccaccgtgatcagcgtggaaaatacgcccatcccggagttatacgttcccatataccgataagactttttcttggaatccacaaaccggctgtttccctcctcgaacttgtccatctccgtcttttcgttgctgaaagatttgaccacacggatgccggaaagactgtcctcgatctgactgttgatatccgcgattctcgcccgattctccctgaacgctccgcgcatccggccattcattgccacggcatacagaagcataatcacaacaaagccgattgcaacgaaagccagtttcgcattgattatcagaagaatgataaatgcacccagcagtttgattgcagaaatcaccacatcttccggtccgtggtgtaacagttccgtgatatcaaacaggtcactggtgattcttgagagcagatgtcccactttctgattatcgaaaaatgcaaaggacagcttctggtaatgtccgaagatctcatttcgcatatcgtgttcgatcttcgcacccatcacatgaccataatacccgataaaatagttacagtatccttctacgatcaccagcagcaccataaaaatccccagccggatgatggtcgaggatgcttcctcaatgggaagcagcacaacagttcccgtaatataccgcaccatcaacggaatcacaagggtaatggctgctccgatcatcgcaaacatcatatccgccaggaacagccccttatacggtttgtaatacgccgacagttttttcttttcgttctccatattttttcctcccatagtttctgccatactttttcattccatgccatttagtatagtagtaccttccggaaagtgcaatgtagaatcttgtatattt

SEQ ID NO: 2510 - DNA, 3965 bp, Unknown
  gut microbiota DNA sequence
aacggtgtgctgaatagttacaaaattacaatatcatacaaataaaagattcgccggtaaatcagtcgaaaggctgagacaaaaagctatagggtctgtaaaatgacagcaggctgcaacgccgatataggagttttatactcctataccggcgtctgttggttacaagagaatgtgttttccgcttattttccaaatgtattgctggatttagcggcagcttttgcagccatggtgttggtggactcaaacaaggaagttgtcggtgcgaccggacacatcagtactcgtcctgttccccgataaacatttaccagaccctctccgctaactgcagatcctacaagtgttttggtagatctttctacggtgaattcaagattggatgaccagcatacagcaagatttccatcaattttcagttcatcattttccaagaggacttcaatcaattcatcttcaggaacattagactccagtgcagctacaccatttccctgcaaactcagattaaacagaccttctccacctagtacggctgatgaaaggttctttctggctacaactttactttttacatttgcatcacaagccaggaacatgccatcttcaattgtcattccggccgggccccatttgccgatgtctgcaaggataatatacttgtatgtcggttctaataccaggcagccttcaccaacatattccggtttaactgcggtttcttttgtaacggcacctttgattgcttttccaaggaaatctccgatgccttttacaccagatgtagctcgtacatttccgcccatccattgcatggcaccggcctggataatagcagaatggtctttatcaatatcaataacaacttgtcttcttctgacccccattttgctcatgaaatattcgttcattgcgttcattggtgatacactggcatcctgtacatattcaagtacatggaagtttccgatacttttcgcaaattttctgttttcattttgtaagttttcaattctcatagtactactgactcctttgcctttcataataattcatagtgttattcagataggtttattataatagagataacatagacaggtatatactttgtatagagaattataaagagagatttctcaaaattcgagaaatataaaggtgcaattcctcatggtggatgtgtattatgaaaaataaatttgttatagtgacgatatcaacaaaaaagcagaatataaatggggtgatcagatggaagcggcgcagagaattcgattgatccggatattagaaaagatggagaaaaatccggcattcagtaataagcttggtataaagaacacatctgaatatttatcagaaaaagaacagaaaaaatgaaagacacatatcagaatgagtttcagaaggagtaaaaaaatgttatcgttattatttacaatttgtatgatttggtttgttggaaaattttttatatttggattaaaagcatcctggggaattatgaaattactttgtacagttattttcttcccagtgatattgatcggtatggttgtaggtggactgatgtacattgcatttccattattgatcattggtggaattatagcattggtgacgtcacattcataatcgatcaggaggaagaaaacgaatgggatatgatattgaaaaagaaaaaagagaagcaattgaagctgggcgcagagctttgaacagtcttcaggcagcaaaagaaaatttaaacagtgcaaagaactggggactggtagatatgtttggcggcggctttttcactacgatgttaaaacattctaaaatggatcaggccaaacggaatatggaacaggcaaagtatgatcttcgtaatttcagcagggaattaaatgatgtaaatatggtatgtaacttgaatatcgatactggagattttctttcttttgcggattatttctttgatggatttgttgtggactgggtggtccaggatcgaatcaataatgcaaaaagacaggtagaagaagctattcgaagaacagaaagtatcgtcaatcaattacagcgtatgtaaaggaaaaggcagtgaatcagaaatggttcattgcctttcgttacataatggattattttaatttttctttctcggcatttaagagatcaagattaagcccctgttctccggctgtcttatctacccaaagattcaaagagtctatagctaaagagacttcatcaagttttttactgatataagcaaaatctttcatttcatcatcgctgatcttaccgtcacgggcaatctggatcagacgaccggtaagaggattgatttcatttagactggcaattgtctccaaaatgatattggacagatcggtcacttcaacttccggaacataacgatagccgatttcgcatttgtgagagcaataataattgcaaagatccggtcttttataggcatctgccatctggaggatatcataaggcgtaggttcttgtgtttcatattcgaatttttcaatttttgaatcagagacagcatccatcttttcactggcctctgctcttgtaagtcctgccgcttctcggcaaagctggtaaattgttttgttttccctggtggattgcttacccatgagaatttcctccccgtatatcgccaaacatgaggagtatcaatagttaagtcctcatgcaagacgtatatttctcgtatagagtttattatacttgaattatcaattaacaacaagctcaataatgaacatggagtcaaaaagagtgaaagaggaaagagagggtacagaatgagaaaagcaagaagtgattgtagcgtaggaaaatttgaaaagaagaatggattaccaccagggacagtaaaaaagccaaaaacaccgtctcccagtattccaaagatgattcaatatgcgggtagtgcagctgctgtagttgctataccaattgcatcgagtctaattgtatcaagtattgataatatagttgctttgtgttgcaaacatcacaacgatgtgcatagtggtaaaattgatatttttaaattttaataaagaagaaagaacagtatgaacagacaggaaatcaatgaatttattgaaaaaatggaagaagtaggtgatgtttggacggaagagcaggtaaatgatgtgtatggtgacagtagctttgaggatgcattagctgatagacaatccggtcttgaccatatgtccgacattataagtaaagttatcgacaaataataaaagaaaaaatcaatagtatctgtaagggcgtcagtggagtattccactggcgtttttgttttttctaatttttatgctttctttaagaaaaaggactaatagctaggcagaaaggaaacgaaagcgatattgcttggggataaaagatggactgagcctaaaaagtacggtaaaatcggtattagaaatgaagctctgaaatcggagcagatggagggtaatcgttatgatcagaaagatgcagaacatagatattaatagagttgctgatatatggttaaagactaatttgaaagcacatgattttatttctgagcaatattggacaagtaattatgaattagtgaaagaaatgatgtcacaagcggaagtctatgtgtatgaagatgataaaatgattcagggatttgtaggactaagtaacgaatacaaggaagggatttttgtttctaatgagatgcagtcatgtggtataggtaaacttttattagactatatcaagaataaaaaagttagattacgattaaacgtataccagaagaatgccagagccctctctttttatcaaagagaagggttcgatattcaatctgaaggtttgctattggaagaaatataaataaatatcatcgttttttatacgaaaaactgagaaaatatcctgaacaagttgcagagccagaaagctct

SEQ ID NO: 2511 - DNA, 1063 bp, Unknown
  gut microbiota DNA sequence
atggatgcacctcaggatacgatcaatgccctgaccggaaagatcggaagactggaaggaatttctgcaaaagcagtttactcgaaataggagacatgcatgaacagagacatactgagtaagatcgaacaggagcagatgatcagccgtgaggagctggaagaactgctgacgacaaccgatcaggaactgatcgaggaactgtaccggcgggcgagagcgacagccgggaaatattatggaaaagagatctacctgagggggctgatcgaatttaccaattattgcaaaaataactgttattactgtgggatccgctgtggcaatgaaaaagcgcagagatatcggctgaccatggatcagatcctttcgtgctgtgaaagcggatgggaacttggttttcggacctttgtactccagggaggagaagatccttattataccgatgagcggatctgtacgatcacaaaagaaatcaagaaacgatatccggactgtgcggtgacgttatcgatcggagagaaagaacgggcaagctatcaggcgtattttgacgcgggggctgaccggtatctgcttcggcatgagacggcagatgaggtgcattatcagaaacttcatccgtcacagatgtcactggcacacagaaaagagtgtctgagggaactgaaggagatcggatatcagacagggtgtggctttatggtaggatcgccgggacagacgctggataccttatatgaggatctggtgtttatcaaagaactccaaccggagatggtgggaatcggaccgtttattccccatcaggataccccatttgcagaagaaaaggcaggaacgctggaagataccttacggcttctggcaatcatccggctgattcatccgatggtactgctgccatccaccactgcactcggaacgatccatccgatgggaagagaaaagggaattctggcaggagccaacgtggtgatgccaaacctgtcaccggttcaggtgcgggacaaatacacactgtacgacaataagatctgtacgggagaggaagcggcagaat

SEQ ID NO: 2512 - DNA, 4147 bp, Unknown
  gut microbiota DNA sequence
gcaaatattccaacaccaactttaattaactttcccctggaaattcgtcatatcattggaaaatattcccgtattaatctgtacccgttctcctgcaagcatatttgccaccatggattttccaaatctccttggacgactcacgcagatatacttctgttctgtacagataacttcccatttctgcacctttctctgacattcttacttattatcatatagtatcatatttttctgtcaggcaaaacagtaatattctttgcgaattctaatattttatccaggctctcttcttctttttatacaatactatattttttactttcactgaaataatcttttttacgacaagcaaaaagcgaaaagcctttgaaaaacttttcgcctcttgcaatcacctcatttattttatgacagcggaatatacgcatgatacagttggtcatttccttttgctaccggtccggcttcttcgtaccagttgtattctacttcttcctcttcgtctccccacacttccgggcaatcggtttcttcccagtctaacgggattttgtgatgatcctgccgggatgcttttaacataatctggtgcagttcttcgttttcttctgctgtcagcactcctggttttgctgagacaaacagagaggttccggactctgcaacaacatccgcccactgacggttcaggctccacgggatggaacccgttatacctacgcagtccgcatccacatcaaaaaatgttccatgctgtggcagacagaatgccagggtgttgactcccattttctttgttctctcccaggtgataccgctggtatcgtctccggttcgctgcagctgcatcagacctgcccccagatggccgatggtattacagcccatgatcagggtatggtgctttttcgcagcctcataaattgcctggtacagtccggttacaatctccgcactggtctttgaagtatcgtaaaattgccatccgtcctctgtcgggaacgggttcatctccacgccccaccttccgaagatatcaaaagtggtaaaatcatgtttgatcagtgtataaccccagttacagatcctttccacatcctcctgaatataggaaaggactcccggatgggaaggatccagacaatcgttatgggataatctccattccttgggaatcgtctcttcttcattcaataagaatcgaacccagatgccagggcgtacgcctttttcttccagtttttttgccagtgcactcatatcagggaattttttatttccctttttccatggaccaccattgtactcattcaggcggtgatgttcctgccagcagtcatcgatcaccatatacggcggattgtccacgcctttggtcagttccacgatatagtcggtatcctgcaggatctcttcttctgaactgtctccataagcataataccagttattacttccataaaccggatagtccggtaagatcggatcggtgcacatgactttgcaaaactctctggcactttcgaaagtccccattccttcagtttgcatcgctacgatctgagcagcccgaagttttctaccggaaagctgcacaccgctaccgccacagcgcacatccatcaccagtgtaattccacgggtatctgcctgccagaaacacatggcggaaggtcttaccttgaccccatatcctgtcacagtttctccgaccgctgccagaaaataccacggcataaaacggctgccgctgacacctttccagtccacatccccgtacgttctctcccaggagccgccgaggatccgtgattttttatctaccggtgtattccaacgaagcttgatcgtctttacctttgtctgatctgcggtcagccagacttcttctgcttccggtgtggtttcatatgttacaacaacatcgtctttttctgttttctgtgcatccttctccccgatccagctgccatcttctgtctctacagtaataaacgaaggaattcctaatctgtattgtttttgcataatcctgtctctcctttttcattcggtaagttttcaggctgacactagagcgtgtctgaaaaaggcttttcgtgagctgcgagtcccagtttgtgggagattttatccgaataagggcggcgtagcgggctacgtcaaccgaatgagggtaaaatctcccacaaagtggggctcgcagattgcggaaatgatttttcagacacgctctaggacggaagcatcggttatctgtcagagccgatgcttccctttttgcattttgcttttcagcaggatgcgatgtcggcgaacgacgaatggagatcatgatagaatccgatgagatacgaggagaatatataatgaaaacaaatacattattaaaacagatcagacaggaacatgcgtctgcctttacccacggcggaaagtttcatgcagatgatgtgttttctgcagctctgctgttatatctgaacccggagattacgatcacaagggggaataaagtgccggaagacttcgaggggattgtttttgatatcggaagagggcagtacgatcatcaccagaaagacagtcggatccgggagaacggagttgcgtatgcggcgcttgggcttttgtgggaagcactgggggcagagatcctgggagaagaactggcacagaaatttgatgaagcgtttgtacagccattagataacaacgataataccggtgagaagaatgaactggcggcgctgatcggaaactttaatccgacctgggatgccagcgggagcaacgacgaagcatttttccaggcggtcagtgtggcagggatgattctggagaataaattcgagcggtatctgggaaatgaacgggcggacagacgggtggaagagattcttgaagcgcatgagagagcgttacagttcggcgaaaagacagaaaacgaggcgaagattctgattcttccggaatttgtaccgtgtcagaaaagactgtcggagacggagatagcatttgtgatctttccgtccaaccggggcggatactgtatccagccacagaagaaagaatattcactgaattacaaatgcagtttcccatccgaatggctgggtctggaaaatgaagaattacagaaagaaacagggctggtaagtgcgggattctgtcataaaggaggctttctgctgaccacagggacgttggaagatgcggtgaaagcatgcgagatcagctttgcagagtacagggaagaaccggtacttgtgaactttggtggaggtgcagcggcagatgaactgcttggaaaactgccgggtctgcagactgcgcggatcattcatatggattatgcggaacttccggagctggaacttcatggaatctacggggaagttgtgatggaaaagcaggaatggaaagcgtttgtgaaaacacaggtaaagcagatcctgaaatataaaccggaggcggtttatgtggcagatcatatgtttgcagggtatccggttgtgcatgcgctgagaaagaaacatattccggtgctgacgatggtggaaaaggacggacagaaacttttggtgagaatcccatcgggatcataaaaaaaggcagcttaagctgccttttgggttccgagtggtaatggtgcatttataggggattctttgtgaggcgaagttttttgatacagatagaagatacctccaaagaatccgaaaatcagacctgtgtaacccgcagaacaaaagaggacaactgttttggtagaaagggaaatggtgctgatcaggcagacaacagaaccggcaagcagtccgatcagtgtccatcccgccagcagcgctgcgagaaacattgctgaaacatgtgagctttttacatgatggttcataaaattccatacagtcttatacataacgatccctcatttctgtgtttgatcttattcatattgttttcttttactgtcatgattataaaaaaactgtgtaaaatacgcatgcgcagtaatgaaaaatttatgtaaaacttgcatggaaagcgttgcaggaaattatgagaatacacagtgtggagggagcttctacaggatctccccgtgaaatcctgcagcttggttataaagttggattgcaac

SEQ ID NO: 2513 - DNA, 8635 bp, Unknown
  gut microbiota DNA sequence
gcagtcaatcagccggatcttcaccggaatctcttctcccagattgacatttaccgcttctttgggaataaattttggttccacggttgtgatcgttttccccgaaccggagaccggaagctgatcccgcacctccgccgcatcctgttcctccatccccggaagtgccagaagttccatgaaccgccggataaatgtcgactttcccgtgcgaaccggtcctaccacgcccagaaggaactgtcctttggtacgggcttgtatatctttgtagacagcaaatggctccatataaaaaacctcctcacctatactactactcagtatatgtgagaaggttttcttctaataccggatttttattcttcaccgtctccggtcgatgactgttccgctgccagttccctgcgcagctgatccagatattgtttttcttttttactcagcaccgcatcttccagaagttccggacggttcctgagcgttcgtaaaatagactgttctctccgccatttttcaatattggcatgatgaccggaaagtaagacatccggcacttttttccccatccattccgccggacggctgtactgcgggtattcgagaagattgtcgtggaacgaatcaaattccgcggactcttcgttattcagtacgcccggtacaaaacgggagatcgcgtccatcataaccagcgccggaagttccccaccggtcaacacataatctccgatcgatacataatcggtcaccacttcctcgagtacgcgctcatcaatcccctcataatggccgcataaaaatacaagatcctgttctttcgcaaagtcttccaccatcgactgctgaaatacttttccctgcggcgtcaggtagattacacggggtttgtagccgatcgattcggtcacatgtttccaggctccgtagacaggttccgcctgcatcaccatgccggctcccccgccgtatggatagtcgtccactttcatatgtttattggttgaaaaatcccggatattggtagcagtcagctggatcagcccctgttccatggcgcgtcccatgatgctggttcccatgccctgctcgatcatctcgggaaacaatgtcagtacatgataatgcataatttttccttcctgtaattatcagatcagaccatccatcagatggatcttcatttttctggtttccacatccacgtcaaggatgcagtctttgatcgccgggatcagaacttccccgtgttcttctgtctgtatgcagtacacatcgttcgctccggtctgcatcacatcgttcagaacaccaaatagtgttccatcttcgagttccacctgcatatcaatcagatctgcaataaaatactcgtctttttttaattttactgcatgttctctcgttacatacaggctttttcctttgtatttttcaatgtcattgatattatcaatgcctttaaatttcaaaattacaaactgtttgaaaaattttaccccttcgatttccagatctttctgttctcttccggtatccagaatgacctgttttaactttttgaatcggttcgggtcgtctgtcgtaggaaatacctttacctctccccgaatcccgtgagtgctggagatcactccaacctgcagcaattgttccatatctgtactcctctttgttcgcatagtatcaaaattagttcactggaccaatcattgatatgcaacgcaacgagataaaatacgctccgcgaatttggctcgttgctcgcgtaaaatgaaaaaggatatagcccatcagctatatcctcatattttcagctattgcagaatttcaactacaaccttcttatcacatttagaggaagcagcttttaccacggttcgaattgcctttgcgatgcgtccctgacggccaatcaccttgcccatatcggaaggtgccaccttcaattctaccaaaatcgcattgctctcttcagtctgggttactaccacttcttccggatggtctacgagggattttgcaattacttctactaaatctttcatcacgcacctccacgcatttgtcagtatatcttcttttctcagaagatataccaggcaaaaacgattccgcagtccttatcggatctgcattatttttcgataccagctaatttgaagattttgcttacaacttctgtaggctgagcaccgtttgccagccattttttagctgcttcttcgtctactttgtatacgcttggatcacaagtaggatcgtatgttccgatctcttcgatgaatctaccatctcttggagatctggaatctgcaacgatgattctatagaaaggtgcttttttctgacccattcttctcagtctgatttttactgccattttaatttcctccttaaggttatccttgtttattatagttttatttgtttatttaaaagggaagcttgaagccgcctcttttaccacttttgccacccagcataccaggcatctgtttcatcatctttctggtctgatcaaactgtttgaccatccgattgacttctgcgatatctacacctgcgccctgggcgattcgtttctttctggacgggttcaaaagatccgggttggctctctccttcggagtcatcgaaaggatgatagcttcttttctcgccatatctttctcatcgatcataccctcgatatcttttgctttgtttcccagtccgggaagcatgttcaatacactagaaataccacccatgttcttcatctggttcatactttccagataatcatcgaaaccaaaggttgctttcttgatcttctgttccatctcacgggctttgtcttcgtcgatgctctgctgcgccttttcaatcaggctcatcacatcgcccattcccaggatacgggaagccatacgatccggatagaactgttcaaggtcggaaagtttttctcccatacctacatacaggatcggttttccgctgatcgctttgatagaaagtgccgcaccgcctcgggtgtcaccatccatctttgttaagatgacgccgtcaatgccaaccttctgattgaaggactctgccacattgactgcatcctgaccggtcatcgcgtcaacgaccagaattgtctggtctacctgaacttcttctttgatctgaatcagttcctgcatcatatcttcatctacatgaagtcgaccggcagtatcgagaatcacaacgttgaagttctgattctttgcatgttcaatcgctgcttttgcaatgtttaccgggttctgtttgtctcccatcgcgaaaacttccacaccctgtttttcaccattgatctgcagctgtgtgatcgctgccggacgataaacgtcacatgctaccagcaatggctttctgccctttgctttcagctttccggcgatctttgctgtggttgttgtcttacctgcaccctgaaggcctgccatcatgatgactgtgatctctcctgccggacgcagtgcaatctctgtggtctcacttcccatcagagataccagttcatcgtttacgatcttgattaccatctgccccggattcagtccgttcataacgtcctgaccgatcgcacgttcctgcaccgctttgataaactgttttaccactttaaaactgacatctgcttccagaagtgccatcttaacttcttttaatgctacctttacatctgcctcggtcagacggcctttgcttctcaggtttttgaatacattctgcagtttttcagttaaactttcaaatgccatgtattataactcctctaatatgctgtgggataaagtctcgatccggctcatcacctgattcagattcttttcctcatagtgttgtgtcagtccgtgaatctcatgtactttctcgcggaccgctacgaacttttctaccagatgcagtttttcttcatactcttccagtatcctggtactgcgcttcaccagatcatgaaccccctgtcggctgattccctgatcctgcgccacctcactgagcgaataatcattcaacacaacatcttcatagatatttcgctgatgttccgtcagcagttcgccataaaaatcatataacaatgcctgtctcgcaagcttatccatgttcatcaccttggacatcatacaacaatcttttatgggtgtcaagtactttttcttgacattgtcattttatgatgttggaggcaaaaggtattttatttttcttccacaaacacatattttttcagccgttcaaaagcttcctgcactctgctgagtggcagtgccaggtttacgcggatgccgtacggggcaaagaacgggcgaccgtcctgccatgccacacctacatcccaaccggctttgaggacctcgtcgatggtttttccatgtgtcttacaccattcttcgcagtccaggaacagcatataggttccctgcgggcggcttaatgcgacaccgggaaagtgttctttgatgaaatcgcaggcataggaaacatttccgctcagtacccggcacagttcatccacccactcataaccttccggtttatatgcaccgatcagtgcatacatggaaagtacattcatcgcattatagtgtgatttactgctggctgccatcacccggtcacgaagataggaattgtaaatgatatgataacttcccaccaggcctgccaggttaaaggttttgctcggcgcatacatcgccacggtgcggtttctcgcatcctcgctgacagactgtgccggcgtatgatgatatccttccaggatcagatccgaccagatctcatcggagataaccacgcagtcattggccttatatacttccatcgctttttcaatctcccagcgttcccatacccggccacacgggttatggggattacagaagactgccacatggatatgatgctctttgatcttcgcatccatatcttcataatccatcctccagattccttccgcatcttttttcagcggactgtgaaccatcttatatccataatttccgatacttccggtaaatccgatataagtcgggctatgcagaagcactgcatcccccggacttgcaaatgcctgtaatgtagacagaacaccgccgagtacaccattttcatacccgattgcctccgcagtcagtccctctacaccgtttcgtttcgtctgccagtcgataatctcctgaaaatactcttcccgcggatcaaaatatccaaatgccgggtgctttactctctccgcaattgcctcctgtacagtcggtactgtcgcaaaattcatatccgccacccacatcggaataatatcaaatccctcttttggtttcgccggacttccctgtccgtcttcactgagaccatctaccgcaatcgcatccataccgtgacgatccatgattgttgtaaaatcgtatttcatttgtaaaaacctccatgtatataattactcttatcagtaactgctccacaccttcacagttatctctattatatatgttttctgtataaagcacaaatgtaaaagcaggcaggaatactatctgaaactagtttcctgcccgtttttccatcactttattgtctgtacattcgtttgtattcaggaaagcttcgggaataacactttcaccgtcggatagatctgcacaaatttccgatactgtgtctcgtatttttttgcgatctccgggtccggttctacggtttccactacttttacgatctttgcagctgccgcttccaccgatgcaaaggttccatccgcaactgcagcaagcatcgcaccgccaagcgccggtccctcctcggaagcgatccggtctactttgatgttcaatacattggcaatgatttttctccacagcggactcttcgctccaccaccgcagatcttggttctctcgatatgaattcccaaagattttgccacctcaaaagaatcacgaatggcaaatgccacaccttccagaaccgcctgtgtcatatccgcacgactggtatccatggacatcccgataaaggtgcctctcgcctgcggatcattatgtggggagcgttctcccattagatacggcaagaaaaatacatgattttctccaagattttcaattgcttcctgctcttttccgtaatcttttgttccaataatggtatccatccaccatctattacaggaagccgcgctcaacatacatcccatcagatgataatgtccgtctgcatgagcaaatgcatgcagggcattgtgcgggtctacgccgaaattctcactggaaataaagattgttccgctggttcccagagacacgttacactgtccgtcccctaccgtaccggttccgacagctgcagccgcattatctccagctcctgctgctaccagacaggtttccggcagtcccagttcttttgccacctccggttttaatgtgcccactttttcataactttcaaaaagtcccggcatctgttctctgctgacgccacagatttccagcatctgttctgaccagcatttgtttttcacatccagcagaagcataccggacgcatcggagtaatcgcagcaatgtacaccggtcagacagtaagccagatagtctttcgggagcataatcttacagatttttgcaaaattctccggctcattttctttcacccacagaatcttcggtgcggtaaatccggcaaatgcaatatttgccgtatattcggacagtttttctttcccaattacctgattcagataatcggtttcttttgtggttcgtccatcgttccacaggatcgccggacggatcacctgatcgttctcatccagaataaccagaccatgcatctgtccgccaaagctgatacctgccacttccgtcgcatcaatcttgctgatcagttccttgattccctcttttgactgttcccaccagtcttccgggttctgttctgaccagcccggatgtggaaaggacagcggatattctctggatacaatattgacaacctgaccttcctgatccatcagcagaagtttcactgcagatgttccaagatctactccaatataatatttcattcttcaatttcctccatgtatatgagcaagaaagcattctgtaacatacgagagcgtgttttcaaacttctttgaaacacgctctcaaacctatgcattttattcgcagttttctattactgcccgatgtttttcacactcgttttgaacctcaaattccactgctgtcagtttatgcaaaaggattttctgtcggatatctgtctccctttggatggttgtatccgatctcatccggtgttacgccgatgtatttgaatacttcaaacaatgcttttccatagtgtccgaatgcaacggctccgtgatgtggatagcctttttcgatcagctcatgacgatagaatcttcccatctccggaatcgcgaagataccgatgccaccgaaggaacgggtagcaaccggaagtacttcaccgtttgccacataagcacgcagttttccatccgcggtgctctgcagacggaagaatgtgatatctccaggtacgatatctccttccaatgttccctgtgttacttcttccggcagggatcttgccatgatcagctgatatttcatagagcaggaagtcagttttccggttgtggtattgccacagtggaatcccatgaacgtatctttgagtgtatagttgtattttcctttgatttcgctttcgtacatgtctgccggtacggtattgttgatatccagcagggttaccgcatcgttacttaccatcgttccaatgaattcgctcagtgcaccgtagatatccacttcacaggataccggaatacctcttccggtcagacggctgttgacatagcacggaacaaagccgaactgtgtctggaatgccggccagcattttcctgcgatggcaacatattttctggaacctttatgggcttcgatccagtcaagaagggtcagttcgtactgtgccagtttcggaagaatggtcggtttgttgtttccatcccccagttccttttccatatctgcaacaactgccgggattctctcgtctccgtcatgtttgtggaatgcttcgaacagatccagttcggagttttcttcgatctccacacccaggttgaacagctgtttgatcggtgcgttacatgccataaaatcctgcggacgcggaccgaaggtaatgattttcaggtttttcagtccgacaacggctcttgcaaccggaacaaattcttcgatcatctcagctacttcttccggtgttcctaccggatattccgggatgtatgctttcaggttacgaagctgcaggttataacttgcattcagcataccgcagtaggcgtctccacgtccctgtaccagattatctccgtgttcttctgctgctgcaactaccatacaaggtccgtcaaaatattttaccagcagagtctctgcggtctccggaccgaagttcccaagatagacaaccagggcattacatcctgcttcctgtacctctttcagcgctttctgcatatccagctcgctctctactacagttggacattcgtacagttcccctttataag

SEQ ID NO: 2514 - DNA, 7254 bp, Unknown
  gut microbiota DNA sequence
ccggaatcggtttattcgtcacactctatttatttccacacaaaaagaacctgcctgtctccttggcggtatggcagatattaccattgtacgggatccggtctccgatactctttccatccgtaacgctgatctgattcctctggtcactcattataatcacgatcagaatatctatactgtttacaagctttccgattacaccgaggatcttgctgcctcccatggtgttcatgccgaaagcacagaacctttcactctggaaactttacaggaacaatataaaaaggtgctgacccaggattatcacaccctggggtagcacccgttttttactcattttaaaactagcgttttccaatataaaaactgacacgttctttcatctcttccacttttctcggcattctgttcattttcgctttgaacagatgcaatgaaaaatcaaatgtatagatcacaaccacgactgccgccaggtctctgccaaatcgaacagaataactgtcagatacgaagtttacaaatctctgcaggaagccaaacataaagattgtatagaatccccacgctatcgtactctccagacagatcacacctttgtaattaaaaggtttctccgtgtaatcccaccagacctgtccaaacagattgcgcataagcactgccgtaatatattccagcgtcgtagcaagaaccgcgcccgccagataaagcaccacatattggccttccagcggacgaagcatgccatacactgacaaagctcctactgcatagatcggacaaaagggtgaaaacgcaaatccgcgattagtcagtttcctgttacaaaatgacatatagatagattccactacccatcccatgaaactatacagaataaaccattggataaaatgatacagatctgtgccgtatactgcatgtgtccacatagaaatttcccctcatttctttttctgcacttatcggcagatttctattctgcgaaaattatatcatatgcctttgcaaaagactatacagatttcaaatcttaaagaaattataagatttgaaatctgtatacgtaaaagagggatcctgctcgcagtatccctcttctcatggcttacgccaatgtgcacatattaattatatttacgttttcttgcagcttcagattttttcttacgacgaacacttggtttctcgtaatgctctcttttgcggatttcctgctgaatgcctgcttttgcacagctacgtttaaatctacgcagagcactatctaaagtttcgttttcttttacgataacgtttgacatagtctcacacctaacctccctccagttgtagattgtgcataatacaactgtttgggtattttattgcactggtatttattatagcagatttttttatttcgtcaactgattttttgaaatttttccggtttttttgttgttttttccggactggaattatttcagctgtccctctaccaattctgctacttttgcgatagcttccggaatcttatccgggttcttgccgccggcctgtgccatattcggacgtccaccaccgccgcctccgacgattgcagccgctgctttgatcagattacctgcatgtgctcctttatccatagcaccctgtgttgccatggcaagaaggcttactttgccatctttggcagatgccagaactaccacaccttcacccagtttttctttcagctgatcgcccaggtcacgcagtccattcatatctacgccatcaacggcagatgccagaactttcacaccttttacttccacaacctgatccataacatttcccagagaatcctgagccatcttattcttcagagattcattttcactctgcagttctttaacttctttctgcagatgtgtgatcttttctgtgatctcagcaggactggtcttcagtgtttttgcgattgtatgcagattttcttccatttgacgatagtattcgatcacgttgttacctgtcagtgcttcgatacgacgaacacctgccgcaacacctgcttcggatacgatcttgaacagtgtaatattcgctgtatttgccacatgagtaccaccacagagttctacagagaaatcgcccatggataccacacgtacctcatcgccgtatttctcaccgaacagtgccatagcacctgttttcttagcttcttcgatacccatgatctgtgtggttaccggcagtgcagcctggatctctttatttaccagagcctctgtttctgcaatctcttccggagtcattgcctggaagtgtgcgaaatcgaaacgcagtctggtcggattcaccagagaacctttctgttctacatgagcgccaagaacagtcttcagggctttctgcagcagatgggttgcactgtggttcttacaggtatcttttctttcctgctcgtctactttcagtgttacttcatctccgttggagatcataccggattccatcacacctacatgaccgtatttgccgccacgaagtttgatggtatcttctacacggaatacaccgtttgcagtggtgatcacaccggtgtcaccttcctgtccacccatggtagcgtagaacggtgtcttttctacaaagatggttcctttctgaccttccatcagggaatccacgatctctgtctctgtggtcagaacggttactttggaggtagcttccagtttgtcatatccggtaaattcggttgtgatattgcggtcgatctcatcgtatacggttgcatcagcgcccatatagttgctgactgcgcgagtttctcttgcacgttttctctgaatttccatctcttccttgaagccgtcttcatcaatggtatatcctttttcttccaggatctctttggtcagatccatcggaaatccgtaagtatcgtacagacggaacgcatcagaaccactcagtacggtttttccggcttctttcatctctgtttccagatccgcaagaatcttcagaccctggtcaatggtcttgttgaactgactctcttcgttatgcagaacgttcaggataaagattttcttttcttccagttccggatatccgtctttggatccttcgatgacggtctcactcagtttctccaggaacggtcctttgataccaagaagacgaccgtgacgggctgcacgacggatcaggcggcgaagcacgtatcctcttccttcgttggtcggcataacgccatcggagatcaggaaagtagcggaacgcatatggtcagtgatcagacggatagatacatcgtcgtcatgatgaactccataggtttttccggcaacttcacagactttatttctcagggcacacagcgtatccacatcaaagatggaatctacatcctgaacaacaacagccagacgttccagccccataccggtatcgatatttttctgtttcagagtctcataatgaccttccccgtcattttcgaactgggtaaatacgttattccatacttccatataacggtcgcagtcacatcccacggtacagcccggtttaccacagccgtatttttctccacggtcatagtaaatctcagaacacggaccgcaaggacctgcgccgtgctcccagaagttgtcttcttttccgaaacggaagattctgtcagccggaacaccgatttctttattccagatatcgaaggcttcatcatcctcttcatatacggacggatacagacggttctcatccagacctaccactttggtcagaaattcccaggaccatgcgatggcttcgtgtttgaagtagtcaccaaaagaaaagttaccaagcatctcgaagaaagtaccgtgacgggctgtctttcctacgttctcgatatcaccggtacggatacatttctgacaggtagccacacgggttctcggcggaatctctgctccggtaaaatacggttttaatggtgccatacctgcattgatcagcagaaggctgttatcattctggggtacgagggaaaagctgttcattaccaaatgacctttgctctcgaaaaagtccagaaacatctgacgaagttcgtttactccatactttttcactgtatgttcctcctcatatttattgctgtcagaagctccacgattccggagctttcccagaaacattccggagcttccacaatttttctctatctttctactttagcacaattgtgatgtccgtgcaagtgacacccttcttataagcagattttcatgaattttttcttaccacgttttacaataagaccttcttctgtaatatcttcttttttcacgttgtaacggatatctgtaattttctctccgtctacggatacacctccctgctcgatggcacgacgtccttcagaacgggaagttaccagaccggctttacacagcagagaaatcaggtcgatggtaccatcctgaaaatcctcggctgccagtgttgtggatggcatattagctgcattacccgcagaaaacagtgctcttgcgccttcctgtgctttctttgcttcttcctcaccatgtaccagggcagtcagttcgtaagccaggatctcttttgcctggtttaactggcttccttcccatttatccatttcgtcaatctgctccaacggcaggaaagtgagcatacgaatacatttgaggacatcggcatctgccacatttctccagtactgataaaaatcaaacggagaagttttgtttggatccagccataccgcaccagactgtgttttacccattttctttccttcagagtttaacagcagggtgatggtcatggcacatgcgttctttcctaatttacggcggatcagttcggtaccgcccagcatgttactccactggtcgtctccgccaaactgcaggttacagccgtatttctggtacagcatgtagaagtcatagctctgcatcagcatatagttgaactccaggaagcttaatcctttttccatacgctgtttgtagcattctgcggtcagcatacggtttacggagaaatgcggtccgatctcgcgcaggaaatctacatagtttaatcctaacagccagtctccattatttaccatcagtgcttttccgtcagagaaatcaataaaacgctccatctgttttttaaagcaatcacagttgtgctgaatggtttcctgtgtcatcatctgacgcatatcacttcttccggacggatcaccaaccatggcagtacctccaccgatcagtgcaatcggtttgtttcctgccatctgcagacgtttcatcaggcacagtgccataaaatgccctacatgcagactgtctgcagtcgggtcaaacccgatgtaaaaagtcgcttttccattattgatcaaatctttaatttcttcttcgtcggttacctgggcgatcagaccacgggcaactaattcgtcataaattgtcatgataaactttctccttttatgtttatttagaacaaagaatgtgtcttggcacattcccgcggaacatttttttactttacgggaaagcaatttcctgtaaaataagaaaacctggcctcgtccttttttataggacggaagccaggttccgtgataccacctaatttcacagaaggttcgcacctcctgcctctgtaagtacaggcaaatctatactctgacccgtataacggaggtccttccgttgcagcctaccagcacgatgcgttcggtgcaaagctcaaagatgtattcacagaaagttccccgcgggcctctcaccaaccggctcctctctgtgcggatgcttgctgctactggttcttatcaatgcattttcttatgaatcaatcatatggatgtagtatacaaacttctgctttttttgtcaaggggctgatttgccgtcaaagttactgtccactccgttttcggtaactatttccttactctgccttcaccgggtcacttacgcttacttcgtggtcataccattttccttttgttccgaccagtgccagatcaaaggtttcatccagtgcttttaccggaacatcaaagccatatacttcttctgtacttccgtcatcataggtgatcgtatcggttgttggctgcagaagttctgcaccgtctttctgtgcatctgccgcttttcccacatacaggtttacgatattcttagataccaggctgatatgaatcgtcatttttccgtcttttactgtcaggataccttttccgtcatttgcttcgttaacatggaacattccactgtctgtgtcaaattctgcttcataagtaccatcttccagtgtgccggctgtttcctctgcctcttcggaaccagctgcatcatttccatccattgcagctttggtatgtgctacatacagatcctggatggaagcgatctctcccagtcctgcgatctgggtatcgatctggtcaaatgctcctgatgcctcaaactggctcttccaggaatcctcatcatctccggccatatcgttgtttgcatggtctccggctactaccatcagcggacgaagcactacttttttgtatcctgcttctttgatcttttcgatcactgcttcgcatgcagtatcttccggctcgccttctacggtaccgataaatacattgtcatatcccagattgttcatctggctctgcatctggctgtagctgatttttgcagtgtgggaagttccgtgtcccatgaatacaaatgcggttccgtctgcttccgcaacttcaagactgtcgtatccggctgttttcactgcttctgccgtgatggcttctgctactgcttttttgtcatcattgactgcatcgtcggtatcaccaacctcgtccagcagtggctctgcgatcgttacggattcaaatttgtctttgtagccttctacggcttcggtcagctcgtcatattctgctccatgcatcagatgggtcggctgtaccaccaggttctttacaccattgtctacggcacgctgcagggcctgatccatattgtcgatcttctcgtcatcacgagcctgtacgtggttgatgatgatctgtgcggtaaaggctcgtcttacggaccagtccggatatgcggtctgcagggctttctcgatacctccgatatctgctgtacggctgtcattgaaagaagtaccgaaacttactaccagcagttcgttgtcaccgatgtcatctccgtttaacggatcgtccttggatgcgtcacc

SEQ ID NO: 2515 - DNA, 3190 bp, Unknown
  gut microbiota DNA sequence
aaccccgcatcagctgcggcacacttacattaccaatcttctctatgctggtgttgattcaaagaccgtccaataccttgccggacacgaaaacagcaaaacaactatggacatctatgcaaaagtgaagtacaataaaccggaggagctgtttggggtagtaaatggtgcgtttcatcaggctattgctgaatgaaaaaaggccgttttttatggtccgcacaccggataactgagaggcagaaagccggaaaagcccggagtatcaagggaaaacagctcaaaaactcgcgcagtacggtctcaaagcagctcgtcgcgctccgcagttcagcaagagataatcgactgctcagactatatcaaaatggtttacaaaacccccggaaaatcaaggttttccgggggttttttatgcccaaatgggctgagatagtttgaccccatttgacgcctacgctttttctattttcagaagcaatagagcctttttcaccgcttctgttgtgatggctttagcctgttgagcgcatcggagtttctcccaacggagaaatggagatgtgtgaagcaataaaccacccgctattctcaagccgacaaaaaatgctatgcaaaacccgaaaattttgcttcggacggattgacaaactctgcttattgatatataattcgtattatacataacgcaagttataaatacggaggtgcgaatatgccagcaaaagcaaaagtcacaaaagagatgattattgacgcggcctttgcgattgcccgtgaagccggcgtggaaaacatcaatgcaaggaccgtatcagaaagacttcactgctccacacagcccgttatgtatcatttttcgaccattgaagaactgaaacggacggtctatgcgaaggcagatagatatcactcagaatatctgatgaatctaaagagtcctcagaaaggcgtcatgcttgggattgggatgaactatatccgctttgccattgaggagccgcatttgtttcggttcctgtttcagtcggattattttagtggagcaaccatgcttgagttgattgacgcagacgagctgacaccagtcctttctgcgatgcagaaagccttgaatatgagtatggagcaaaccaaaaagattttcctgacgatttttctgtttgtccatgggtacgcaagtatcattgccaacaattcaatgaagtacgatgaaaatgtcatacaatcacatttggaacgggcgtatcagggtgcaatattagcggcacaggaggaatgtacatgaaacagtcagataggaaaggcgagctgttagaatggcttcgctgccctagatgtgacggcaaaacaagaacacagatacgcccacatacggtattagaggactttcctctattttgtccaaagtgcaaatacacctgtgtgattcgttttaaagacggaaaaattgaagaaatcaaaatgccagacgcttagacgcagtgcagaccgatgaataggtttgtactgcgtcttttttatcacatcaattgagaaaagaggaactgcaaattttttggcatgagccgttcggaatgtacagatagagcaaaactgctcttacagcgactggaactggcagatgtgatggatcgcaagctggccacttattctaccggcatgcgccagcggctctctttggccagagcattatttcaccgtccgcagattttgtttctggatgagccgacctccggccttgaccccgaaagcgcacagaatgtgaatgctctgattcaggagcaggctgccgaaggaatcacagtatttctttgtacgcatcagcttcggtatgcgcaggaaatctgtacgacatacggacttatgaacaagggacgcttaggagcgcggtgtgaatgtgtccggcagaattatgttggaggaggcggatatccacagtctatccatggaagagttgagaaaaaatgtgggactgatgtttcagacaccggcaccgtttccgttttctatttataaaaacctgacctatgcgccggtttactatggaatccgggataaaaaaaagctggaaaagattgtagaagagacactaaagctgactggtctctacgaagaagtggccggagaattgcataagagtgcattaaagctttcaggcggtcagaagcagcgtctgtgcattgccagggcgctgacggtggagccgaaggtactgctcttagatgaaccttgttcggctctggacgtgaaggcttctgccaaaatagaagagctgcttaagaacctgaagggagcgttataccattgtgattgttacccacaacctggcgcaggcaaagcgcattgcggacgatgtggcctttttccagaatggacggctggtagaaacaaaggatgcagaaacattctggaaaaagccggagtgcgaagagacgaaagagtttttaaagggatgagttttatccgttctgttcagttcttcgtatggatggaaaccagatggccggtgtgaatacggaaataccggtcatttgcttgtctgtcgtgttttccacaatatggggaaggttggatcgaatcagcgtcgaatccccttccatcaggtgaattctctcggttccgatgataacatccagttctccggactggaccatgatgatctcctcactggggtgaatcacagggcgttcgccatccttagcatgtgcttccagctcaaaaccgataatcagagactgaggaacaaattctgccgatggcatcggcgtcagcagatggtaacggatattggaatggggctgtgataaagtgatgacctgattttttctggtagtcagtgtgttgtcagcttcggcttctcccataaaaagataggtgggaacatccagagcagcgctgattttgcgaagcgttgacagggatgggtccgtcagattgcgctctatctgggatatatagccaatggaaagtcctgtctgttcagccagggcttttagtgtaaagtctcttgattttcttatgttgcgtatctgctcaccgagcatattgtaatccccctgttcgatgtactttattctatgatcttcagcggaatccgctgtctgtattagtataccattgtttttgtaaataaaccagagtttgatttgttttatatatataaaaatattaaagtttactattctcc

SEQ ID NO: 2516 - DNA, 1712 bp, Unknown
  gut microbiota DNA sequence
ggaaatgatttttcagacacgctctagaacatactggatttacttttcttaccatcctggtaaatcacaattgaattttcttaaatatctgtcataatccgaaaacaattatcccagctctctctcactcatatccagtgccgctgcgatcaccgcatccatatcataatacttatattcacccagtctgccgccgaaaatcacatcagtttctttctcagcaagttttttatattcttcatagagttttccgttcttttcatcattgaccggataataaggttcatcgcccggtttccactcggagctgtattcgcggctgatgactgttttcggaagatcctgaccgttctcatcttttccgaactcaaaccatttatgctcgatgattcgtgtccacggagtctctgcgtctgtataattcaccgctgcatttccctggaaattcggtttgtccagtacttctgtctcgaatcgcaccgaacggtattccagcgtacccagtgtatatgcaaaatacgcatcaatcggtccggtatacacgatcttttctcccagactgtcgtaatactctttcttctccagataatccacgccaagttctacctcgatgccatcaagcatattggcaaccatctttgtgtaaccacctaccgggattccctgatacagcgcattgaagtagttgttatcaaaagtcagacgtaccggcagacggcggatgataaatgacggaagctccgtacacggacgtccccactgtttctgtgtgtaacccttgatcagtttctcataaatatccgttccaaccagagagattgcctgctcttccagattcttcggctcggtgatgcctgctgcctgtctctgttcttcgatcttggctgctgcttcttccggtgtcaccacaccccacatcttattgaaggtatacatattaaacggcaggctgtacagttcacccttgtaatttgccaccggggagttcgtaaagcggttaaactccgcaaaagatgtcacatagtcccacacttttttgttgttggtgtggaaaatatgcgcaccgtatttatgtacatgaatcccttcgatctgctctgtatacacatttcctgcgatgtttgggcgtttgtcgattaccagcacctttttccctttttttaccgcttcccgggcaaatacggcgccgtacagaccggctcctacgataacataatcatatgctttcattttgtttctccttgtatctttttctttccgtctcgctgtcgcttcttccattatatacagcctccggcaaaatgtcatcccttttctttttctgcccgttttgtctcatttttacaaccatgcgaattccctaagttttgtaaaattatggaagaactcagaaaatgagacaattttattttaccaaagaaaaaggagcttatcctgccatgccaaaaccaagaacatccaacggaaacaaaaatatgattggcaagaatctgatgcgtcttcgccagaaccgggaactttcccagcgggatctggcaagagaactgcaactgatcggatacgatatcgaccggaacgtgatcacgcggattgaaacaaatcagcgttatgtcacagatatcgagattcttgcattctgccaggtttttcatgtgacatttgaagatctgatcaaggatgcacaggtctaagattgattcttcataagagat

SEQ ID NO: 2517 - DNA, 41057 bp, Unknown
  gut microbiota DNA sequence
agaagatctgttgatcagcgtggaaggcggacaaaagccgcatattggctgtgtgattcagtccattccacgtccatctctgacaggtgatggcagttacagtgccacatcttcggtactgaatctgaccggacacaaagatgagtatctgtgccgaaaactttccgagcagatctgtgcagcatgtcagactaccgtggtgtgtaccgggggtgtgcatattgatcagattacaaaggaagaaatttgtgagattatgcggatcatagaagatatggggaatgttgttattcggtatatcaagaaacggaatgaggatccaaaataacagaactgttcaaattttctctcataaatcaaaaatttccccgtgacaagtcttatattttaacgtatagtattagatagaaaacaattaccaaccgacgatggaaaaccttcgggacgccctttccatcgtcggttgtgttatgaaaaggaaggggaaagaaaatatgtacacattcttattactgttaatttatctggcatttatcagccttggtctgccggattcacttcttggctctgcatggccggtcatgcatgaagcttttcaggttccattgtcgtacgcgggaatggtgacgatgattatttccggaggaacgatctgttcgagcctgatgtcagaacgtctgacaaagaaatttggtacacagatcgtaacggtgttcagtgtcatgcttactgcaattgcgctgtttggattctcaacggcaagtgctttctggatgctctgtctctgggcgattccatatggactgggagcgggagccattgatgctgcgttaaataactatgtggcacttcattataattcccgtcatatgagctggctgcattgtttctggggactgggaacgatcatcagtccttatgtgatgagttatgcactgaccacatcggtgtggcagaacggatatcgcatggtatcttttatccagatcggaataacattgattcttttcgtgacactgccgatatggaaggtgaataaaaaagaaactgcgcaggaagaaaaggcagaagaagagatggtaggcatcaaaggtgcactgaagatcaaaggcgttccgaatcttcttcttggatttttctcctattgtgcactggaatcagcagtgattctgtggggaagcagctatctggtaggagcaaagggaatctctgcggaacgtgcagcagcctttgcgtccctgttttgcatcggtatcacacttggaagatttctggcaggttttattacagagaaaatgggagaccacaagatgattcgtctgggcatcgctatcattcttgttggatgtatcggtatgttgttaccggtatccatcgatgaatttgcactgtttggtctggttattatgggacttggctgtgcaccgatttatccatctatcatccatgcaacaccgtccaatttcggagagaagaactcccaggcgatcatcggtatccagatggcaagtgcttatgtgggatctacttttatgccgccgctgttcggactgatcgcaaaccatatttctgtcggtttacttccggtttatgtattgttcttcctgattctgatgttctttatgctggaaaagacatttaaactggtgaaatagtaataatcaaacagcttccgggttacgtgtcagtttcctgaaagctgtttttgatttgcataattttatttgtaatagaaaaggatataactatgtataaagaaaacaaggatataacattacaatattataatcaaaatgccggttcttttgtcagcggtacagttcacgcagatctgacagatacactgaatcggtttttaagcagactggaaccgggagcggcaattcttgattttggctgcggttccggcagagataccaaatattttctggaacatggatatcaggtggaggccatagacggatccgaagaactgtgtaaaatcgccagtgcctatacaggaattccggtacgccagatgtattttcaggatctggatgtccgggagcagtatgacggtatctgggcgtgttcttcgattctgcatctggaacaaacagaattaagatctgtgctgaaaaaaatggcggatgccctgcgtcccgatggatggatctacacttctttcaaatatggagagtttgaagggatgcgaaacggcagatatttcacggatttcacctggagcagtttccagagattcatccgtgataccgagtcactttccatagaagaatcctgggtgaccggtgatgtgcgtccgggaagggaagaagaaaagtggctgaatctgctgttgcagaagcgataatagagaatggcacaaaaaccatccgttgtatcagtgaaatccttatttattccgtgcaatttcaataaaatccctggcgtatttgggaagataagttcccctgcgaaaagcgatgctcagtgttgtaaagattcctttttcaccgacagaaaagcaagccggttttctggaaaattccatattctgtatatatgtttccggcgtaaaacacatgcccattccctgcatacaaagttttacacaggtctccgtgttccggcttcgaaccggtacacggggctggacaccggcgcgatccagggcttcaagaaccagttttccggtggtctgttccggaaaatggagaataaaaggttcgctggcaagcgtggacagatcgattctcggataccggtaggagggagactgatatccggaagatgccaacggatgatccggtggcataaccagaagaatttcctctcttttcagcagttcgtatttcagttttggatgttccctcgtctcattaaaaattccaaaatcaagctgatcattcaacaggagtttttcctgaatagagtatgcctcttcccagatgctgacattgacattcgggtatttttctgaaaattctgccataatctgtggaatcatacagctgcttcgcatcagtggaacagcaatattcaattccccttcgttattttccgtcagatctttcagttctttttcccagtcttgttttacctgaagaattttacgggcgtattccatgtattttcttccggtataggtcggtacataagtatttccatttcggctgaagagtttcgctcccatttcccgttccagtttttgcagatgcttggtgagtgtgggctgggaaatgtagagttcctgcgctgccctggtaagattctggtgtttggcgatacataaaatatagtgcaattcactgtagttcataaaatccccctgactattctgttttggcataaaatttatgtaaaatatgaatttgacttcctgtactgcctattttacaatattttctatcagcttatcaagacatatcttattgagggaggaaaaacaaatgaaaaattggctggaaaaacagtttcggttgtcagaatttcatacggatgtcaaaacagagattcttgccggactgactacttttgttactatggcatacattcttgctactgtaccaaacatcatgtccggagccggatttgacaaacatgtaactctgacgattatgattcttctgattatcgtgactacctgtgcgatggcattgtataccaaccgtccgtttgcattggccccgggacttggaagcgtgggtattatcgcgtctatgattacgaatgagggtgtcagcgcaccgattgcagcaggcgttattttctggagtggtgtactttttatcatcatttcttttctgggactgcgggaagctgttgtgcgtgtgattccagtcagcctgaaacagtcagtaagtgccggtatcggtctgtttattgcgcttctgggagcaaaaaactgtgggctgatcgtagcaaatgatgcaaaaaactgcctgtcttttggtgatcttgcttctccgtccgttatcgtggcagtcattggttttctgattctgatggttatcaaggcacggaatgttccgggtggtatgattctggcgattgtgctgactacgattgtgggaattccgttcggtgtgacacatgctccggagcagatcttttctcttccggctggtattggcaaacaatttatgaatattgattttcttggagcgctgaattttgcttatattccgttcctgatcgccttgtttgtaccggatttcttctctacttttggtacggttctcggtgttggagcgaaagcaggatacctggacaaagacggcaatctgccgggtattgataaatgttttaaagtggacgctatttccacaagtcttggagcactgttcggtatgccgagcatgactacctatctggaatcctctgcgggtgtggaagcaggtggtaagacaggacttacggtcatctttaccagtattttctttggaatttctctgttcctggcaccactggctcttgtgatcccgtcagcagcaaccggtccggtactgatctttattggaatcaatatgttgagtgcaatgaaaaacattgattattccgatatcacagagtatatcccggcatttttgtgtgtgaccttcacaatttttgccaataacatcgcaaatggtatctgcgtggcactgccggcatatctggtaatgaagattgcaaccggtaagatcaaaaaaatcgatccggtgatgtatgttcttgtggctgtttgtctcttatatttttattctattgtataaatgaggtgaaaacagatggagaagattcagctgttgataaaacatgcgaaagtatttaattcgtatctgaaaaaatttatcgatgcagatgtctctgtaaaagatggaaaattctactatattgacagaaagcacgaaaatctgtttgatgcggaacatacaatcgatgcagatgggcaatacatgattcccggcatggttgatatccatatgcatattgagagttctatgacaacgccgggctcttttggaaactgtgcagcgaaaaatggtgtcaccacagtggtttccgaaccacatgagatggcaaatgtcaaaggggttcgcggaatccttgagatgatatctgcggcaaaagatgcacccattgatattttctacgggattccgagcagcgttccatcgaccagtgaaaaactggaaaccaccggcggtgtgattgattttgaggcgatgaagcatctgcttggtgaaaaagatgtggtctgcgttggcgagattatgaattatcgggaaattatccgggaaaatcatctggagatctcaaaatttctggattatctgcggcaggaacatccgggttatgtgattgaaggacattgtccgtctctggtggatctggatcttgcaaaattcctgtatcttggcattaacggagatcatacagaacataccttggaagaggtaaaacagcggatcgaaaatggaatgttctttgagatccaggataagatgttgaagccggaagtgttatcgtatatctgtgaaaatcatttatttgaatattgttcttttgtgacagatgatacgatggcagatgttttatatgaacaggggcatctgaatactgtagtacaaaaggcgatagagatgggctttccaaaggaacaggcgatttactgcgcgacctatacaccgtgtcagagaatgcatttttatgaccggggtgtgattgctccgggaaaactggcagattttatccttctgaaggatccggcaaaattactggagcctgaaacggtatttaaaaatggaatttccatctataaaaaagaggacagacaggcattccccgtagaaccatatgcattcccggaagatttttatcacagtgtttccattccggaagtaacactttcggattttgatgttaaagttccggtcgaagaaggggaagtaacggtccgtgcgatggaagtacatccggatcgcacccagaccacggagaaactggtaaccatgcaggtaaaagagcacaagatctgctggcaggaaagcggatgtctgctggcgatggttctggaacgccatgggaaaaatgggaatatcggttatggatttctgacaggttcgtgtcagagagagggaactgtagcaactacattttttcatgatcatcacaatctgtttgttgcgggaagtgatccggaggatatgttgttcgccgtacagagaatcggagaattgcagggcggttttcttacagtaaaagatgggcagattctctcggaacttgcattacctgtctgtggaattctttcggaggcatccattgaagcaacaggaagcgcgctgaaagaagtgcgggaaagtctgatcgatcttggatatgaacatcataatccgatcatgtctgtgggaacgcttggactccctgtaagtcctgcattgaaactgaccgatcatggattgatcgatgtaaaaagaggagaaatcgtgcctctggtgttatcctgttcttgatttttttacaggatttgctatatactatttcatagtttatcggagggtgatttgttgcattgcatatctgggatcatttcaaaaaaacggatctcggattcattggaagcaaaagccggataagatgtcaggttgagatacctgcctcttatccggctttttccatggagatcttctggcgggtatcctttcttccgattccgaagtgatcctggcagcgatcgattatctgaaagcatatgcgattgactgtatttttacggcggtgtttttctgttacatcggtttctacaatggtatcggcatgactaggttcgtcataattcagaaaatatatgaaacgttaaagaaaattttgtaccattgatttttttaaattaatattgtattatatctgtaacaggactccccacacctctcacgcaagtgatgtgtcccatggggagacattttgtattatggaggcgtagtatggtaaaaccaattatgagagatatctttttcctgaatcagccatccgagccggcaactgagtcggaccggaagacagggatggatctgctggatactttgaaggcacatgaagaagagtgtgttggtatggcggcgaatatgatcggggtacggaaaaatatcattgccgtgcacatgggatttatgaatgttttgatgtataatccgaagatcatcaaaaagtcaggggcgtatgagacggaagaagggtgtctttctctggcaggggtgagaaaatgcatgcggtatcaggagattgaagtgcagtatcaggatgtcaatttcaaacagcagcaacagacgtattccggctggatcgcacagatcatacaacatgaaatagatcattgccgcggaatattgatataaataaaaagactaaaatatgtaccatatacatggtaaaagagtaattacgcttccagctatgtgaaaaatctgatttttcatatgagcattaaagtgaaattaactaatggattaaaacaggtacttgtgaaagtatggaacagttacaaaatcaaaataaatgaatgatagtagaaaaggaaaaaacaaacatgaaaaaaggaaatggaattgcgttactccctatcggcgtgttcctggtattgtatctggggcttggaattttgtttgaatatgtgttaaagattccgatgggattttataacgtgccgatcgtcgtagcgtttctggcggcgattttggtggcgtgtgtacagaatcggaaagtaaattttgataaaaaattggagctgatggcgcagggtgtgggcgataagaatatcattacgatgttattgatctttctgaccgccggctgctttgtcggcgttgtcggaagaagcagtgcggagagtgtggcctattttatgctggcgctgattccggcgcggttttcggttgcagtgctgtttgtagtggcctgtttcgtgtcggtggcaatgggaacctccgtgggaacgatcaccttgctgacaccgatcgcagttgcggtatctgctgcatccgggtttgatcttccgttttgtgtcggagcggtcatgggtggtgcaatgttcggggacaatctttcctttatttccgatacaacaatcgcagcctgtaacggacagggctgcgagatgaaagataaattccgggaaaacttctggatcgcatttccggcggcggtgatcacactggttctgattctggttctgtcttttcagacagagattcacggaagagtcgatcagtcgtaccatctgctgcaggtacttccctatgtgctggttctgatcggtggaatcatcggtatcaatgtatttgtggtacttctaaccggcattgcctccggtgccctgatcatgctgcttggcggacatactacaccgaccgatctgctggcaaatatgggttccggcgtctcgggtatgtttgagacctgtatggtggcgatccttgttgcagccatgtgtgcgctgatccgggaatatggcggatttgatgcgttgctcggctggatccaccggatctttaagggaaaacgcggcgggcagctgggtatgggactgctggtcggagcgatggacattgcaactgctaacaatactgttgcaatcgtaatggcgaatccgattgcaaaagaaatggcccaggaatactgcgtgacaccgaagaaaacagcttcgttactggatactttttcctgtatcttccagggagtcatcccttacggtgcacagatgctggtagccatctcggcggcacatgaacttggatacgagatttccgccttccagatcatgccacggctgttttatccgatgtttctgcttctgtgttctttgatcgctatcttcggagtcgagaaaaaacagaggtaacatccgatataaccggaagagcatcggaaagtgggcatcacaaaaaagttgcgcttgcaaaataagaagagtgacagaaaacgcatttcacgcatatggtaaatcagatagatagctgggtatcgtctcacagatgcggtgggacatatcaggaagcggggaatgcaatatgagtaacaaaacatatgatcgattaaaatggctcgccatgtattttctgccggctttgggaacgttgtattttgcactggctggcatctgggggcttccctacggagaacagctggtgggaaccatcacggcaattgatacgtttctcggtgtgattcttggaatcagcaaatcaaaatataacaaatgcagtcactaacaacttcataccagagcgtgtctgaaaacacgggaactcttgcaggcggacagagctggcaggagttctttttatgctgcgatgtatctgaaaaagctggcagtcactggtttctcagtcaaatcaacgatcttcatattccttttcgggcaggtttgtagtaaaatataagaacgattgtcgatgcaaactggtatatttgcgactacaggaaaagaacagacaaggagtataaagaatgatacaggcagtaatttttgatatggatggaacactgattgacacagaaaaatattaccggatctgctggccacaggcactggcgcattttggttatacgatgagtgatgagcaggcactttccatgcgttcgctgggacagccatatgcgccggagcatctgaaagaaatgtttcaggatcccgatctggactatccggcgattcgtgtatatcggaaacagctgatggaagaatatctggaacgggatggaatccagatcaaaccgggagctgtagaacttctggaatatctgaaagaaaagaagatccagcgtgcgatcgctacggcaactgatacggaacgcgcggcacgatatctgaaacagatcggactgtacgagtactttgaccggatcatctgtgcaaatatggtcaagtgcggaaaaccgtcaccggatatttatatctatgcctgccaacagctgggactggatccgtctgcatgcatggcggtagaggattcaccgaacggagtgaccagtgcgtaccgtgcaggctgtcaggttgtcatggtgccggatcagacaaaaccggacgcggaacttcagaacatgttaaccgcatgtgtggattcgctggatcagatgaaagcactgtttcaataaaggcaataacacactaatgtaaatgtaatacagaaaatacgagagatctgcaggggatgggcactgtcgtatgtgagaatgtataggagaagagctatggcagaaaaaatggaaaaggatgcagcagaacttcccggtatcagcagagaagcagaagaacaccagctggcatatgtgatcggggttgcccaagagcatctggtacaggcgcgtaaagccatccgggaggcaaatgaagatcttgccgatctgatggaagtttacgatgcaaaagataaagaaggtctgacactctggaacaatgctacggcgcgtctgaaagaatataaacagaatatggtgcgcctggaaaaagccagaaagaaaccgtattttggcagaattgattttcttgcagaagaaaaacaacaaaaagaagcgtattatatcggtcgtgttggaatctccggggatgatgcgcagccgttagtattggactggcgcgcaccgattgcttctgtttattatgaaagcggtcttggtccctgttcgtataccgttctttccgaggggacgcatacgatcgatctggaaaggaaacggacgtatgagattgaaaatgaccggttgaaagactactttgactcggatgtggtagccaatgatgaacttctgaccaaataccttgccaaaagcaaaaaaaacgtacttggagagatcattgcaaccattcagaaagaacagaatctgctgatccgtcgctcccccaggactaatctgattgtccagggtgtggcgggttccggaaagaccacagtggcgatgcaccggatttcctatattctttataattacaaagaggatttccgcccggaagatttttatattatcgggagcaataaaattttgctgaattatatcaccggtgttctgccggagctggatgtatacgggattcgtcagatgacgatggaagagctgtttatccgccttctgtatgaggaatgggatggaaaaatatacagagttcatccggtatctcaggaagcttggcaggaacagaaaggaagtactgcctggttcgaaaaactggaagtgtactgtcaggcatacgaaaatcaggagattccgcaggaagccatcgtgatggaaaaaacaggcgtacggttgatgcgtcctgcgatgatccgggagtatctgcgtgacaatccgctcctttcgctggaaagcaagatcctgatgttaaataaaatgctgtatgcccgctatgaaaatgtgatcacgggaaaagtgatctctttcacagaaaaagagcggaaaatactggacaaaaaatacagcacttactttggcaacggaaaatggaatggttccgtgcgaactttttatcaggattttctccgtgcacagcagcaagagggaattcctatcgaaataccagatacatcgtttgatgtgtacgaccttgcggcgatggcatatatctataagcggatcaaggaaaccgatccgatacgggaggcaagccatgtggtcatcgacgaagcacaggattttggcatgatggtatatcgctgcctgcactactgtatgcgcggatgcacctatacgatcatgggagatacttcccagaacatccatttcggacagggattaaatgactgggaagaacttcgcgcgctgatcctgcggggaacgtacgatgcgttcggattacttcggaaaagttatcgaaataccgtggaaatttcagaatttgccacggaaattctctggcatggagatttcccgatttatccggtggaaccgattattcgtcacggagcgcaggtaaaagtggaagccagtgcggacgcagttgctatgaaagacgcagcagtaaatcagattcaggaatggcagaaaaacggatacgaaacgatcgccgtgatctgtcgcgatgaggcggaagccgaagccgtgtcggaacttttgcgggatagtctggatctggagggctacacaccggaacgcagtcagttcggagagggaattatggttctcccggtcatgtatacgaagggactggaatttgacgcggtacttctgtggaatccgacaaaagaacaatatccacaggataacgggcatatcaaactgttgtatgttgccgctacccgtgcacttcatgaacttaccgtactgtatcaggatactcttacggacattataggaaccgaagtgccgaaagaaaaacatatgcaggaatttcagaccgaaagtctgcaaaaagcgaaagaatacgcaaaaccggtacacacacagaaagagatcgaacagcagcgaagagaagagggtgacagggaacggcaggcaagaggctatctgggtcctcgaaagatccagttgaaaaaggaacaggaaattgccggaacagagacaccggtgctaatttcaaaaccatttgaagtacatcaggcactgattcccaaaaacagaaatctgttaaagaaatcaacggataaaaaattaaaatcttccgccatcgacggactggtgaatccatccccgtatacgtatggaaccttcccaccggagagtcatcttcaggtcaaaggacattccagagggaatttttctgtaaaatgggtgaaaaagacaaagcagtatctggagatcgccagtgcagccggacttcttcggctgacaccgatcacaccgtcgacgatccgtatcagctttgtaaaaggtgtcaccggcacgatccaggatacgaactggaaagcacaggcagataccgcagtcacatggagcgcaaaagagtcccgttctgaagtacagcttctgactaatcgtatcctgattcgggtggaaaaagccaatggtgctgtgcagtttttaagcagagacggtaaaaaactgcttacggaaaatccttcggaacctcgattgcttctggacagtcagacctggaactttttcgcctgggataaaaatgagcgcctgaaatccaagggtgttcttgcagatgattttatggatctgagcacgaaagcgcggtatatctcttttggacagaaaaaacttcggatgccactggtactgtccaataagggatatgccatcggtgttgcggcgggaagtaccgtattattctgtaacgtgagaacctatggacaatatatttatacccagggaaccggtcaaatcgattattatttcatttacgatgaaaatcaggagagaaacatcgagcaataccgcaatctccaggtgtagtttctttcccagccgttttgaattcatgtacggaaaactaattttctgaaactgtcagatttatcttttattagatcagagtctatagtataataaccataaatggccatatttctcaaaacataattgagaaatctacataataactgatttttatacaagatgaagtacaatggaggttatgaacatgagaatctatgtagatgtgaatgctgtacgtaacggaaacggaaccgaacaagctccttttcgaaaaatcaatgatgctgcaaagatcgcacaaccgggtgatgaggttttagtgttcccgggaacttaccgtgaatatgtagatccaatctatgccggacgtgaagatgcccggatcacctatcgcagtgtaaagccactgggggctgtgattaccggtgcggaggagattaaaacctggacaccgtatcaggacaacacctgggtatgtcgtgtggcaaatagtgtgttcggttcttataacccatatacgactgcagtatatggtgactggtattttgcaaaggcagacaaacataccggctgcgtatatctgaacggtcgcgctatgtatgaggcagtaactttggatgagtgtcttcgcggagaagtgtatccatgcagctgggttccggaagaatctgtctacaaatggtatgccgaacaggactccaaaacggatgaaacaatcatttacgccaatttccagggaaaagatccgaacgcggaaaatgtggaaatcaatgtgcgtcgtgaatgcttcttcccttccaaaacaggagtaagttatattactgtcagcggctttaccatctgcaaggccgcaaccacctgggcaccgccggcagcatttcaggatggtatgatcggtccacactggagcaagggatggatcatcgaggactgcgatatctccaacagcaaatgcgcaggtatttccgtaggtaaatatctggatccggataacgatcattattttacatataagtatgtcaagagtccgacacagatggaacgtgatgccgtatgccgcggacagtatcatggctggctgaaagaaaaggtaggaagtcatattatccgcagaaataatattcatcactgtgaacagggcggtatcatcggtcgtatgggcggtgtgttcagtgtgatcgaagacaaccatattcatcacatcaacaacatgatggaacagggcggtgcagagattgcaggtatcaagatgcatgcagcgattgatgttctgtatcagcgtaatcatattcatcactgtaccatgggtatctggtgtgactgggaagcacagggaacacggatcacgcagaatctgcttcatgacaaccagcgtccgtcctttgcaaaaaatctgaagggcggtatgatgtctcaggatctgtttgtggaagtgggacatggaccgacactgatcgacaacaatattcttctgtctgatgctgcccttcgtttcgcaacacagggtgtagcaatggtacataacctgatctgtggttctctgacctgtgttggtgaaggaaccggctggagatatacaccgtatcatattccgcaccgtacagaggtgatgggattcatgacgattcttcacggggatgaccgtttctataacaatatttttgtacagaaatggccgaaagaagatgtgattacccctcacgattccgatgatggatatgacacggaaaatcgtctggctggtacctggacattcgacgagtatccgacatatgaggaatggatctcacagtttgactttacaaaaccggtggatatggtaaaactggaaccggtacactttggtcatctgccggtatggagcgagggcaatgtttatctcggcggagcaaaggcatggaaaaaagaaacgaatggtttgaccgcagcagaaaatatggaagatgtgaaggtggaactggtagaaaaagaggacggatatcatctggaaaccaatgtctatgagttcctgaagggctttaccggaagaatgatcaacactgaagtgcttggaaatgcctttgaaccggaacaaccatttgaaaatgcggatggaacaccgattcagttcgacgaggattattttggaaaccaccgtggcgttgcaactgtgcccggaccatttgcaggggcagaagatgctgaaaaagtgctttatgtaaaataacagatattttatgattaagaattgtacggaaatgctggaaagagatttttctttcaaaggatttctgtacaatttttttgttgcattgcatatcaataattggtccagtggaccaattttgattttttttatcagatttctcttgactttctataccgtataggctattctatagatatcacatacgctatgggtaaaaatatgaaaggaaagtgaaaacatggattacatcattatggaaaacggagaaaaaattcttttggaaactcagcagaaagtgacgattcagcgaaccgtcgacatttacaaacagtaccgcaaagaactgggactgacgcagagtgaacttggaaaacgtgccggtatctctcagccgaacatcacccgttttgagagcggaaattacaaccccagtctggaattcctggtaaagattgccggagctatgggtaaaaaagtgaaagttactctggaagattaatcagggggcagtagcaatggtagaagatattttgaagaaagacggactgtcttttgccctgctgcgaaagttgtcctttcgaaccagactggaagagaacctggctcaggcaatcagctgtctggatgaagcgtttcttacagaagaactgaaaaatatcgtcatctggtatgattccagtgatattttatccggacttccgattgattaccgcatcaaaagtcttcaggcgattctgcgaaaatatcaacgggcatccggggaaagccgggtagagcgggtatttaacgatatcctcggttttcggacattatgcgataattacgaggaaattttacgtctgagagaagcaaagaatatttccgttgcagacatgtccaacgggaaaacacacgatgacggataccgcggtgtgtatatctattatcagtatggccaccgacattacccgatcgagattcaatataatacctactatgaccgtcagatgaacaactggctgcataaatatgtatggagtaaacatcatccggcaaatgtgggaatcactctgcgaagagagtacgagagaggaagaatccgaacagaatgtgaatgtgaggaggtgcttcgggatgtgttatctgattgcaaaaaataatcagggtgggagcagtctggcaatccaaatgatgcatggaaaagaactggcaaaattaaagcagaaacttctctcggatcttcccggtgaagaaatacagctgcttactgtcagccgtccatctgcatatacggagtatgaaccgttttgctttatggatacaccggatcattttgcacaggaagtgaaaaacagtttttcctgatatatatacccacaaaggtattgtttgaaaaagcttctgtttttgaagcgatttcgtgttataatgcatttatgcgtgaaatcatttcaaaaacatttctaagaaatctatgaattacaaatggtgtgtttcaggcgcagtgcacaccggacaggagaaagaaatatggaccatatagcaagagaagatgcactggcattattaaaaagatacaatcaggacccgtttcatctgcagcatgcatttaccgtggaagctgtaatgaaatggtatgctaacgaacttggatatgctgaagacgcagaatactggggtatcgtaggacttctgcatgatattgattttgaacagtatccggaagagcactgcctgaaagcaccggaacttttaagagagggaggcgttggtgaagatatcatccacagtgtagtctcccatggatatggtatcacgatcggatgtggtgttactcttgatgtagcaccggaacatgagatggaaaaagtactgtttgcagccgatgaactgaccggactgatctgggcggcagcgctgatgcgtccttccaaaagtacaaaagacatggaactgaaatccttaaagaaaaaatacaaaagcaaaggattcgctgcaggatgctccagagaaatcatccagcgcggagccgatcagctcggctgggaactggaaaaactgctgacgatgacaatggaagcaatgagagcaaccgaagatacgattaatgcggagtgtgaatctctgtaaaacaaatcgagatacttaatccgaaagtgaatcggctatttgacaactggtttactttcggatatttttataattcctgtgaccgcggtttccttaagaattcgtgaattcttgtgggttatacttgcgaaaaacagcgtatactgatatagtacaaaaaacaacagttccaaagaggagagcaaacaatatgaaaaaaggaaaaatcaaagcgcttctagtgctgctggtgatcgttcttgcggggatttattattatgtaacaatcccggcgatcaacattcattctacgggaatctggatttttatcctgtttgtactcgtattgattctggcagcttatgcagctaaaaagaagtttaccagcatccgtgaggtgaaaagcagcaagtttctgaaaatcggaggcatcgtactgatggctgtactgcttgtatttgcagtaggaagcatcttatcttcccccatcgtaaacgcaaaacagtatcgaaatctgctgaccatcgaggaacgcgacttttcggaagatattcagccggtgaatttcagtcagattccgttgcttgacaaagacagcgcgatgattcttggaaaccgaaaaatgggaagtatggtagatatggtttctcagtttgaggtcagcgatctgtattcgcagatcaattatcaggaaaaaccggttcgcgtgactccactggtctacgcaagcccgatcaaatggctgaccaaccagtcacagggaatcccggcatatattatgatcgatatgacgacacaggatacctcgctggtaaaactggacaaaccgatccgttattccgaggcagaatatctgaaccggaatatttatcgccatctgcgttttcattatccaacctatatcttcgatcagttaagtttcgagattgacgataatggcactccttactgggtctgcccggtgcggaagtatacaattggactttttggtggtgcaacaatcggcagagttgtcctgtgtaatgcccagacaggagagtgccaggattacacgttaaaagactgtccggaatgggtagatcgtgccaatccggcagatcttctgattcagcagtataattactatggaacactggtgcacggttatatcaacagcatcttcggacagaaaggctgtctgaaatctacagacggatataattacatggcgatggaagacgatgtatgggtatacaccggtgtaacttctgtcagcggagatcagtccaacgtaggatttgttctgatcaatcaacgtaccagagaaacacgatattataaggtaaacggagcagaagagtattcggcgatgggatccgcggaagggcaggttcagaaccttgggtacaaggcaactttcccgatccttctgaatatttccaatgaaccaacatactttatggcattgaaagacggtgccggactggtaaaaaaatacgcgatggtaaatatccagaaataccagaatgttgccatcggagataccgtatccgcctgccaggacgcttatgtgaaactcctgaataccagtggaattactgctggaaatgagagcgatttcaaaactgtcaccggaacgatccagcggatcgcgcagagcgttatcgacggcaattcccatttctacctggtattaaatggacattccgagatcttcgatgtcccggttcaggattatctgcaggtcgtaacattgcaggagggagacacggttaccgtagaatacctggaaggaactccggtttgtacggtattgaacctggagtagaaaattttcacttggcagcaaaagagtttcatgctataataagaaaaatcaactgataaacaaaatacagatgagatatgtaagtccaagggcggacatccgagagggtgtctgccttttttcgatatacaggaaattatcttcctgcatatcaaaatcgcaaatcctatgttatcttattgtcggcataatattccgctatatgccataaactgatgtatcctatacaggaatcaaagcacctggaaaacgtacagaatcttttaaacactcagcaactatgaagatacaaaatatttatgagatttacatatctacaccacagaagggagaacaaacatatggaaaagttcagtcaactggtaacctgggtggacggaaaagtctggggctgggggatgattctgttacttctcggaactcatcttttcatgaccgtccgaaccgggtttatccagagaaaaacaatcacaaaaggaatcaagctttctgtatccaaagaaccggatgcagacggtgaagtcagtcagttcggagcacttgccactgcgctggcatctacgatcggaaccggaaatattatcggtgtgggaactgccgttgccttaggtggtcctggtgctgttttatggtgctggcttaccggtgtgttcggtatcgcgacgaaatacagtgaatcactgattgcagtaaaatatcgtgtcaaaaccgaagatggacgaatgcagggtggtgccatgtacgcactggaacgcggtttgcatatgcggtggctggggctgatctttgctgtatttgccgggtttgcttcgttcggtatcggatgtgccacacaggttaacgccatcgctactgtctgcaatgagaatctacacatcaataaagcagttgtcggaatcatcattggcgttctgacagcagttgtcatctttggtggaatcaaaagcatcgcaagggtctgtgaacgactggttccgtttatggcacttttctatgtgcttggctgtatcgtgattcttggaattaattatgactatatcatacctgcaatcacaactatctgtcgcctggcattccaaccgggagcagcagccggcggtctggtaggaagcggtatcatgctggcgatgcgttacggagttgcccgtggactgttttccaatgaatccggtatgggttctgcaccgattgccgcagcggcagcacagactcgaaaccctgtacgccaggcgctggtatcctccaccggaactttctgggatactgtagtcgtatgtctgatgaccggcctggtactggtttctacgattatgaaaaacccggctatcaatgccaatgagatcaccgatggcggtgtactgacctcccttgccttcgatcagattccgattatcggtcctttgatccttgtcgttggaattatttccttcgcattctctacaatccttggatgggcatattatggggaacgttgtgtggaatactttgcagggaaaaagggactgattccttatcgtgtgttatatatcgccgtggctgtgatcgccccggtagtagcccttgatgtagtatgggacatcgccgatatcctgaacgccctgatggcaatcccgaacctgatcgccgtactgctcctttccccggttattgtgaaagaaacgaaaaaatatctggataacctggacgcgaaagatgatacggagattccggtgattaaaaaatagcaaaagatgatgatgagtaaataagcgagcatataccggttattttgtcgtggtatatgctcgttttttggcttgtatgatggagattgccgtttaactgtaaaataataatattcgtctgtatacaaataaagtcaatgaattcccattgatgaaacatctcaaaagagctatactataatagaacacgctgctaaaactttcttaagtgaaggcaacaatagttttttacaatttttttataatggagaacaaaatgaaaactacaaatcaacaaccggcaactgtacgaacatccccaagatggaagcagccactgatatcgacaggctgcgtacttttcgcatcgttactgatgtctgtcaacatcaaatctttcgtccgggcaggaaatctgattccgggaggatttaccggtttatcacttttgttacagcgtacggcggaaacatttttcggaatttcattgccatattcggtgatcaatattgcattgaatgcgataccggcgatcatcggttttcggatgatcgggaaaaagtttacctcatatacggtactgatgatcgtactgaactcttttctggtcgatctgatcccggtaacgccgattacatatgatccgcttctggtgtctgtatttggcgggattttgaacggaacagcaatctcgattgctttgttcggaaaagcttccagcggtggaacggattttattgcggtttatctttccaccagattgcataaaccgtcctggaattttgtttttggtatcaatgtggtgatacttacgaccgcaggttttctgtttggatttgaagctgcgatgtattccatcattttccagttcgtttccacacagacgatcaacacacttcacagaaaagatcaaaaagcaaccatgttcatcgtcacccgtcacggagcaatgctggagcagaagattatggaatgtaccaggcatggaatcacacatcttgccgttcagggctgctatctgaaagaggacaaagacatgctgtacacagtactgggagaagatgaagtgaaagaagtgactgcactggttcacagcctggatccgggggcatttatcaacattatcaaatccgagggaatcgcgggaagattctatgaggaaccgttagaataaaagaatgacaagaactttgaatcgttacagaacagttatcaaaaatgctcctgggattccaggagcatttttgaaagaaattatttactcagtcgaattacattccagctgtgtttcccaaagacggtctgtaatttgccattttccagtttggtagcagaagagagtgtcggagctactgtgttcggagcagcttctgtattaaccgctttcagatcatcgttggtcagaacgatatgttcagctactttgtaaccttcaaactgtctcaggtcacagctgacttccatatcttcatccagacttttattcacagcgaagattgtcagcgtatcttcttcctcattccagatgcatacagaatccagatatggagcttctccataagttttgctttcatataccggagtgtgtacctgagtattcaggacagtacctcttccgtatacacttgcatggaaatacggatagaaaatagtctgtctccatgcaccggtatcggatgtcatgatcggagcgataacattgaccagctgtgccaggcaggcaatctttacacggtctgcgtgacgcagaagtgtgatcagcatacttccgactaacagggcatcttcgaagttgtaaatatcttccagctgatgtggtgcctggatccatttttccagtttttcatctgcctcgttgctgtgataccatacattccattcatcgaaggacaggttaatattctttttgccgtgtttctttgctttgacagcatcacagatacttacaacaccggagataaaatcatccattcccttggaacttgccaggaaatcaggggtatcgtcatcgcggtttccatagtactgatgcagagacatgtaatcaacctcatcatatgtctcatccagaacggtatattcccaggaaccgaaggttggcatgtctaggttggagcttccgcaggctacagtctcgatcgtcggatccatgaatttcatcaaccgggaagtctcagctgcgattcttccgtattctgtagctgttttatgtcccatctgccacggaccatccatttcatttcccagacaccatactttgatatcgtgcggatctttgtaaccgtgttcttttcgcagatcactgtagtaagtgccgcctttgaagttacagtattccagaagattcttggcatcttccggtccgcgggttcccagattgacagccatcatgatgtcacttcctgctttttttgaccagtcggcgaattcatttaatccgaactgattggtttcgatcacaccccaggcaagctccggtctggatggccgtttgtcttttggtcctacgctgtcttcccagcggaaaccggatacaaagttaccgcccggataacgaacgatcggaacctgcagttctttgaccagatccagggtatctttccgaaatccctgtgcatcggagttcgggttgccttcctgatagattccttcgtacacggctcttcccagaagttcaataaaagaaccgaagatccttttgtctaccgcgccggtgaggaaatatttgtctacaataatttcagcttttttcattgtaaaaacctcctgtggttatataatgtgctctcgacatgtattgtctgtactgtctatgattgtaacagaacattggaagaataccagatgtttttgtccgaagtaattgactttttttccggtgtcaggtatgctttttgtagaaaatacgagagggtgatgaagtaatgatttcagatatttccatacagttttgcgaatacaaccgctccaacccagatgctgaccggatctaccgtccacaggggagcggtgattatttgtttttattgctgaaaactccgatgaaagtttatcaggagaatggtatactgattaccggagaaaatgcctgcatcctgtacacaccaggacagatgcagcactatcaggcagtacagaagttccggaacagttatcttcattttgttgcacaggagaatcttggagaatattttcatcttccgcaaaaccaggtattttatccgcgaaatccggaggagatagaagagatcctacgccagctgcaacaggaatacatcacccgtggttcctataccgaagcgatgcaaagtgcactgatctgccagcttctggtcacggcagcccgtggacttgaaaaagggcagcgacataacccggaagaagaagggttgtaccgggattttcaggcacttcgcatggagatgctccgccattatgaaaaacactggacaaccgaacaactctgcaatcagataaacctggaaaaaagtcagttctacgcttattaccggcagttttttcacagtaccccacacaacgacctgctacaggtccgtcttgacaaggccaaaaatctactgacaaatgaagcgctgccgatccaacaagtggctctttcctgcggatttcgaaacatgtctcatttcagccgatattttaaacagcagtgcggttgttcgccaaaagactggatctccagcgtttctcctcaatgaaaaatcactgtttaccgataacaataatcgaaagaccagtggatcattttataaggcaacgtcacacaaaccgcacaatatatggtacaatgtaaaaaaggaattctgtatatcattctatttgctataatcagaagaaaggagactacgcttatgaaaagaaaatggctttttgcttcactgctcctcacagcagcattgaccatgacatcctgttctttcaaacttccggtcgaattacccttcaagattccattcattactgcagatagaaacaccaaacaaaacgacgaggatccatctgacccgaaaaaaaacactgatccgataataacggacgaacctgaagttcctgaaaatatcgacaccacagaaaacattcaatcaggtaatgatcatggatcctgtacacctgatgaggcagatccttctccgtcacaaccagatgaaggccctgttgatgcgctgtccggtcaggagaattctgtgaacataccggttctcatgggaggtgctcttccttataccggtatgatttctataataaatgaaaattatgaagacgggactcaccgatatgacgatatgttagaagacgggatgtcttgcatcgttgactattgctatgtcaacccggaagatcttccagacactccggaggcatacgcaacccttgcagcagaaaaactgaccgacggtggcatatataacattctttccgtttaccaggacgatggttatactgagagtctttcctatccggtatatattgtttcctttaccagcggaaacaacgaggataccaatttctggctggcatttatggttatacgggatggatatacgtacctgtatgctcccagcgtatcctgcaatgcggattataccgcggaagagctcggacaagatcttttcccacgtctgtttttttccgattcgatggacaactgatgctatgaaaaagcacctgactgttatatgttactgttatgtaccgtggcaatactttttttcgagagcagatggcttttcccacacaaatatgttacacttaaccatgtagtaatattaactgggaggtagaaaaactatgactgagcaggagagaatgaaacaggggtatgtatggcaggatgatgatgaaaatatgaatctgcaggctcacacaaaagcactggtaagagaattcaacagtatgccaccggaagatatggaaggaagagaagcacttcttcacgatattttcggaaaagtaggaaaaaatgtatggatcactccaccgcttacagcagctgttggaaaatatgtatccataggagacggcacctattctaatatgaatctgacactgatcgatgactggaagatcaccatcggaaaaaatgtgttgatcggaccgaatgtaaccttgtgtaccaccggacatcccattgatccggaacaccggggagacggaatgtattcattcccaatcaccattggtgataatgtatggctgggagccaatgttgtcgttcttccggatgtaactatcggagaaaattccgtgatcggtgccggttctatcgtaacaaaagacattccggcaaactgtattgcttttggaagtccatgcaaggtatatcgtgagatcaatgagcacgataaagaatactattttaaaaaccatcgttttgatgagcagccataacgagataaaatatgcttcgcgaatttatacgattggtataaattctgtgcatcgcgaggtgtgttaccgggaacggagtgaacagtaacactttggcttgctgcccgtgtaaataacaggaaagccttgacaaacactgtctttgcagttaaaatattttatgttttataaagtatacgacctggaaggggaagagtaaaagcggtatcgttctttcagagagctgtcggttggtgcgagtcagcagaagagagctttgaactggccccggagtcctttttccgaaacattttcataatttatagaagatgcaagtaagaaaaagcgggagttcccgttacagaatccataagtgcatgaggcttatgcttcatgaagtagagtggtaccacggaaataaagtcctttcgtctctagttgaaaaacagaaacaaaaggactttttatatttcaagcaatacctaggaggaagaaaccatgacagtaccttataatcatagggcagtagaaaaaaaatggcatgatatctgggaagaacacccggtgaatgtggatgatggcaaaaagccaaaatattattgtctggacatgtttccatatccgtcaggaaatggtcttcatgtcggacactggagaggatatgtaatttctgatgtatggagccgctacaaattattgaacggttactatatcattcacccgatgggatgggatgctttcggtctgccggctgaaaactatgcgatcaaaatgggtgtacatcctgcaaaatcaaccgcagacaacgtagcaaatatcaaacgtcagatcaacgagatcgcagctctgtatgactgggatcgcgaagtaaacaccacagatcctgagttctacaaatggacccagtggatttttgtaaagatgttcaaagaaggtctggcttacgaaaaagaattcccgatcaactggtgtccgtcctgtaaaacaggtctggctaacgaagaagttgtcaacggaaaatgtgagcgttgcggttctgaagtaaccaagaaaaacctgcgtcagtggatgctgcgtatcacaaaatatgcagaccgtctgttgaatgacctggacaaactggactggcctgaaaaagtaaaaaagatgcagagtgactggatcggtaaatcctatggtgcagaagttgacttcccggtagaaggaaaagacgagaagatcactgtatacaccacccgcccggatacccttcacggtgcaactttcatggtactggctcctgagcatgccatggcaaaagaactggctaccgatgagacaagagaagctgtggaacaatatatctacgatgcatccatgaagtctaacgtggatcgtctgcaggacaaagaaaagactggtgtatttaccggatcttatgcaatcaacccgttaaatggtgccaaagtaccgatctggctgtctgactatgtattggctgattacggtaccggagcaatcatgtgtgtacctgcccatgatgaccgtgactttgaatttgcaaccaagttcaatattccgatcatccaggtaatcgcaaaagacggaaaagaaatcgaaaacatgacagaagcatataccgaggcttccggaaccatgatcaactccggtgactggaatggtatggaatcttctgtactgaaaaaagaagctccgatgatgatcgaaaagatgggtatcggacgtaaaaccgtaaacttcaagctgcgtgactgggtattctcccgtcagcgttactggggcgagccgatcccgatcgttcactgcccgaaatgtggaaacgttccggtaccggaagaagaacttccgcttcgtctgccggatgtagaatcttacgaaccgacaggaaccggtgaatcaccactggctgctatcgacgaatgggttaactgcaagtgcccggcctgtggcggacctgcaaaacgcgagaccaacactatgccgcagtgggcaggttcttcctggtacttcctgcgttatgtagataacaaaaatgataaagaactggtttccaaagaaaaagctgacaaatatctgccggtagatatgtacatcggtggtgtggaacatgcggtactgcatctgctgtattcccgtttctataccaagttcctgtatgatatcggagctattgactttgatgaaccattccataaactgttcaaccagggtatgatcaccggtaagaacggtatcaagatgagtaaatcgaaaggaaacgttgtttctcctgacgatctggtaagagattacggatgtgactctctgcgtatctatgagctgttcgtaggaccgccggaactggatgcagagtgggatgacagaggaatcgacggtgtataccgtttcctgaatcgtttctggaaactggtacaggacagcgcagaagcaaatgtttcagaaactaaagagatggtaaaactgcgtcactgcctgattcacgatatcacagaacgtctggaaagcttcaacctgaataccgttgtttccaaattcatggaatataacaacaagatgattgacatggctaagaagaccggtggtatcgacaaagaaacactgtctacctatgtaattctgctttctccgttcgctccgcacattgcagaagaactgtggcaggttctgggtcatgacacatccgtatttgcagcaaaatggccggaacatgatgaagacgctatgaaagatgacgaagtagaggtaccggtacagatcaacggaaaaacccgtgcagtcatcagtatcccggttgacatttccaaagaagatgcaatcgcaaaaggaaaagaagccgttgctgacaaactgacaggtacaatcgtaaaagagatctatgtaccgaagaaaatcatcaacattgttcagaaataattaaaaacagtaaaagacaaggaggtctgcattgtatttggcaggcctcttttgcatatcacgggataaaggaggatgttttatgaatacgattgaattactggatgcactgcagctgaaagccaagaaagacccggaacttcgaaaagcactctttgcaacccgcagtgagaagaatcctgtcgatgctttctgtaaaaaatgtcaggaagaaggttatccaatctatacgatggatctgattcaggcaggggaagagttttatgcttccatgcgtcgcagtaccaacggtgggggagaaaattcgccaaaactggaaggcgaggacgatttttatgaattatttttcgccactctggaaaattgagaacatgatatgatatctggcgtgttttgtcattggaaaatgacatgcaatttttctgataatatagtagaatttgtcgttttcaccgaaattatttgttaacattcgtttaagtttcacaaagcagttgctgtttctgtgaaaacatgttacaatctatataactttttaagtgacaaaaataaagataataggagtggtaaataatgtatcaggaagaatacaaacgctggttggcagcagatcttgaggatgccgatctgaacccggaactgtccaggatcgaaggaaaggatgatgagatcaaagaacgtttcgcggtcgcattaaaattcggaactgctggtcttcgtggggtcctgggagcaggtaccaatcgtatgaatatttatgtggtccgtcaggcaacacagggactggccaactgggtaaaaacacagggcggcacacaaactgtagccatcagctacgacagccgtctgaaaagtgatgtatttgcaaagactgctgcaagtgtattggcagccaacggaatcaaagtcagaatctatgatgctctgatgccggttccggccctttctttcgcaactagatattacaactgtaatgcaggtatcatggtaactgcttctcataaccctgcaaagtacaatggttataaagcatacggtccggacggatgccagatgacagacgatgcagctgctatcgtatacgatgagattcagaaaactgatgttctgaccggtgcaaaatatatgtcttttgctgcaggtgtagaagaaggactgatccgtttcgtaggtgatgactgcaaacgtgccctgtacgatgcaatcgaatccagacaggttcgtccgggtctgtgcaaaacagctggactgaaactggtatacagcccgttaaatggttccggtctggttcctgttacacagatactcaaagacatcggaattaccgatattactattgttccggaacaggaatatccaaacggttactttacaacctgcagttatccgaacccggaaatttttgcagcactggagctgggactgaatcttgcaaaagaatccggcgcagacctgatgctcgcaaccgacccggatgcagaccgtgtcggtatcgctatgaagtgcccagatggttcttatgaactggtcagtggaaatgaagttggtgttctgcttctggattatatctgtgcaggacgtatcgaaaaaggtacgatgccacagaacccggtagcagtaaaatctatcgtatccacaccgctggcagatgcagttgcagaacattatggtgtagaactgagaagcgttctgaccggtttcaaatggatcggtgatcagattgcacagctggaagcagcaggtgaagttgaccgtttcatcttcggttttgaagagagttacggctatctggctggtccttatgttcgtgacaaagatgccgttatcgcttccatgctgatctgtgagatggctgcttactacagaagtaccggaagttctctgaaggcaagactggaagagatttacaaagaatacggtcgttacctgaacaaagtagacagcttcgaattcccaggattgagtggaatgaataccatggcaggtattatggacggactcagaaagaatcctctgactgagatcgcaggtcataaagttgtcagcgtaaccgattacgagaaaccggaagaaaccggtcttccggcagccaacgttctgatctacaaactggagaacaacgaaaccgttatcgttcgtccatccggtacagaaccaaagatcaagatctattacaccacacttggtaaagatctggctgaggcagaagcagagaaagaaaaactcgcagaagctttaaaaccgatcatggcatagaaaaatctgacaggtgacagtttaaaatttacagggaaatggttttctaccatttccctatttttgaatatttttattacagttatcaaaaggaattttattttatgaaaaagcaaataaataaaaagacgcttcgtctgcggacttttcttgtatttaccctgatcctgctggcagcacttggttgtatgcatcttctgcattcttatcaggaaaaagaagaaaaattaaaggcatcttataccgcagaattcacaatccgtcgtatcgaatcgcagttaaaccgctatcttgcagaatccgatctgatgaaacggctgctcgaatccgattatgagatcaatgaggaacagttttccattttgtcagagatgatgcaggatgacgctcatgtgatcaaagtgcatgaacttgcccaagatggtatcgtttctatggtatatccggtcagcggcaatgaagaggcgattggtctggatatgttgcagcatccggcaagaaaaaaagaagcgaatcttgccaaggaaagcggcgaatatacgattgcaggaccatttgaactggcacagggaggtaccggtgtccttttgtttaatccgatctatattaccgatgataccaatcggtcatctttctggggattttccattctggtgatcaactgggaacgatttctcgaggaaattcatatggacagactggaagaagcttcttttgaatatcggatctggaaaaaagatatgacaaccggtgaaaaaattacgattgcacaaagcagcagccatatgagcagcaatacgctggaagtttcctgtaccgtaccgaatgacacctggtattttgagatcgcaccgatccacggctgggtgacacgggcacagatttggtttggtatactgattgcctttgtgcttgcaggagttatttctacaggatacttccagtatgcaactcgtcattacaaggattatctgtatgcggagaggatcaaacggattgcaaaagaagccagtgaagcgaacgaagcaaaaacccgctttctttttaatatgtctcatgatatccgcacgccgttaaatgcaattatcggttatgcttctctgatggaacaacacatcgatgatcgggaacggagtcttaattatctacagaagatcctctcttccagttcgctcctgctgtctttgattaattatgtactggagatggcacgaattgaaagcggtaaaatggaactgaagtcagaagtcggctatttccccgatctgattacctctctccaggcagtgtcagaaccacagggacagaaaaaacatctgcagatcgactggaatacagatttgcagcataactatatcatctgtgaccgcacaaaaatccgtgaaatttttctgaatatcatcagtaatgcaatcaagtataccgacgaaagtggaaaagtgacgatctctctcaaggaaatcgctgcggaacaggaaggatatgctgcatatgagtttgtggtagaggataacgggatcggcatgagtgaagattatctgccgcatattttcgaagaattttcaagagaacgaagcagtacggaaagtaaagtgaccggagcaggtctgggacttccgattgtaaaatccctggtggaaatgatgggcggctcgatctatgtaaagagcaagccaaatgagggaacgcgttttacgatccggatttgttttgcacttcctacggaaaagcagattcagaaaaaacaggaacagttacataccgaatatctggaaatattgaaaaacaaacggattcttctggcagaagataatgatctgaatgcagagatcacagaaacacttctggaagaacaacagttaaaagtggagcgtgtcggtgacggaaaagaatgtctgcgcacattgcaggagatgccggaagaatattacgatatgatcctgatggatattcagatgcctgtgatgaacggatatgaagctgcgaaagcaattcgtcagcttcctggcaagcgtggttctattccggtggttgcactgactgccaatgcctttgaagaagaccggaaaaaagcacttgatgcgggaatgaacgctcatattgccaagccgctgaatatggaacagctgcttcttactatgggagaaattctttcggattgtattttcagctaaaatctggtatgatagagaaaatgttgatgcaatttgtttaattatataagcaattgcaaattttaaaaatagaggtgcatttacatgagttggtacaatgaagctgttttttatcacatttatccactgggtcttaccggcgcacctgcgcagaacgattacagtgccccagtgcatcggttgaacacactgttgccgtggatcgatcatattcagaaaatcggatgtaccgcgttatacatcggcccattatttgagagtgtaggacacggatacgaaaccactgactataaaaaactggattcccgtctgggtaccaatgaagatcttacgaactttgtggcagcctgtcatgaaaaaggaatccgcgtgattttcgatggtgtcttcaatcataccggacgtgatttctttgcttttaaagatattcaggcaaaccgggaacattcccgctatgtcaactggtactgcaatgtgaattttggtggaaatacggaatataacgatggcttctcctatgaaaactggggcggctataatctgctggtaaaattaaaccagagaaatccggaagtacagaattatatctgtgatgtgatccgtttctgggtgtctgaatttgatattgacgggatccgtctggatgcagcggatgttctggattttgactttatgcgtacactgcgccataccgcggacgaggtaaagaaagatttctggctcatgggagaggtaattcacggcgattacagccgttgggtcaacggtggcacgctacacagtgtaacgaattacgctctgcataaagccctgtacagcggccacaacgaccataattatttcgagattgcgcataccgtgaaatatttacagaatatgggtgacctggatctttacaattttgtggacaaccatgatgtggaacgaatctataccaaactcagcaataaagcacattttgcaccggtgcatgttttgctgtacacactgccgggtattccgagtatttattacggatcggaattcggaatcgaaggaaagaaagaaaaattctctgatgcgagtcttcgtccggcactgaatctggaagattataaaaatgcggttacagaaaatccgtgtacggcactgattgctgctctcggaaagatccgccaggctacgccgggattaagttacggaagttataacgaactgatgcttaccaaccgtcagtatgcttttgcgcgagatctggacaatgtacgtgtgattgttaccgtcaacaacgatgacaatgccgcaggtatgaatctgccggtcggaaatactgccgcttatatcggcgcactttccggtaaacgggcagaggtacagggaggtcggatcaacgtgacgattccagcaaacagcggcgaaatctggatcccggaagagcagatgaagggagaaactccggtaccggctgcaattcctaagagtgtgaaaccggatgttgttaagacgaaagaggaagttgcagatgtagcagctgaagattcaaaggatccggatctattaaaagctgaaacagcagaaaagccggtggagacaaatgctgaagcagctataaatactacgatagcatccgaagatagtgaaacagttaaaacagatctcacaaaagaagagagtaaagaagcgaaagcacctgtaaaaccagattggagtaaatcaccggaagaaatgacggtatcagagcttcaggcagctatccttgcaaaaatggctggaaacggtccgataaccgatcagatgaagaaaactgtagatgataatatctggcatgattcactggtaaactggctgaagagtttccggtagaagcgcgtgacgagttttcagcataagtttttaactatttgaaccaaaattggttcattcgatcaattttgatatgcaatacaacaaaaagtcggaactcaaattcacagagagtgatttaagctccgactttttatatacatatctgaaggattacaactgtttatgtgaagattacatatctcaaatctgttccagtgctttccgcagctgcaatggatgcggcatatcgagtgccgcttttttcagaacctctttctgcacaaacacttccgaaggcgtaccgtctgccaaaagttttccatgtgcaagaaccacaacccttgaaaaacattgtgcgacaaagtccatatcatgaaggattgccagcaccagttttccatgttcggaaagatttgtgataattttccgtataatttcttttcctttatagtcctgtgcaattgtcggttcatccaggatgatcacatccgtatccatcgccagaacagaagcaattgcaactagtttccgctgggagagttccaaatcgtaaggattttcttcggcatatgcagcgagttctgtcagttccagcgcttccatggctttttgtttcgctttctctttatccatgccgatattcaacggtccgaacatgatttcatcaatgactttatatttaaagatctgatcatccggattctggaaaacgtaaccgacctgaccggcgagagaagccacggtgcgtcctgaaatatcctcgcctttataaagaatcgttccggaagccggttttaaaagacctttcagcagacgaaccagtgtcgtttttccggcaccattctgtccgatgatcgcggttggacgctgatccagagataaccggaagccttcaaaaatcggatggtcttcggtataagaaaaatgcagatcatttaccgtaaaacgattttctgccacatttctataaacaggatccgccagttgcgggagtgtagcaactttgtatatacccgcttttaaaaccttctgtacatcatccaccgttaccggatatgtgccatccggacgcagaatgttctgttctttgcagtaacgcgtcgcatatggaggacagataccaagatctgccagatccgatctggagaagatcttttccggggtatcaaaggcaatctgttttccttcatgcaacagcaggattctgtcgcagtaagatgcaagtttttccattttctgttcgatcataaaaatagtgataccggttttggcaagcagttctaccgtatggaatacttcctcacttccctgtggatccagctgtgaagtcggctcgtcaaggagcaggatctccggttccatggcaaggacagaggcaatcgccacacgctgcatctgcccaccggacaggtcaaacggatttttatcacgaaactgccagatatccagttgatgaaggactttgtccaaacgttcatgaatctgttctgccggtacaccgaagttttccagaccaaacgctacctcatcccagacggtatctttggcgccggagagctgattgaacggattctgaaagatcaatccgacttttttgcagagttctgcggtaggtgtggcagccgcggagatcccgtcaatcgttactttaccgccgtaagctcctttataaaactgaggaaccagaccgcagaatgcctgactgagtgtactttttccggctccgttctctccgatgattccgataaattcgcccttttcagcagtgaaagaaatatcatccaacgccagccttttcgtatgcgggtagcggtattttaaatgttctacttctaaaaaagccataaataaatcctccctgccagtgtcagaatcagccctgcgatgcaaagccagctgaagatccggtctgtttttgtcttctgatgcggatgcagccaggtttttgttcccttcgcaccaaatccacgaacttccagcgcgatcgcacgctctctggtagctgtcaaagcactcatgacaaccggagagatcagtggaagaaatgctttgatacgaaccagaagatttccctcggtttccatgccgcggcttcgctgcgcatcggtgatcgtgtgcatcgtacccatcatctgcggaataatctgaaacacggaattgatgatatatccaaaccgtggggaaaatccctttcgttccagttcatcgaccagttcagatggacgggtagagagaacaacgatagcaaaagagagcagcatattcaggatatttaatcctatatgcgccgcatacaataatccctctttataaaacctgagaaatccgatcgcaaacaatacatttttattctgctgattgaccagaccgtggatcaggaagatcgtcagaataatcgtaaaagaaaatgcaatcagcggcagggcttttttgataagcctgccgctttttaacagtgcaaaactgatgacgatcattgctgcaaatccccacagagaaccagtcagaaggggaatgcagatcgctgccgccagataccataatttggtaaatggatgaagctgtgtcagccagcttccgttatttgtgtataaactgatggttttcataaattaatccagactttcgatagtttcttctgtatcatacagagtggtgagtttttttggaagacctttgaggatcaggaatacgatgatcagagtgatcagtttatccggtacatccacaacgatctcatccagcagagaaccaagtgtcagtgggagttttgctgcctgtgttgcggcaaatactgcatcgccccatacatttccggttgtgcctccccagaacagaatgttcagcggtgtggaaacaacaacggctgccagtccgccggcgcatgcagtcagcagggctttcgggaatgtcttcataaatccgatacgtgccatgatacctacaacaagaccgataaagagactggtcaatgcataaaccagggtaatattatcaccggtggtaaatccgtagatcaggttgtttgcagcaccgcagatggctccgatgatcggtccgcccagtgccgcaccgatacaggttccgatgctgtccagccataatggcagtttcaggaaactggcgaacagttttccgagatagttgattccgatacatgccggtatcagaacgatgactgcggcgctcagttgtgttttaaaaatctttttcatagtacatcctccctcgatgtaattttattttttcagatgttcggattccggtttatgcctggatcctggtaaatgcttccagcgctgtcaggatttcccgttcttctccgctcatggaagttgcttctttgctggcgtattttccaatatcttctgcaacagaggactggtaagcagctacgacattcagaatagaagcggtacgcaccccgcgaagcgaaccgaggacaaacagtgccgcggtttccatatccgatgcaacggcacgttttccggtccagtaactgtaaagttccgggttccgttccccgtagagacagctgtggctgcgacagatacccatgtgatatggaatctttttggcagctgcgctttcccggcaggcacttaacaggtcaaaatcaggaatcgcaggatactgtgcttccacataagcagtagaagtaccatcatcccggatcgctccggttacaagaatcagatccccaagggcacattccggctgcaatgctccgcagcttccgatacggatcaggttacggacaccacactggatcagttcctccacggcaatcgcacaggaagcagcaccgattccggtagaagtaaccagcacttttttacccttatatgtaccgcgccagctgcgaaattcccggttggatgcaagcagttcggcatcttccagatgagtagccaccgcatccgcccgcgccggatctcccggtaacaacgcacagtccacgtccagatccttcggaagacgaatatgaggcatcaggttttcagacataaacaaaaccttctttctaaaaatatttgcctgtttaccttaacactttacagctgtcttgtcaattgtaaatataactgtatacatagaaggacggaaagttgttatatgataatggaagttctgtgaaaaagtaaccttggacaacagaaatatgatgaactgcaacataggaaaacaggattgacattttccagggatatccttatagtgaaatttagaatttttatttttagaatgtgattgtttacacagacagagaaaaacagaaaatagagaaaaaggagatctgtaacatgaatgatttattattagtaattgatatgcaaaacgtataccttcccgaccagccatgggcatgcgagaccgcagcgcgcacaaaggaaaatatcctgaaacttctggaaaaccatccaaaagatcagaccatcttcacccgctacatcgccgccgaacacccggtcgggacctggaaaacctataatgaactgaatcgcaaaatcaatgagaatccgtggatgaacgaactgatggacggaatcaaagaagccgccgaatcataccctgtctacgacaaaagcacctattcctccttccaggtcccaaccatccgcaaagccgcccaaaaagccgaccgcgtcatcctgaccggcgtcgtttccgagtgctgtgtcctttccactttcttcgaaggcatcgacctcggttgcaaactcatctggctcaccgacgccacatccggcctgaatccggtcctggaggaggaaactttgcatattttacagggattgtcaccactgcatgtggaatttttaagtacagaggattatctgtcaaacagataatcgtaatatttttgcagaatgaataagaaaatatttgcagcttggcacttttatgttatcatacttacacaaatattcgtaatgagggggacactacagatgaaaaaacaaaaagtgtgtgcgttgttttgcattgctgcaataagtatgagcctcgctacaccagcgaaagcagatgacaggtatccaagtctgaacgaaacagaagaaactcttaatgaaaaagaaaaccaggaagaatatgagttgcccgatgatattgtggtcgattcaaataaccagagccaggaacagcagacaacggaagaaggaacctgctatgtcaatggcaaggcttatctgtttgatcagaatggtgctatgatcaaagcctggtaaaaagctaacgcatatttttatgttacagaagccataaccgaatcaacatctgattcgattatggcttttcttcgttattcataagataatttctatcccgtttgtaaaaatcacaaataatttcttaaaaaattgttttttattaacaatata

SEQ ID NO: 2518 - DNA, 8759 bp, Unknown
  gut microbiota DNA sequence
tgcagtaatgtatggagctgactgttactaatcggtcgagggtttgacctggaagcggtcaaccgcaggaagtaggaagacaggatgttacgtgtgtgcagttttgaaggtacatggagagagagaagaaaaaagaaataatcctccatagctcagtcggtagagcatgcggctgttaaccgcagtgtcgttggttcgagtccaactgggggagttctggctccgtggtcaagcggttaagacatcgccctttcacggcggtaacacgggttcgattcccgtcggagtcacttgatagcaacctactttttgagttcatcatgccgatgtggctcaattggcagagcagctgatttgtaatcagcaggttatcggttcgagtccgatcatcggcttccatcaattatcttggaaagatggttatggacctttagctcagttggttagagcaaccggctcataaccggtcggtcctgggttcgagtccccgaaggtccattttgttgctattattcatcattacacatggcccagtggctcagttggttagagcgccgccctgtcacggcggaggtcacgggttcgagtcccgtctgggtcgttcataagtgaacggcagtcggaaggctattgtgtaacttatgtataaattatgggatcttagctcagctgggagagcatctgccttacaagcagagggtcacaggttcgagccctgtaggtcccatttttttaagccgatgtggctcaattggcagagcagctgatttgtaatcagcaggttatcggttcgagtccgatcatcggctttgtattgagaaatcaatacaatatcgtacaattgaatatgcgatatttttggatggattcccgagtggccaaaggggacagactgtaaatctgctgcaaattgcttcggtggttcgaatccacctccatccattaggataaaggtagttcagagttgaaattgctgaaatgatagcaaaaaggttcgaatccacctccatccattagtacgtatgaaagttagctagctgggacagtgcttgcatgtatgcccacgatggaagccgtattcatatgtatacgccgcagtggcggaactggcagacgcccgggacttaaaatcccgtgggtagtgatacccgtaccggttcgattccggtctgcggcattagttaaaaatgggagaaacgttgaatttacagcgtttctcttatttttttgttttaaaatgtttgaacacctttgaacactttatgatgaaataccaagattctgaaaagcaagcctgtcattcttcctcttattgacattccgcaagtaatgcaatgttgtagctgtctcactatgtcccattaaataactaagggttgtaagattatttccgtcaaaagctgttgaagcattgtaaaagcggattttatgactggaatgataaggaacaccggcttctttgcaatatttcttcaaacggcgattaaagctgtctgttgtcataatctcgccgttgggttcaaagacatatattccatttggatttaattcctttgctttgtgaagaattttaagtgcttcgtctgtaaggaactgtttacggaatccatgagaagtatttcctttcatttgatttactacttttacttttcggcttgagaatgttaaatcatcattcaatgtacgttcacaggtcgcctgtctgtgaagatatacaagcctgttattgtagtcaatatcttcccaacggatagcttttgtttctccaacacggataaatagatagaaagataactgtattgcaagagaatatggctctatgatacaccgaagataatttaataacttatgcgtatcatcacgggaaaatacattgtcactttgtacttctactggcttataggtaaactgtttgaaattcacatcagagacaggattatgtgatataatttcttcttcgatcgcataactcattattccattcaaaacagaacgggcattactgactcgcttgtgcgtgaactgtcggttttttgtagattctctgaaaaagcggataagcgtgattggtttgatttcgcctatcttcattttaacaagttctgtatctttgaaaaatctattccattcagatacatattcttgaattgtttttgcttttacggaagtataatctcttttatacaaaagccattcagcatataattcttctagtgtgacattctgacggttttcagctttctgcttttcgatataaaatctgatgatttctttttcaaggttctctttactcttcctcttaacaggacggcgtttgttaggtttggtttcatcgggtaaataagtacgccagcttttttctgattccgagtaataaatttcatatttgtgattcttcaagatttttttatttgccataattttaaaatctttgaagacttcatctgtggtcatgttagcacaggtggctaacgtattcaataatgttatatctgaaaacgtaacgggattatccataagattccccctttacgcaaggattttcttttttaattttgatgtagataacactgctgtcctttaagcatgaaccagtagataagaaagcgttggtatcgtaaatttgccttgtgtattctttctgaaagacgatattttctttttgtaagtcatgtaaaatgtcttcggtcagcatgacttttatttcgtgtggaactttcagattttgagatttaaaaaaggcttttttcttatgttctttcaaatcaaggtcttttccaaaatacttgctaagataacgacctctgttttctttgctgtctacatcaatgcgattgattttaataaatccatgtgaccataaattctgtaatttttcttttgctatatacggaaaatcaaagaaaataacatgataatggattgctccacgcttctgtttctcccacgttgcaaggtattttaataactgggttttggtatggtacaaataataatttaatcgctggataaaatacttaaattctcggttagttatcagaatttcctgaatgttttctttaaatgtcagcgttacaaattttgttttgttatcaaagttgcagtcaacaatacgggcaatatcccaacgagcctgttcgtaatgcttctgcttgcgttttaaactgtcatattgcttatgagctgacatttcatcaaatttttttcggttacttgtgtctgttaaatctgccttttctttcgagtgaataaaaatagggttttcgtaaatatatacttcttttgtagtaggagtttcaatgattttcgtattgtatgcaaaacactcttttgttttgctcacgaatctcacctcatatcccaatttttgtaatgaatgttccgattgttttcggaagatgttgttttatatatcaagtatagaggtcagccagttcagcacctatgacgttgtccggcactgactggctgacatagtagggaaattatttcattcccacttttctgatattggaagcttctgctttgacagaaagacgtccattatagagactagcccaagtatgtaatccatcaaatgagactggaatctgccctttttgttcaagttcttcgctggtaacaatcgctgtgttagctttaatgcctactttgactttttcaaactttaattttggaagaagaactgtatagtagaatcctaatttttcttttgtagaaaagtctacccagtcagaaacttctactaactgaaattcctcttgcagtttgtctggatttaaaataaagtcatttcctctaatcatcatttcacctccttatagatatctgattatcagatattaagataatcttatgataaaacaagcaatgcagaatgtcaatagaaaatatctgaatatccgataaaaagattgacagagaaaatttgatgaaatataatgtgcttataaaggaggttcgctatgaataaaataaaagaattgcggaaagaaaagaatataaccgttgcggaacttgcaaaagaattaggcatttcacaaagtatgcttacgaactatgaaaatggaaatggaacgccgagagatgaatctatatgggaaaaattatcacagatattcggtgtgagtaaaagtcatgttatgggattgactacggatattgaaacagccaataagacaaaacagttgaaagtggttgtagatacatctcagccgatctcaatacaaccgaagaatcagacagaccttgatgtattgataaaactggatatgatagataatgaagatatgaaagaagtgtcagaatttcttgataaactgttagcacaggagaaatatgagggacggaaagaatcaaacgttaaatatgtcgttgagtagaaaatacttctcagccatccacttgcccagtcgacccgtcgccctgttaggaaccgtcgcactgggcatccttgcggaacgttagtttgcgaaaatacgaacaaaagaatataaggagagggaatagccgatactacttcaaaagcagtaatagagtgctattcttttttattatattcaatggttgtagttcggaatggcttgctattattgtgcaagtaataagttggataatagagcttgatttccaaggtggtaggcgtaccattgattttgttatgttcgttttcaatgtctttgattaattcatcaatttcccaacatttgtaaacaattacagtcaattcagtatctctggtatctgcactgctaaaggatatgctgttagtaatatgatagtccggcagtctgagataattgtagagaatggtcagtaaacagagtattgtgattggtgctatgattttctttttcatgtacatacctctttcgtgttattagtacagggataactatatagtacctcactatatagtgaattactacataaggatttaataaatatactttatgtagaggtgcagaacatgaactatggacatttagaattaaggatagaagaactgttacaagaaaaaggtatcagtaagaatacgatttgtaaggaacttgacataccgaggtcaaatttcaatagatattgcagaaatgaatttcaaagactggatgcaaatttaatctgtaaactatgcaactattttgaatgtgaaattggtgagttaattcgatatgtaaaagaataaagtgataatgggtatgcggaaataaaaaatattcgcataccttttttattgaatattttataaaatggaattatactgtgtataacatgaaacagacaaatcggagtttgaagcggaggtatgtattatgaatatatgtattatgaatataggattttggtcgtgtataattttggtaataccatttctgattataggtgtgttatttgcgatttttaaggaaaaagcaacaaaatttgtttcaggatttaattcattttctaaagaagaacaggcattgtatgataaagctcatatctctcgtgatataagaaatcagtgctttatgtgggctattataatgttggcaggagcattattatcctgctttttaaccccatatatagctataccaacctatattatttggttagttctgttttttagagaagtccactttgataatcataaagcgtttgaaaaatatttattaaagtaaattctagtttgtatacgacaaacgtttgaacactttttgaacaccgcaaccgtgatgaagtcttcaaagcccctttctatcagtatttgagattaagtaaaacggttcgattccggtctgcggcagtagtcgaagagaagagaaacgttgaagatacagcgtttctctttttttaataaaaagtttgaacattggggagctgaaaataggttaccatgagtaataagctggttaagaacaaaaaacaaaaagaaatattaaatagaagacagaaaaaaattctcttttttggaattcttattattttaatgatagctttcctgggtgtatggggaaagataattgtaacgtcaaatgccttcaagacacaaatggaatctatggtagagggaaaagattattttttagaagacattgagatcacagataaaagaagcgaagctgttactacggatgattccatatcagaaaattatttcttctactatcaaaatggaagaagatatgattatgataagcggatgcaagtgccgggaaagatatattcagagtatcatgtgggagatacgataacggcatacacaacggatcatgtcagttattcttactataagtatggaattcttccgaagaatgagtatacaaataacgaaataatgaaatgtgttggagtgttattgggagtggggatacttagtttgttgttagttggaatagtaagcagaaatgaataatttaaaagcaggagcggcaaagtttaccgttcctgtttttagataacaaaaaagcacgagacgggattcgaacccgcgaccctcgccttggcaaggcgatactccaccactgagccactcgtgcataaataactgatattcagttaaaagcgggtgatgggaatcgaacccacgtatccagcttggaaggctggtgttctaccattgaactacacccgcaagtgtttgtcgctgacaacataatgtattatatattagtcagccgagattgtcaagaactttttaaaacttttttgaaaaagttttaagttctttctatcggatcaaccgataatgcccagaaccggaatcgaaccagtgacacgaggattttcagtcctctgctctaccaactgagctatctgggcaagctcgagatatatattagcatactttttttgaaagcgcaagatataaaattcgaattttgtaaaaaaatacagggacagagacataaaattcatatatttgcaaaccggaaacggcgagtggctattgagataaccggagagatacagtataataagagccattcggaggttacaatgcaatggcagaaagaaaacatatcttgttggcagcaatcaatgcaaaatatatccattccaatctggcggtatacagcttaaaggcgtatgcggaaaaatatcaggaccggatcggtctggcggaatatacgatcaatcagaatctggatgatattttaaagggaatctatcgtgatcatccggaggttttgtgcatttcctgttatatctggaatatttcctatgtgaagaatctgatccgggaagtgcataaagtgcttcccgacactgcgatctggctgggaggaccagaagtgtcctatgatgcgcggaaggtgctggaggagcacccggaagtgacaggtgtgatgaaaggcgaaggagaagtgacgttcctggaactggctggattttatctggaaggcatctcagaactggcgaagattgatggaattacctacagggacggggatcagattcaggaaaatccgtggagaggaatcacggatctgagtacgattccgtttgtctacaaagatctgaaaaaatttgaaaaccgcatcatttattatgagtcgagcagagggtgtccgttctcctgcagctactgtctttcctcaatcgacaagaaactgcggttccgtgatctggaactggtaaaagaggaattacagtttttcctggatcataatgtgccgcaggtgaaattcgtggatcgaacctttaactgcaagcacgatcatgcgatggcaatctggaagtatctgatcgctcacgataacggaattacgaattttcactttgaggtggcagcggatctgttaaatgaggaagagattgcactgatccgcacaatgcgtccgggaatgatccagctggagatcggtgtgcagtcgacgaatccggatacgatccgggagatccacaggaaaatggattttgcccaggtatccgaggtggtgacacgggtgcaggaagggcataacgtacaccagcatctggatctgatcgcgggacttccctatgaagattatacttcctttgcaaaatccttctgcgatgtctaccgtctgcggccgcagcagttgcagctgggatttctgaaaatgttaaagggatcctttatgtatcaggcggcaccggagtacggttgtgtctgccagagccgggagccttatgaggtgctgtataccaaatggctgccatatgaggacgttctgcggctgaaactggtggaagagatggtggaagtctactataacagtaatcagttcgggaaaaccctgcttgcgatagaaaaattatttgacaatccatttgcgctgtatgaagcgctgggggtattttatgacaaaaaggggtatatgaacatttcacataccagaatccgccgatacgagattttgcaggaattcctgcaggaatatgtagaggaagagaagatggaatattaccgccagctgatgatttatgatctatacgcaagagaaaatatgaagacccggccggcatgggcgaaggatctgaaagcgtataagagagagatccgggaattttatctgaaggaagaagagacacatgcgtatctgccggaatatgcaggatacgatgaaaaacagctggcgcgtatgacgcatctggaacggatggactatgatccggataccggtgcgagggaagcgtgctggatcctgtttgattaccggagcagggatgtactgacgtacgatgcgaaaacggtaaaattaccggtagttgacataatgtaagaggaaggaaaagaaaacacgatggaa

SEQ ID NO: 2519 - DNA, 28447 bp, Unknown
  gut microbiota DNA sequence
gttgtggatctggagaccacggggctgtatccgtctcaggatcggatcctggagatcggagcagtcaaggttctggacggagaggtgaccgatacgttttgtatgttcgcagatccgcagatgaagattccggagcggatccgggaactgacgggaattacacaggaaatggtggaaggacagccgacaccggcagaagcagtgcgggcatttctggatttctgcggggaacaggatctgatggggcataatctgatctttgattacagctttctgaaacatcaggcggcggatcagaaaatcccgtttgagaaaaacgggatcgatacgctgaagatcgcaagaatcctgcttccggatctggagagcaggagtctgacgaatctttgcggctattttcagattgatcgggcgcacgcccaccgtgcatatcacgatgcactggcaacgcatgaattgtatcggcatctggtgcggatcgcagaagaaggacaggagcggatctttcagccgaaacagttacagtataaagtaaaacggcgtggtccgatcactccggcacaaaaagcatacttgaatgatctggtgaaatatcataaaatagaactggatgtgtctattgacagcctcaccaaaaatgaggcatccaggaaaatcgatacgattattgcccggtacgggcgcatgaagaggtgaatgaaaaatgaatatgtggaagaaaaacggaagacagatcgtagcgggaattattgcagtcatactggtacttgcaatggtggttccgatgattctggaagtaatgttataagggattgacatacagatgaagaagaaaataatggcggccctgctggcgggagtaatgatgttacagcagccggtcagcggatggtgcgcgcagaatacagacagcgcccagcagtcggaaacgacgcaggagggcgacagtagcgaagatgccgccgcaggagatacagaagacagcgcggcaggtgaaggaacagctgtgacagaggacggagagaacggcgggaaagctgcggatacggatcaggatgtgcaggaggaagatgagattccgacctggcaggcggaaaccgatgaagtaacccttgacaccggtacatccaacaatgctgtcaccggagaacggacgattctggatcatatttatctggaaagtgtggatctgtccggcatgacgaaagaagaagcacaggaagcggtgcagtcccgtgtagacgagattaccggataccagatcattcttcacatggatgacatgtccaacggagtgacagcaaaagaactgggtgttaccggggataatgacggtacgatccggcaggcgatggatgtgggacaggttggtaatgtgatccgacgctataaagtaaagaaagctctggaaaaagaagaccttcagctggatatttcctggcaggtggacagtgacagcatgcggacagcactggaacaatattgtgtgccgatgaaccgggaagtagtggattacagcctgacaagagagaatgatcagtttcagatcacgaacggtgtccgtggggtttctctgaatgaggatgcctctgtggataaattaacggattatctggaacatgtgtggagagatggtccggggaacctggatctcgatgtggagattaccgagccgaaaggttctcaggaagaactggaaaaggtaaaagatatcctgggacagggaagtacggattattctgccagcagtgctgcgagggcgacaaatgtaaaaaacggaacctccaaactgaatggcaaagttatttatccgggcgatgagatttccgtctgtgataatatggtaccatttaccgaagaaaacgggtatgaaccggcagcctcttatgccaatggtacggtggtggaatcgtttggcggaggtatctgccaggtatctacaacgctgtatcaggcggttttgcaggcagaacttgaagtgacggaacgccacaatcattcgatgatcgtaaaatacgtggaaccatccatggatgcggcaatcgcggaaggagcgaaggattttcggtttgtgaataatacggaagcgccgatctatattgaaggttatgtttccggtggaaagatctattttaatctatatggacaggaatatcgatctgcggacagaaccgttacctatgaaagcgaaacgctggaaacgatcaatccgacaacagagctgacagcagactcggaaaaagcatttggcagtatcacacagacacaaagtgcccatacaggctacaaagcacgcctgtggaaaattgtcgcggaaaacgggcagcaggtcagcaaagaagaagtaaataacagttattatcagatgacaccgaataaatacaaagtcggtgtaaaaaccagcagtacagaagcgtccagtgccatgtatacggcaatcgcaaacaacgatctgaatcaggtctatgtggtgctgaaccggtatggcggctgacagatgtagaggagaaaaacatgaagataggtaaactgccggaaccggtattgatccgttcggtattaaaacaggtaaaacacagaagagaggaagtcctggttggtccggcggtcggacaggactgcgctgcccttgaggtgggcgaggatgaagttttggtgatgtccacagatccgatcacgggaaccgcaaaagatctagggcatcacagcattcacatcacggcaaatgatctggctgcagccggtgcagatccggtgggtgtgatgctgaccgtaatgcttccggataccgtcgaagagccggagatccggaaaatgatgcaggatgcggaagaaacctgcgaaaaactgcatatggaaatcctcggcggacataccgagatcacaaacgtggtaaaacagccactgatctctgtgaccggtgttggcaaaatgaagaaagaaaatctgcgcacggtatcccagatccgcccggatcaggatatcatcgtgacgaaatggatcggtctcgaggcaacgacgattctcgcgaaagaaaaagaagaagaactcaaaaaaagatttccggcagttctggtcgatacggcaaaagatttcgaccagtatctgtcggtggtaccggagtcacggatcgcagtgaaacatggtgtgtcttctatgcatgatataacagagggtggcgtcttcggcgcgttctgggagatggcgagcggagccggtgtcggtctggaagtggatctgaaaaaaatcccgatccgtcaggaaaccgtggaaatctgtaattatttcggtgtcaatccttaccagatcatgtccagcggttccatgatgatcgcggcggacgatggtcacgaactggtgagaaaactggaacaggcaggtatccatgctgttgtggtaggccgtaccaacagcggtaacgaccggatcctgcgaaacggtgaggatgtccgttatctggataaaccgcagccggatgagttatacaaagtaatggggtaagagaaaatggcaaagttaaatattgttctttatgagccggagatcccgtcaaatacaggaaatatcggacgaacctgtgtggcaacaggaacgagactgcatctgatcgagccgctgggcttccggttaaatgaaaaatcaatcaaacgtgcaggaatggactactgggatgatctggatgtcacccggtatatcgattatcaggatttcctggagaagaatccgggagcgaagatctatatggcatcgacaaaagcaccgcagacctatacggaagtgcagtatgaggaagatgcctacattatgttcggaaaagaaagcggcgggatcccggaagaaatcttactggaaaatcaggagacggcgatccgtattccgatgatgaacgatatccgttcgctgaatctgagcaattccgtggcaatcgtgctctacgaggcactgcggcagcacaattttgatcatatgcagttgggcggtcatctgaccaagtatgagtggaaataaaaaaaataatcaaagaaaaagtaaagcaagggaatcagccggttcccttgcttttttctaatgtaaagataaattcggtaccgactccctcggtactgatgacattgatattctgattgtgtgcggcaatgatctcgcggacgattgaaagtccgagaccggtacctttgcggtccttgccgcgggaagaatcgatcttgtagaagcgatcccagatcttgtgctgtttttcttttggaatccccacaccggaatctttcacagatacaaaaaccgtaccgtgccgttcggaggtttccgctttgatgatcgagttatcggaactgaacttgattgcattgtcgatcaggttatacaaaacctgctggatctgttccatatcggcatgtaccatcaaagtttccgattcgagatgcagttcgatcgtgatcattttcttgcggcagatcgcctcgaaagtggctaccgtatttttgatcgtgcggttgatatcgaagtctttcatatgcagaggccgtcctttggaatcgagtttatccagcgtcagaaggctctgcgtcagcttttccaggcgttcggtctcatcaacgacgattttcaggtaacgatcctgcatctccggcgggatcgttccgtccatgatcgcttctacaaatcccttgatcgaggtcagcggggaacggaaatcatgcgagacatttgcaacgaacttatgctgatattctcccgatttgcttagctctccggacatatagttcagggtatcggcgagatagcccatctcgtcattggtggtgacggggatgttatagtccagatttccggcggcgtactcattggctccggcggtgatctttttcagcggctggtagacggaatgagaaaagagtgccaggatcagaagagaacagagcagcaggatcgtaaacacgatataaaccggaccaagaaccgattctttctgatcaatgatcacggtcatgggaaggtggatcgacacataccctttggtggacagatttttggtgatcggaaccagagtactgaccatgtcttccttaaaatacccgtgaaaagtgcctgtgatataactgtctgaccccatgatcgccggatcaaagtttttgatcgctttttgtgcctcggaactgtaagatttgctcgtatcgatcaacggctgcccggacggattcaggatgagaatccgggaatcctgaaaggcagagagcgtttttaactgattataggcagcttccacatcttcactgtcggaataatcggtatttgcctgataggaggcgagagagatcgcttctttatacagggcagcgccggtatcttccaggatgtgattctggatcagagaagatcccagtgtggcgatcagaaccgttccgagaacgcccagaagaatatacgccatgataaatttggaatacagtgttcgtttcatcaggatttaacctcgaatttgtaaccgatgccccagacggtactgatggaccatgacggatgatctttgatcttctcgcgcagtcgtttgatatgtacgtctacggtacgggtatcgccgatgtactcatatccccagatatggtctaacagctgttccctggtaaatacctggtttggtgaggaagcaagaaaatacaaaagttccagttcctttggcggcatatcgatcgtcacaccttgatagacaacggaatagttggtcagattgatgatcagatccgggtattccacgtattttcctgccggtactgccggagcagaaggggcaggctggaaacggcggagaaccgctttgacgcgggcaaccagttccttggaatcaaatggtttgatcatatagtcatccgcgccgagttccagtccgagtaccttgtcaaagacttctcctttggcggagagcatgatgatcggtacattggatttgtggcggatctcccggcagacctgatagccgtccataccgggaagcatcagatccaggaggatcaggtttggctgaaaggaaggaaacacacttaaagcttcctcaccgtcgtttacaatcttacattcaaaacattctttggtaagataaagagatatcagttcggcgatgttgttgtcatcgtctacaatcattattttctgtttggataccataaaaaactccttgtcgtactatagcgacttatttttatttcttaaagttaacaatcgtaacaccggcatctccctcgccaaattcagcgagatggaaagaagagacgtattttacccggcgtagatagttatggatgccttttctgagggcaccggtaccttttccgtgaacgacacggacacttggaatatgtgccagatatgcatcatccagatatttatccagttccgcgatggcttcgtcgacggtgcggccaagcaggttgatctcaatgccgacagaggaagatttggacatcttgatcttaccggcgctggtgcgctgcatattcggtgcggagatcacggtttcttcctgtaacagtaccagatcggagatatggatcttggatcgcataatacccatctgtaccagaagataccctttcgcatccgggagggtgcttacggttcccttgaggttcaagctcagcacttttacgccgtcgcccagatgcagatcggaaggtttcagattgcctgtgatcttcttttctttcttggacatattgctttcgaccttgttcatcttcttacggagattctgtcgtttattttccatttctttgatggaaatattggcttttccgaatttgttaaagtctttgatcgtctgatccgcgtattctttcgcatcacgcaggatcgcgtgcgcctgctcattggcttcgcggaggatccggtcacgctgctggttcagcttttcctgcttggtctccagttgttttttcaaatcttctacttcggacttgtagcgggcgatttccatgcgttctttttcaatggtgatacggttttcttcgagggtggagatcacatcctcgaaggattcgtcttcctggctgatctgctgtttcgcatcggcgataatatacgacggcagccccagcttgctggaaatggcaaatgcattactcttgcccggaacaccgatcagtaaacggtaggtaggacgaagcgtctccacgtcaaattcacaggaagcattttccacacccggagtagagagggcatagacttttaactcgctgtaatgggtggttgccatggcgcggatgccctgcttttgcagatagttcaggatcgagattgccagtgcggcaccttccgtcgggtcggtacccgctcccagctcatcgaagagaacgagggatttcggatcagccttttcgataaaggaaaccacgttggtcatatgggaggagaaggtactgagcgactgctcgatactctgctcgtctccgatatccgcatagacttcctcaaaaacagacagttcggaacggtcaagtgcaggaatgtgaagacctgcctgtcccatcagggtaagaagaccgaccgtttttaaagaaacggtcttaccaccggtattcggaccagtgacgatcagcagatgaaattctttacccagatgaatatcgatcggcacgactttcttcttatcgatcagcggatgacggcctttgcggatattgatatagcctttggtattaaagatcggccgtgtggcgttcatatccatggcgagggcagcgcgggcgaaaataaagtccagttctaccagattttccaggttatagcgaaggttttcgcgttcctgggcagccatgttactcaaagaagcaaggatgacttcgatctctgccgcctctttcatttcgagatcgcggatttcattgttcagttttacgattgccatcggttcgataaaaagagtggaaccggtggaggactggtcgtggatcatacccggaacctgtcctttgtattcggctttgaccgggatacagtaacgtccgtttcgcatggtgatcacggcatcctgcagataggttctggcggaaccgttgaccataccggcaagctgtgtatggatgcgttcgccggttactttcatcgaacggcggatctgttttaaggcagcacttgcgtcatcggcgatctcatcttcggagaggatgcagcggcggatctctgcatttaacagtggcagaggttcgagtgcatcaaaaagatcgtccagagaatcccgctgtgcagtttctttttcccggcgtccgtaggattttacccgggaggtgttgtccagaagggcacagatctgcagaagttcggtgataccgagggtacttccgatctccagacgtttcagggaaccgcggatatctttggcactgccgaagttgatgtttcctttctgaaacagacgggacagcgcgtcctgggtctgttcctgcttatattcaatctctcccagagaacaggagggaaggagatcttcgcagcggatctttccgagaggggaagaagcgtgggctgcgagcatctcgatgattttcgtgtattcgagtgtttttaaagctttgttgttcataatgttaaatcctttctatacgctttattttaccctatctgccagggaaaggaaaggcaaaaaagggaggaggaaaaagttttttctctatgtcataaaatgttcatatctatttgataaaatgttaaggaaattttcaggcagcagctgtcttttcgatgtgttccgaatatgggaagagatatccggatacagggaaaacggcgcagttacagttggagtcagaaacaggagactacgcgtatggataaaaagaaagatcacaagcaggacgagtacgatttttaccgggaagtgatgaaaaagaagcctctggataaacgaaaaatcgcgataagtatggcgggagtggcagcaggtgctgtgctgttcggtgtgattgcggcttttgtatttgcaaaggtggagccttattttgaaccggaagaagagcagccgagagtgagtatcgtggacggaaccgggacggatgaggacgaagaaaaagaaccgcagcaggagataccggaagaggaaaacggggacgatcagaccgatgaaagcgacacaacagctgcggatacatccaaagagccgatgacgctgcaggagtattcggatctgtatcagcagatctcggaggcggcaagtgagccgaagcgttccgtggtgatcgtacagggatttaccaatgatgtagactggatgaataattcttttgaggatgagaaacaggcatccggctttattgtggcagacacagggaaagaatattatgtgctgacggaataccgggttgtggatacggtggaccggatccttgtgaccttctgtgatggcaatacggtggacggtcatttcgtcaaacaggatgcagccacaggactcgcagtgatccagattgcgagaaatgatcttggcaaagagaccagggatgcaattgcagtgggtgaactgggaagcgcatcttcggtgaatcagggagatctggtactggcattgggaagtccgtccggttatccggattcggtagtctgcggccgggtgacttccacaacaaatgtgaaaagtacggtggacagtgaatatcatctgcttacgacggatattatgggaaacagcgagggaagcggggttctggtcagtctggacggaaagatcgtgggtgtgatcgcgcagtctttttccggggaggcggataccggggtggtgacggcattatcaatctcggatcttcggaaactgattgagcaactgtcaaataatgaagatctgatatatctcggtgtccggggacaggatatcagcagcagtctctcacagaaaaccggaattcctacaggtatttatgtaaactccgtggaggaagattctccggcgatgaacgctgggatccagaacggagatgtgatcgtgaaagtgggaaatgaaagtgtcgagacgctgtcgagactgcgaacacgcctggatcagtcgaaaaaggatcagaagatcaaagtgacggcgatgcgaaaaggtgcggaaggatatgtggaaatagtgtttgacgtaacgctggatgcgttataaactataaaagagtctgtaaaaaagaatagtgagataaaaaatgtggtatagggacgatggctttctataccacaaaacttctgcggagttttcactgacagaaaatcaggcagaaagacggaaggagattatatgaaatttattcaggaattttttgagggatgccgggtgtccggaatttacctttgtaaacataaacaggcagcagtgacaaaaaacggaaaaccatatgaaaatgtgattctgcaggacaagaccgggacaatcgatgccaagatctgggatccgaattcgctggggattgatgattttgaaacactggattatattgaaatcatgggagatgtcaccaattttgcaggtgcactgcagctgaacatcaagcgtgcaagaaaagcccgcgagggagagtacgatcccaccgattatcttccggtgagcaaatgtgatatcgacgagatgtacggagaactgatggcgattatcaaaaccatccaaaatccatacctgtcccgtctgttagaactgttttttgtggaggatgaagcattcatcaaacgcttccgcttcaattccgcagccaagacagtacaccacggttttgtgggcggactgttggagcatacgttaaatgtgaccaaactctgcgatttttatacgaaagcctaccctgcactgaaccgcgacctgcttctgaccgcagcaatctttcatgatatcggaaagacgaaagaaatttctgcatttccgatgaatgattataccgatgacggacagttgctgggccatattatgattggagcggagatgctccacgatgcgatccgtgagatcccggatttcccggcaaaagtggagagtgagttaaagcactgcatcctggcgcaccatggagaactggaatacggttccccgaagaaaccggcactgatggaggcggcagcgctgaatatggcagacaacacggatgccaagatggaaacatttaccgagcttttcgacaatgcgaaagatccgaacgaatggcttggatacaaccggctgtttgaatcaaatatccgtaaaaccagtatataaagaaagggcagatccatggaatacaaaaagaatgatcttctgactgtaaccatcgaggatatgggacatgacggggaaggaatcggaaaagtggacggttataccgtatttgtaaaagacacagtgatcggcgataaagtacaggcaaagatcatgaaggcgaagaaaaattacggttatgccagactggtggagatcatggagccgtcgaaagaccgggtcgagccacgctgtgcgtacgcccgtcagtgcggcggctgccagatccaggcactttcttatgaaaaacagctggcatacaaacagcagaagattgaaaataatctgatcaggatcggcggttttcagaaagaagagattccgatgcagcctatcatcggcatggaagatccgtaccattacagaaacaaagcgcagtttccggtgggatgcgacaaagaaggccatctgatcgccggattctatgccggaagaactcactcgatcatcagcaacaggaagtgctatctaggcgtggaggtcaacgaacagattctgaatctggtactggcgcatatggaagcgtatgatattccggcctatgatgagatgaccgggaagggtctggtgcgtcacgtactgatccgttatggattccagtcgaaagagattatggtctgccttgttgtcaacggcagccgcatcccggaggcggaagaactgatcgcgaagctttgcaagattccggggatgaccagtatttctctgaatatcaacagggaaaagacgaacgtgattctggggagaaaagggaaacttttatggggcaaggaatatatcaccgataccatcggaccgatcgcctatcagatctccccgcagtctttttaccaggtcaatccggtgcagacacagaaactttacgaaaaagccctggaatatgcaggtctggaaggaaatgagacggtctgggatctctactgcggaatcggaacaatttccctcttcctcgcccagaaagcaaaacaggtctatggtgtggaaattgtcccggctgccatcgaggatgcaaaacgaaatgcaacgctgaatcatatcaccaatgcagaattctttgtaggaaaagcggaagaagtgttgccggaaaaatacgaaaaagaaggcatctatgcggatgtgatcgtggtggatccgccgcggaaaggatgcgaagagagcgtactggctacgatggtaaagatgcagccgaaacggatcgtgtacgtaagttgtgactctgcgactctggcccgggatctgaaatatctgcggggggaaggatatgaagttaagaaggtgcagggggtggatcagtttcctcatacggtgcatgtcgagacggtagttcttttgtccagaaaaactccggatgatacgatagaggtcgacttagacttggatgagcttgatattaccgctgctgagtcaaaggctacctatcaggaaatcaaggattatgtgctgaaagaatttggcttaaaggtttcaactttatatatttcccaaattaaacgcaaatgtggtattgatgtaggagaacattacaatatttcacagaaagaaaatcagaaagtaccacaatgcccgaaagaaaaggaagatgctatccgagctgctcttgaacattttgcgatgatctaaaggtcattgctgatttcaaggaggaatagcatatgaagtcattattcgaagaaatgggcggtacatatacgctcggagcagatggaatgtattatccggatttggaacttccggaggaagaaccgcattacggaaagtacggcagaatgcgtctgcgctatctgaaagaacaccataagatgctgtacaacacacttttgctggatggagaactggtcaaacatctgaatgaggtggatgataccgctaatcaaagaatggaactgttgaccctgcaaatgcaggagcagcagggcataaacgaagcattaaaggctcgtgatcagatggcatgggttggtgcttgcaataacatccgaaatgcggcagaggaaattgttttgaatgaattgatatgttgttaaatcgagaaggagggagtgatgaattccctccttctcgattctgaagatatcatctcttttggagaatgaaaagggattttgtagaaaaatttatgcttatatactaaaatgcacataaggaaatacaaagctctacaaattatttatttatgtgtaacgaatgatgatttccgggtactaacttagcagaaaggaggaagtacgatggaatcaatggaagaaatataccaaaaccactcaaaaaaggtctatacgtttctactaagtaaaacatgtaaccatgaacttgcagaagaattaacacaggaaactttcttttgcgctgtaaatagtattaacaagtttaaaggaaatagcagtgtattgacatggctttgtggtattgctcaaaatctttggctcaagtatttaagagacaataaatcatttgaagatttatcaaattatgaagacatgttgacaatttcttctgctgaagatgaactatttatccagtgggaaaatgtagagatattgaagtcgctacataatcttgatgaaccgatgagggaagttatgtatttacggttgattggagaaatatctttcgctcaaatcggtgaaataataggcaaaagtgaaaattgggctcgtgttaatttttatcgtggaaaaaaaagaatatttgaggagatgaagaaaaatgaataaagaattgcagtgcaatatagtcaatgatttactacctttatacatggatgatttgacatccgaggaaacaaattcatttattaaaaagcatttggaagaatgccaaaattgtcagaatgaataccggacgtttaaagcagaattaagtaattcagccaacaggaataatgctacaaaaatgcaagagattgattatctgaaaaaaataaacatatatcaaaaaatgaattttgttttgggtgcaatcatcagcttcctgtttggggcatgtttacctgtattgaaagttggcatacctgtacttctaaacggagcagtccctgattattatctggcacgacttcaaatcgcatggcatatcggtcttttgaaaatgacagtttctggagtaatagtgtgccttatttatatgattattatgtttataatcaagaaaaagctaaacagcaaaaccagtcgaaatagtcaaccgtaaagagagtggcctgtatccatcgcttcaatctggttttgcaataaatataagggatgacagcataaaatgctatcgcccttttacatcatttagaaagagccatgactgcactccatatcagagtgaaagccgtggcttttaacttgtggttaagtttttatctccatgattaacaactgctcgattgtgctatgaatatcagcttgctataataaagacaacaaagagctttttgtaatatcctcaaaggagattaagatatgcctatgaacatagtcatccaagagcagcgcaagctacttggattaacacaggaacaggttgctgattatctcggtgtttctactcccgctgtcagcaaatgggagaaaggtatcacaagccctgatattggccttcttcctccattagccagacttttgaaaattgatttgaatacattgttttgttttagtgaggatctgtctgaacaggaaattggatttttctgcaacgagctcgccaaacaagcaaggaatgatattctttctgcatttgatgctgctgaagcaaagatacacgaatacccacacaacgaactgcttcttctcaacatcacgattattttggattccatacttttgcagacagccgatgatactttacccatcgatagccttgatacaaagatttcagactggtatttacatctggctgagagcaatgatgaaaagatacgaaatagtgctaactatatgagagttaaccgctatattcgtaagggcaaaacagatgctgcacaagaggttcttgatacaattcaagataaaactgacctgattagcacattgccggataaacttatgcttcaggtatctatttatatgcaacaacaaaaagcagaattggctgcattagaactggaaaaggcattattcaaagaaattaccagagttcagatgctcctaacgaaattgatagatgctgaattagcttccggaaacacagaatctgcttgtaaaattgccgaaaaatcaagttccatggtagatgtatttgatatgtgggaatacaaccgatatattgcttcttatcagattttggaacaaaagcaaaatgcagatgcaacgcttcatttactggaacaaatgcttgaagcgctcactacacattggtcattaactgattccgttctgtatcacaggatggcacccgaaaccaaagctatacaatcccatgagttgataccagttcttctcaatggattagaaactgatccacaatgtgcataccttcgagaacatccaaaatttagggagattatagacaaatacaaaaacaaatgagggatacggctgctactacctttcggaagtaacagccgtgttttcaattatcgctcgtattctttcttcttttgcttctttggttgtggggtttcttgtttcggcattttcagctgttcgctgatagaacgctttttcttctgaattggctgttctttcaattcggcatcaatctgcctgttggcttcatcgaaagtagcagaactgtatttattcttgtatttttcatacaattttcgtactaaaccaactctgccatcaggacggagtttttcacgttcctgcataactgcatccatattttcgggtgcgataccatctcggatttcaagaaactctgtcttatcagcttctttctgttcagacagggcagcacgctgctgttccaaggtttccagagcgttctccatcttttttagattctgctttctggcagcaatgccgttatcctgacaattaagctgagaaagcaatccagccttttggaatttcaattcttcaatatcttcggtcagagctgcaatctgttcacccagcttacttgcacgaatgaaatgaatcccacagtttttctgttctgcaatcagctcttttttctcagcggtcttggctttgaattctgccttaacatttttgtattcagccagtatatcagccaaaaggtttttctgggaagtgacagcttcctgctgagaagtattcacgatcaactgatactgaagaaaaatcatgttgtcacgcagagtttccaatgcagaagcgagggcaggaatattttctttgactgctttcatcagcttctgcacctgttttttcagttcacgcaggagtttgttatctgccctgatctggcggttcagttcgcagcggtcagaaacaattcccatggattccagttttcttgcgtggtatccttcgtgtacggttggctgttcagttagtcctctggcggcatgactgcgacagtctacacggtcagcaataccatggcgttcctgttcttcattgacaatcatttcccagctcttgcgccatgcaaatatctgttcttcgctgttccaaagtgctgtaagtgggttttgtctcccatagcgggtgcttttaggggtctttgacgtcctgatacatccctcaattttctcagcttcagatggggttaaatactgccttttctccccgaactgatacatatattgtttctcccacccctgtgttttggcggtcttgaactcatcagcagtaaaaccacgttcttcgccgccacgcttgcaaaggtattctttctgagtctttgtctgccacttgccgtgttcatctaagggacgcatggtgaaaagaatatggctgtgaggattatgccccggagggtacggatcatggatgttcacatccgcacacattccaaggtcaatgccttgctcacgaacaaaacgcttcagcatacttttccagtcatccaaagacagttctgatggcaaagcaaccacaagctctctcgccagtcggctgtcctttgtcttttctacggactcgacagcttcccagagtagctgtctgtccttccattcttctggtgcatactgcggaagaaagacttcgctatacagacacccgtgctttctggtgtagtcatgggtaagtccgtcataatcattgtagagtcgggaacaggatgcataagcggcagctgctatcacagaacggcctgcgccacgactcacaacttttgcttctaactggaaatagttcactattttcctccttcctgtgccgcagcacaatttttgtttcttttttgaaaaagaaaataggtgcggtgaatgctgcgcctatctctgcgataaaactgccgcacccgaagggcgtaccttgtgtagtggcagattttcgcaggcagttagcgcaaggtagggtacaatttgtacccctgattacaaacgcagtatcgtttgtacttgcggaaactgcgtggacaatgacagcaagtgtggcattgtacataaggctccaacggagccgcaaagcctcgcagagcgcacgaccccgaaggggataccaccgcccattttatgggtggtgagtaagtgcgcccttcgggatagcagcgaagctgccaaggcttatgccttcaatcgtcttttcagctccatcttcacatcatcaagctccatagtctgaacttccgggaacacgctttccaatacggctcccatctggatcaatcgtctggttcttgcctttcgctctttctggcggttgcgtgcttcaatcgcttccattctgtgctgtgcctgcaataatttcttttcatcttcagtcataggtctgttatttgccataaaatctcctggtatcggtgtggtactgtaatccggtgtagatggtgcagatacaattcgttttgcaagttataagttatctgtgtactgacaggcgaattgttccgcaccatcggctgtgaatttaagtaccggaatttaatatttttcgtgcttcctgcatattggcggctgcgttcaactctcggatattctgattgttgattttcaaaggaacacaacgctccaatactcggtcataaattctggctcttgccagatctttcggatgtttcaactcatccaaagttagattggtggttacaatcagtggtttcttgcttcggtatcgactgtcaatcacattgaatacctgttccaaagcaaattccgaacttcgctcaattcccagatcatcaataatcagcagactgtatttattaaaactgtcaatgaactggtttctgtcatcggaatatattccggtcagcgtattcaggattctggaaaaattggtcatcagaatcggaatacctttgtccaacagggcatttgcaatgcagccagcgaaaaaggatttaccggttcccacatctccccagagaagcagtcccaacgagttcgctttcatttcttcccaatgggacacatactcatgggctttctgcatttccggattgtagcctttatcattggaaaagttgtaatcatgcagggatttgtcctgcaatccgtttgtcctcaagcgtgacacctgaatgagaaattcctgatgcttgcgttcggcttcttctttgtcgtatatttcctgctgacagcggcatcgaaccgtaggaaggaatactcgttccttcaattcaattcggtgctgtctgggagtgtggcatttggaacaatacatcagtccgtcagcttcgttcaaatattcatcctctgcaagctctctcggctgaaataattcatccacggcgttattgattggtctcataggctttcatcctccttacattcataggttcgtttgacaggagcaggatggtcacgcaatgcccagcttcgtatggtggctgcgtgactggaatactgttttccgctggatgccatatagctggacagcttttcaatgtattcctgataatgaggaacctcgtccttcaaagccttcagttcttccgtactcaggaaaacattttgataagagccataagcggtgcggtcatccttactctctgaatttgttctttttatattgttcttctctttattactactggacagttttctgtctgtcacagagacagttttctgtctgttttacggaaaaaattctgtccgtttgattcaatgcttccggtggatatttaacgtatatcctgtttggaaaacctgctccctgacgtttacgggcgatcagattttctttctccagagcattcaatgcggttttgacagacatttcactcttgtgcatggtttctgccaggctcttgatggggaagaaaatgaacacatgaccttgttcatctgtccatccgtcatttttctgggacagccttgctcggtcgagcaaaatcgtatagagaatttttgcagtttcatttaggccatccttgtccagtaaaaatcttgggaacgccatatacggcggtatcggactgctttgtgttagaaattgtgtcatgtgttcacctcccttctgtgagatcagcttggagcaaacttattctccaagaaaatcccaatccacttcctcatccagttcctgctgtgtgaccgaaacggctccaaccggcacttgcgacattcccaccatacagcctgcaagaaataccggaagtgttttctccatggcgctttctacagaggaaataatctgattcacaaatcgttcctcacgttccctggtttcaaagtaaggatcatcctgactgcgataatagcggtcaaagtaatccaccagagctacggcaatcacattgctgtaggatttgaattgctgcttgtccatgttctgaagatactgccatgctcgcttctgggtgtccttttccagattgaagcgaagatttgtgctgcggatattctcgctcatggcttactccttcctgcgaaggctcatagaggcgagatattcataacctttggctgtcgcacaaatatcatccagaatagtcactcggctttcatcgtactgtccaaaatgcttgaccagacagccgccaccaccaacgatatacagtcgcatcagatccggattgtattcatagcggcgaagcgtagcaaaaatatcagccacatatcgcttagccacggaggtaatacagtccagatagggcttgctgatatcagcagttccgaaacgaagtacctgctcaacagtagattcttcgattttcacgccgaagctgtccagtaccgcattcttagcggcaatcatgcactggttggcaccgaacttttctgtccaacagcggctctctaccgcctttttattgttgatatacagaatgttcatggtgccgtttccaatgtctgccaaaagattcgttcccttgaaatttcccagttgattgatgatggcagggtatccctgcgggaaaagactgcatccgacaaatcgaatgtaataatcgttgccattaaaacggaagttcacttccttgttgcggagcagatagcttcggaaatcttcacgctgtttgcgaatccaggtcagtggcagaccggcagccagatgaacatctgcttcacggatgccgtatacattcagttctctggcaaccgccatgagcgtcagaaggtaatagtcctcatccacagccttgtctgcgataaattccttgtgaccttctccgatgcggtaatagatgccgccatattccagaatgttgccggagaagatcggctcggtttcataggcggtcactccggtaggggtaactgtgtttgcggtcttgatgttgccgtagccgtgatccacagcaatgattttgatgttgttcagttctctcatttggtctgtacctccttgtgcttgttcgtgttcataaaaaatgcccctttcagtagatttgcgttgaagtagcaccggattttctgatttggtgctgttttcattgcaatttcattctattgaaagagggcgcaaaacacattgagcgtggattgagcggaaattgagcaaaatttatctgtggaataaaaaatagctctgctattacacagagctacaattgtttatttaatgacaattcgttcatttattttacaaggtgaattaagacacattatcacagttaatggatcaacattatattctgtcgcaataatgtgtgcatctaccattactgatattgtccatgcagaatcaatttcacctttcggaatttttattcgtcgcttttggtcatattcttcaaaagctttcttaatgtttgttcgctggttggcttttaatgaattaaactgctttaatgcaaccatgggcataatcctgcttttagcaaacatattcgatacagttacccatttcacgaaatctttctgagatttgaatactattttatttttcataacaatcctcccaaaaagtttttacagataaaaatcgaattttcccttgagcattaagtgtcggaagtaattctttaatcatgtcacaatcactttcgttaaagtaatagtagacacattcgtcaatattagatgcatttattgattcaaatatatgaaaatcattccacggagataatcctaatatttctaatgcccccgtaatatttttgaaagtatcaaaatgataattatcagaaaaagttaatgaaggattagcggctttaagctgaatggcatatcccatatttgcagtcaacttattcgatttaagcgtccaactatcaacatcctgtttgattttggggtcattattataggctattgccattttttcaacagcactatttgcttgaggaatttgtttgatctgtaattctttgtatgcgccacaatgtgttgtcaaagcgtttgaatacaaatagaaataattctcatcaatttctatttcttttattggtgcatcgggaagttggtttctgaatgaatcgagaagatacacatcacttttcttatcaaattgcccatgaatatggtatgccggtttatgtgttgctaattcgagatttgcatcatagtttgtagtaaatatgttgtcgaacgcctctaaataggtgatgaatttttccggatattcttgatacaaggtattaagtttaccatcattatatattgcatatagataagcaactctcagagcttccctgacatagtattgctcgggattttgagtattggtcttgtggcatactaaatcatgaattaaataatagtcttcaaatcctatatcagttattcgtaatgtatcaattttatctgcatattgttttttgaaagacttcaaagattcatcttctgcagtacaatttgtaaaattatcgtatttgtcctccaaaatatctcttgcttctaaaaataattgccctatataattttttaacaggtacgggaaattcacaatgatatgtgatggaaaatcatctctatcacaattttttagaattctcaatactatttgttgcgtagtataatcagttttattaaattgaatgtttataccatttccaacgagtaaattgttcatatagttatatatccccttctttggtcaataatttttcgcctaagtataatccggcttgcgcatacgttccaagcagttcctgtttctttgcttcaatcatatcaggttcaaactcaaatactgtttcatagatttccatagctttctggaaatatgaagttgcctgcgaaatttctcccatagtcaggctgatatttcccatcgcttcttgaacacttgcataatccagaccagtatcagaattatattctcgaattacacggcagagctttcgcagagcagacaaaccaacatcaggctgtcccatatccgtaagcaatacagcatagtttgtaatctgcacaatgctatcatggtaataggccagaccatactcatctatgattctgattgcctgttccatattttctttagcaagttccagcttgccattcattttatacataccgccaagatttgcatacagattggacaggagcaacgcattctccgaagtcattttcggaatcattgcaatggcatctttctgcatcttgattgctttatctggtttcttctcataagctgcctgataactgagcagcaatgcccggtcagcaatagagcctacagccttgtccttgagcaagtcagacagtttatttataaccaattccatcccctgataatagcggtaattctccatataagggaacacatcttccaagaaacgaagatataccggcatatcatcattttcaatctgatttatcacaaattcaatggtctggaacaactgtttataataagaaacttcttctccatgacgcagacaaatctgctgtaagctttccaataaggtgtgacaagtctgcacagaaggttttgtttcttccattgtcacttcctgcatcattggatgaagggcaatcatacgaccttccattgccttgatgaagcctttttcaatcagatcattgacagtattcatatcacgcagctttaaccagttcgcaaacaatctgttttgaacaccggaaaacgaagccaacgcaaggtttctcataatatctgtttctgcttctgaaagctgatacagagagaacaacgtgtgaatgtggtcataataggtcgccttgcgacttttgccgtctttggagataccgatagtatcggtggcatccagggcgactttttcttcttttagcttctttaacaggagcaacggctccataattccactttccaacaaacgggctgacatttctacagcaagagtatgactgtgtactgtttggatgatttgctccaaaatcgtgcgattcttttcagcatcggaatagaagcagcccatcagtttaatcaaagcatctgtatccccaatttcttccagattcatgaaagtatagttgttaaagctgcttcgggtagtaaacagaatacggcagcgatatttcatcacaaccgacagcaaaccatcctgcgatgctgtagtattaaaattatcaatgataaataaggtgtcctctttcaatgtacgcagaaaacggttatgtttgcggaaccgttcttcattgtcgtcatccggcagatcatctgcaaaatccatatctgaaatatcttgttttaaattgccagtgtaggaaaggtacaaaatatttgtgtattctttgctatgaattttagcataagcctttgccaattcacttttaccaatgccggcgataccttgcagaaatacctttccatgactacataacaactgatgtaaagttacaagttcattgtctcgtccacagaaatgacggcatggctttggggtaccgccatcgtagataaaatctttcacggccggagaaagatttccagcagataacagattcttagtatttacatctcgctttacaaaagtacgttccatgccaaagcataaagcagaagttagaaatactgcttcatccatttctgtttcacaaggataattctcgagaagccgagccttggttttatctgatatggttgtatcctgcaccagaatgttataaatctcttgcaccgccatagtactgtcatacatcaacggaagcacatttctgtgcatatcagcagcgagtcggtttcgattgtggttatccatataatacctggtgatacgaggactgatttttgcttgtccattgaaccaacggcataccagaccattatcaaaatcaaaatccagagattcgtctgaacttaaaaagctgacaaacaactggtacatcatgtcaatctgattcatactgtgggcatcactgatatagttacgaatggtggtgatgactgaactgaaatctaaatattccatagacagccctccttcaaaaatagtcaatttacgctcaatccacgctcaatgaagctttagactgtttgttctaaaatgagtgtagattgatggaagcgttctgctaaatattatagcacggctttcaagtctacgaaagagcataggtaagtgatttgaaaggaggggctcatggaacagaatatagcatttgaacgatgtgtggattttctggctcgtatgattgagaaatacgggcaagagctcctcgatgagatcaatgcagatgaagatggtggggcaagaactaaaacagaagatacaaagtcagcgtaaatgggtgtcgaaaatgtcggcatccattttttatattttgaatatattgaaaaactgaaaatcaatggtataattaagttgggacaaataattgaaacagtaattcgatatatgccatatggaatataatgggaggcagcaatcatggatagcagaaaacgtatggggaaagataaagatggagtgattttccctgttgctccaaatctttctgaaatgagtgatagttatttggattttatagaagcaatcaaaaaagaaattgagaaccagagattaaaggttgtactgaatgcaaattccagtatgatctgtctctattggaatattggtaaagctattctgcaaaagcaggaggaagaaggctggggagccaaagtcattgaccgcatggcaaaagacctgaaagatgcgtttccggatatgtccggcttttctccaagaaatattaagtatatgagaaaattcgcagagtgctggccggattttgaaattgtgcaacgggtcgtggcacaaattccatggcgtaccaatcgtatgttgcttgacaaattggatacacaggaagaacgaatctggtatgcacataaaaccatcgaaaacggttggagcagtacgattctggatttgcagattcagagcaaattgattgaacgtacaggaaaaagtgtcaataacttccctgttgctttaccacctgcggattccgatatggcaaatcagattttcaaagatccgtatctgtttgatttccttggtactgatatgccaaggcgagaggttgagattgaacgtaagctgacagagcatatccagaactttcttttggagttgggacagggatttgcgtttgtaggcagacaggtacatctggaagtgggcggagatgacttttatattgatcttttgttctatcatctgaaacttcgctgttatgtggtaattgaactgaaagcttgtgattttgagcccggtttcatcagtcagctcaatatgtatcagaatgttgtaaatgatattctgcgtcatccgagtgataatccgactatcggattgcttttggttaaaggtaaaaatcagacggtagttgagtattctcttgcaggataccagaatccaattggcgtagcagaatggaaaaaccagatggtaaaagcacttccggaagaactgaaaagcagcttgccgtctattgaagaaatcgaaaaagaattggagtaaaaagtgccacaggccgtggcacaattacatatcaccctatggatggaggtggttaggaattgaaaacaagaagatgttacatatacacacgagtatctacctcgatgcaggtagatggatatagtttggatgcacagaaagataagctgaaaaagtatgcggaatttcaggatatggtagttgcaggtgaatactctgatgagggaaaatccggtaagaacatagaaggtcgtccacaatttttgcaaatgctgaaagatattgagtcaggcaaagataaggttgaatttgtccttgtattcaaactttcccgattcggaagaaatgcagccgatgtacttagttccttacagcgtatgcaggattttggggtcaatctgatttgtgtagaagatggcatagacagttccaaagacagcgggaaattgatgatttctgtcttatctgcggttgcggaaattgagcgtgaaaatatccttgttcagactatggaggggcgcagacagaaggctcgtgagggaaaatggaatggcggttttgctccttatggatataagctggtagatggttatttatatattgcagatgatgaagtcgatgtgattcgcattatttttgataagtatgtgaatacaacaatgggagcatctgcagttgcaacgtatttgaatgagcatggctatgtaaagaaaaagcgccagaataacacgctggatatgttttcagcacattttatcaagtcaattttagacaatccggtttattgtggaaaactcgcttatggtcgccgtaagaatgaaaagattgcaggaacccgtaatcagtatcatattgtgaaacaggacgattacccggtttatgatggagtacatgaagcaattgtttcggaagaagtatggcagatggcacaaaggaaacgtcaggaaacaggtgtcaaaagcgagaaaatttataatcaggaacatgaaaacatcctttccagtattcttcgttgtcctgtgtgcggggctgcgatgtacggcaatgtaaatcgtaagaagaaaaaagacggaaccttatataaggattattattattatcattgcaaacaccgtactacggtaaatggtcataaatgcggatacagacgacagtggaaacaggaaatggtggacgctgcggtagaagaagtgatcagaaaactggttacaaacccgaagtttgaacaggcaatccgtcagaagattggttccagaattgatacagaagaattggaaaccgaactggaacagcttcgtaagaaacttcatcagctaaacggagcaaaagcaaagttgggacagcagatggacagtcttgatgtaacagacaagcattatgaccgcaagtatcaggatatggaagaacgcttgtataagctgtatgatgatattgattctgtggaagaagaaattgaggaagtggaaaccagaatctataatgtgcgtcagcagaaaatttccggtgacaacatctatcaatttcttctgtattttgataaactgtatgataagttcacggatgctgaaaagaaagagtttcttaacagcttcattgaacgagttgatatatacgagcaagagcagccggatggccgtttcttgaagcacattaaattcagatttcctgtctattttaatggaaaggagatagaggaaatgagttgggacaacgaaacaacagtcgagacttgtgttttattgtccaaactaggataaaagctggctgaaaattgaagacctagacatgaaattttgcaataaaggtcaatgatcagctatatatttgtcttattattgg

SEQ ID NO: 2520 - DNA, 6018 bp, Unknown
  gut microbiota DNA sequence
gataccgctggtggcaggaacgattgtcagtgtgatcgtcggagaaattctggagttcttcctctttcacgtggattataagaggacagaacgtctgcagttcgaagatgatgaatattattattatgtaaaagcagtacctaaaataacaggtgcgaaaaagagcagggaatacaaaatggaagaaacgccggtgtatcccgatgttataagagaacaggaaggggagtgaatcagtgggaaatgtgatggaatttatcaaataccatctgcgaatgacaaaattttcgctgccgtcttccatcagagtcattgatatcgtacagattctgctgattgcgatttttgtatattatctgatggtatggatcaagaataccagggcgtataccttgttaaaaggtgtcatgtttgtcagtatttttctgattattgcagcagttctgcggatggatacgatcctgtggatctgtcagcagctgagtgtggttgcaatcaccggtgtgctgatcatctttcagccggaacttcgccgtgcgctggaacagctgggagaaaaaaagatgttttccaatctgatttcgtttgacaatggaaaacaggtggatgagcgtatcacagaccggacgatcggggaactgatccatgcagcatatgcgatgggagaagtaaagacgggtgcgctgatcgttgtggaacagaacattattctgcaggagtatgaaaagacgggaattgcaatggattctctgatcagcagtcagctgctgatcaatatctttgaacataatacaccgcttcatgatggcgctgttatcgtaagaaataacaggatcgtatcagcaacctgttatctgccgctgtcagacaatctgggactgaacaagagcctgggaacccgtcaccgtgccggtgtgggaatcagcgaagtcagtgatgcactgacgatcatcgtttcggaggagaccggaaaagtttcttatacttacggtggcaagattgtgatcggtgtgacaccgggtgcactcagagagcggctgaacagtatgaagacacgcaaagaccacaaagagacgacgggtcttgcaagaatatggaaaggacgggcaaagcatgaagaaaaaactggcgaataatctcagcctgaaggtcatttccgtattgattgcctgtgtgatctggattcttgtttccgggacggttgatccggtacgcaccaatgtacggtattccggtgtaaaagtagaagtgaaaaatgacggatatatcctggatgcgggaaaatcgtatcagattgcagacgaataccagaccgtaacggtgtatgtgaccgggaaaaaatcggtggtggaaggaagaacggatattgccgtggaagcagatctgacacagatcgtcaacatggatacgaatccggcatatgtaccggttacgctgaagtctgtcagcggaatttcggaagaagatgtgaccatcattccgaagacgatcccggtaacgattgaagatactgcgacgaaggaatttctggtaaccggtatgtccacaggaacaccgggaagcggttatgtggtaggcgaatgtacaacagatccggaaaagattcagattcagggaccggaatctgtggtaaataagattaagagtgtggtggctactgtgtcggcggacggtatgacgatggatgccacgaagaaagcaaagatcaccctgatcgatcagaatggggaaccgatgtcggaggaatacctgcagtttttcaatatcagcgatgaccattatgtgaatgtgctgatgaagctgtggcgggtacaggatgatgtaaagatcaaggcaaattacagcggaacaccggcaaagggatatcaggtggataagatcaccacaacgccggagacgatttccatcgccggaagtgaagcggcgttaaagaaactggaggataatggaaatacgctggagatccctggcgagctgatcaatgtagacggtatcaattcggatctggaggcaaatgtaaaactcagtgcactgatttcggaagaagatgaactgaagattccggaagaagtgggacagtctgtggctgtaaaagtcagcattctgccatacggaagcagggaatatgatctgaaaacagatgcgatccagatacaggggctggcttctgacctgagggcaagttataacaaagataagatctcgatccgtgtcaaaggaacggaagcgaatctggatgccctgaaaacaggagatatcaaagccgtgatcgacctgacaggaaaaacagccggagaatatacgattccggttacgattacgctgccggacggctatgaacaggtagaagaagtgcaggctaccgtacagctgaaccaggcagagaaaacaagcgagtagaggaattaaaaatggttagtaaaaaagttacaataaagaatcctacgggactgcatctgcgtcctgcaggagaattatgcaagacagcaatccagttcaaatcgaaggtcacctttgcttttgacggcggtacttctaatgcaaagagtgtgctgagcgtacttggtgcctgtgtgaaaagcggggatgagattgaactgatctgcgagggtgaggacgaagaagaagcactgaaaaaaatggtggaagccatagaagcaggactgggcgaatagaaatgaagatcgaagaaaaagcaaaatgtccgtatgagaaaaaatgcggtggctgcaaatatcagggaattccgtatgaaaagcagctgaaggagaaagaaaagaaagtacggaaactgttaaaagattttggaaaaccggaaccgatcatgggaatggacgatccatattattaccggaacaaggtacatgcgacatataagcatatgcgtaccggcgatattgccgtcggacgatacgaagaaggaagccaccgtctggtgccgatcgatgtctgtcagattgagaatcagaaagcggatgaggtgatccagacgatccggaaactggcaaagtcctttaagatcaagatttacaatgaggacagcggctatggtctgctgcgtcacgttctgatccgcaccggaagaaaaaccggcgagatgcttgtggttctggtaactgcatccccggtatttccttcgaaaaataatttcgtcaaagcattgcgaaaagagcacccggaggttacttctgtggtcttaaatatcaacgataaaaagaccagcatgattcttggagaacggaacattgtgctgtatggaaaaggctatattcaggatgaactctgcggatataccttccgtatctccccacattcgttctatcagatcaatccggtacagaccgaacgcctgtataaaaaagcgattcgtctggcagatctaaaaggaaaagaacgggtactggatgcctactgtggaatcggaaccatcggtatgatcgcttccaagcatgcgaaagaggtcatcggtgtggaactgaaccgtgaagcggtaaaagatgcgatcggcaacgcaaaaggaaacggtgtgaaaaatatccgtttctaccaggcagacgccggcgaattcatggtagcgatggcagaacgcggagagggcatggacgtcgtcttcatggatcccccgagagccggaagcgccgaggcattcttacagtccgtagccagactggctccgaaaaaaattgtctacatctcttgcaacccggagacaatggcaagggatctgaaatatctgactaagaaaaaatacgaagtatccaaaatctgcccggtcgatatgttcccgttcacggagcatgtggaatgtatcgtgtcgatggtgagaaaagagaaataaataatagcaggcaagtgcatttccgagcttttcaggtatgggcaacattccggaaaagctcggctcttttatatgaaaacatatcttacggatgtgaaatcagaaagagtataaaataaatgataaggaggcgcagcatgggagatatgttatcaaaaacatcacataaaaagaaagatccagctattgatcaggaatttttaaagaatacttcatggttgatctggttttttataatcggctgttgcgctgctttgtactgtttgatctgaaaatcggtgaacttaagcatcaggatatcggtcagatgcagatgtatgttcattactatgaccgcaaggtaaagctgcctgacgagaacccaacaataggtattgtgctgtgcagagataagaataatgctgttgtagaaataactttaccggaagataatacacagatttttgcaagcaagtacgagacaattttaccgagcaaagaagctctgcaaaaactgctggaagaacagatgttagatgaagagtagaggtataatcatgaaaaatcatatagaaatcacaaatttcaacgacccgaacctggatctgtatgcgcgattatcggaagtgcagctgctgcggtatgcggagccgaagccggggatttttgttgcggagagtccgaaggtgatcggtcgggcgctgcaggcggggtatgggccgatctcttttctggtggcgcatcgggatatggatcgggaagcggtggagattctggagcggtgggacgaagtcccggtctatacggcggaggatacggtgttgcggaaacttaccggatttgccatgacgagagggatgctttgtgcgatgagaaggagagagcttccttcggtggaggaggtctgccggggagcgaggaggattgcgattctggaaaatgttgtgaatccgacgaatgtgggagctatctttcgctcggcggcggcgcttcacatggatgccgtacttctgaccggagggtgcagcgatccgctctatcgccgggcggcgagagtcagtatgggaacggtatttcagattccgtggacgtattttgataaaaagacggtgtggccggcacaggggatggagcagttacgagaaatcggttttaaaaccgtggcgatggcacttcggaatgattccgtggagatcgatgatcccggattgaaaagccaggaaaaactggcgatcattctcggaacggaaggagagggacttctggcagagacgatggaagcgtgtgattatactgtgaagatcccgatgagccacggcgtggattctctgaatgtggcagcggcgagtgcggttgcgttctgggaacttggaagataaaatagagtagtaaggtatgaaaaaaatatgttataatatacaaggattctgaaaacaaaataataaggtattcttggaaatttcggttcaagatccgtgacaatctggaaaaagtctgcgaagcattgttgtaaaacgggtaactgtaaaggtacggaacagttactaaaacaggaggaaaaaaacggtggagaaacaggaattgcatattgattttgaagcggcaaaggcggcttttgaaacgtatctggatgaatatgacaggacggatgacaagattcatctgaaaatcgtacatacctactgtgtggtagactgtgcggaagagatcgcaatccggatgcatctgggacaggaagatgttcagttggcgaagatcatcgggctgctgcacgatatcggacggtttgagcagatcaggcgattccacagttttgagccgggaaccatggatcatgcggcgtatggcgcagagctgcttttcggaccggagaaaatgatacgacggtttgtaaaagaagatacgtttgacaaactgatcgagacagcaatcgcaaaacacagcgattttcgtctggaagggattagcgatgcgcacacgctgctgcatgcacggctgatccgggatgcagacaagctggataactgccgggtaaaactggaagagacgatggagacgctgctggatatggatgaagcgaccgtgggagcaagtccgatttctgaaaaagtgtgggcgtcctgtctggcgggagaatccgtgctttctgcggaccgcgtatcggggatggattactgggtgtcatacctggcactgtattt

SEQ ID NO: 2521 - DNA, 6083 bp, Unknown
  gut microbiota DNA sequence
cgtagcccgctacgccgcccttattcggataaaatctcccacaaactgggactcgcagctcacgaaaagcctttttcagacacgctctagcgatgaatggaaactggagccgcgctacaaaataacaaaagagtgacatgctgggaacagcaggaaggagaacaaatgtcaaaagtagtagttatggatcacccgttgattcagcataaaatcggaattatcagaagaacagagacaagcagcaaggaattcagagaaatgatcggtgagattgccatgctgatgtgctatgaggcgaccagagatctgaaactggaagatgtggagatcgaaactccgatcacaaaaatgactgcaaaagaactggcaggaaagaaactggctgtagtgccgatcctccgtgcaggtctgggaatggtagaaggtatgctggcaatgatcccggctgcaaaagtaggacatatcggtctgtaccgtgatccggaaactctggtaccggtagaatattactgcaaacttccggcagacagttctgagcgtgatatctttgtcgttgacccgatgctggcaaccggtggatctgcagaagcagcgatcaccatgctgaaacagaaaggtgtaaaaaatatccgtttcatgtgtatcatcgcagcaccggaaggtgtgaagaaactgcaggaggtacacccggatgtggatatctacatcggtgcactggatgatcatctgaacgatcacggctatatcgtaccgggtcttggggatgccggagacagaattttcggaacaaaataagagagagtcggatagcaaccccttgacaaatcagggagtttccgataaaatcctatcagcaataaaataaaaaggcgatgaagggaatagtacacaggcgacaatcaacagagaggaaatcaatggtggaagatttctgtgcggaacgtgtggaaccggccccggagctgtctgtgaataagcagaccgcgactttggcgttaaaaaagagtgaaagaaagtgagcagtcttcgggctgttaattagggtggtaccgccggataagcatctggtccctttttggggatcaggtgcttattttgatctggaatcccctggagatagagaaatgtactctcggatacaactgacaaaaatcatctcgcaaaatcaggcacagaaagattccgagagtacgtgagaacaaaaatggaggaaataaagatggcaaaagacaaaaaaatggtagaagcgatcacttccatggaagaggatttcgcgcaatggtataccgatgtagtaaaaaaagcagatctgattgattacaccagtgtaaaaggatgtatggcgatcaaaccggcaggttatgcgatctgggaaaatatccagcatgaactggacagaagattcaaagagacaggtgtagaaaatgtgtatatgccaatgctgattccggaaagccttctgcagaaagaaaaagaccacgtagaaggatttgcaccggaagttgcatgggtaacacacggcggactcgaaccgctgcaggagcgtctgtgcatccgtccgacttccgagaccctgttctgtgatttctatgcaaaagagatccagtcccacagagatctaccgaaagtatataaccagtggtgttccgttatgcgctgggagaagacaacccgtccgttcctgcgttccagagaatttctgtggcaggaaggacataccgcacatgcaacggctgaggaagcagaagagagaaccatccagatgctgaatctgtatgcagatttctgcgagcaggtactggcaatcccggttatcaaaggaagaaagacagacaaagaaaaatttgcaggtgcagaagctacttacaccatcgaatccctgatgcatgacggaaaagccctgcagtccggtaccagccataactttggcgatggatttgcaaaggcattcggcatccagtatacagacaaagaaaataaattacagtatgtacatcagacatcctggggtatgacaacccgtatgatcggtgcgctgatcatggtacacggcgatgacagcggactgaaactgccgccgagaatcgcaccggtacaggcaatgattatcccgatccagcagagaaaagaaggtgttctggaaaaagccgctgaactggaagctgcactgaaagcagcaggtatccgtgtgaaaacagatgctaccgacaagagcccgggattcaaattcgctgagcaggagatgcgtggtatcccggttcgtatcgagtgtggaccaaaggacatcgaggcaaatcaggcagtcgttgcaagaagagataccggtgaaaagattgttgtcgcattaccggaactggctgagaaagtaacagaaatcctggatacgatccagacagatatgctggagagagcaagagcacacagagatgcacatacctatacagcaaccacctacgaagagtttataaagaccatcaacgaaaaacctggatttatcaaagctatgtggtgcggcgatcaggcatgtgaggacaagatcaaagaagatacagcagcaacttcccgttgtatcccatttaaccaggaacatctggcagatacctgtgtatgctgtggaaaaccggcgacaaaaatggtatactggggcagagcatactaaaagaaaaagtgtgggaacatcaataaaggcattcggctgttatcggtgttcagaacgaatagcatgaaacagaaaaggagtggatagaatgcggttacagttaccggcagcagtaaacatgattattgatgtgcttcaggcgcatgggtatgagggatttgcagtgggtggctgtgtccgggattcggtgttgaacagaacgccggatgactgggacataaccacatctgccactccttatcaggtgaaggaattatttcccaaaaccgtggataccggtcttcagcacggaaccgtgacggttatggtacatggcgtcggttacgaagtgaccacataccggatcgacggggaatacgaggatggcagacacccgaaagaggtgcagtttacctcaaatctgaccgaagatctgaaacgccgcgattttacgatcaatgccatggcttacagcaaagatcgtgggctgattgatgaatttggcgggatgaatgatctgcaaagaaaaatcatccgctgtgtgggagatccgtggcagcggttcggtgaggatgcactgaggatccttcgggcggtacggtttgcagcgcagcttggatttgagattgaagaaaataccaaaaaggcaattgtggaactggcaccgacactttcgaagatcagtgcggagcggatccagacagagacagtgaaactattgatgtcggatcgtccggagatgtggagaagtgtgtatgatcttggcatcacacggatcatcatgccggagttcgatgcgatcatggaaacgccgcaaaataccccgcatcacatgtacaatgtgggggaacatacattaaaggcgctgagcctgacggaaaaagaccggatcctgcgtctgacgatgctgcttcacgatattggaaaagcaagtatgcggacgaccgatgcaaacggtgtggatcattttaaagggcatggtccggcgggaaaagaaatcgcgaaaaagattcttcgcagactgaagtttgataacgatacgatcgcacaggtgacacatctgatctactggcacgattatcgaccggcaccggaagaaaaagcggtccggcgggcgatccacaaagtgggagaagatctgtttccgctgtttttgaaggtacagcgggcggataacctggcgcagagcatgtatctgagagaggagaagctggcgcggatcgacggtgtggaaaaactttaccatgagatcatggaaaaacaccagtgtgtgtcgctgaaaacactggcagtgaccggcagggatttgatcgcagaaggaatgaaaccgggaccgcagatgggagccgttcttcaggaactgttggaagtggtgctggatcagccggaaatgaatgaaaaagagaaattgcttgcctggtggaaagaacatgggacttgtcaaaaggcggagggtactttataatatagggtactttagagataaagggatataaaatacagaactccggcagagtccggggaagaaacaatggatatcagaaaatcaggaggagacattcatgaagagagaaaccgtaatcgtactcgattttggtggacagtacaatcagttaattgcacgacgtgtacgtgagtgtaatgtatactgtgaaatttattcttacaaaaccgatttggaaaaaatcaaagctatggagccgaagggaattattttcaccggcggtccaaacagtgtatatctggaggattctccttcttatgcaaaagaaatctatgatctgggtatcccggttctcggtatctgctatggttctcagctgatgatgcaccagctgggcggaaaagtatgcaaggcgccggttcgcgaatatggtaagattgaagtaaccgtggatcagtcttctgcattatttgaaaatgtatccgaaaagaccatctgctggatgagccataacgattatatcgagcaggcagcgcctggattcaagattatcgctcatacaccggactgtccggtagcagcagtggaaaatgtagaaaagaaactgtatgcaacccagttccatccggaagttcttcatacaaaagaaggaaaacagatgctggcaaacttcgtatttaacgtatgtggttgtgccggaagctggaaaatggattccttcgtagaggaatctatcaaagccatccgtgaaaaagtcggcgacggtaaagtgctgtgcgcactgtccggcggtgtggattcttctgtagcagccgttctgttatccaaagcagtcggcgatcaactgacctgtgtattcgtagaccacggtcttctgagaaagaacgaaggcgatgaagtagaagcagtcttcggaccggacggaaattataacctgaattttattcgtgtcaacgcacaggaacgtttctatgagaaactgaaaggtgtggaggaaccggaagcaaagagaaaaattatcggtgaggaattcattcgtgtatttgaggaagaagcaaagaaaatcggtgctgtggacttcctggtacagggaaccatttatccggacgttgtagaaagcggcgttggcggagaatccaccgtgatcaaatctcaccacaacgtaggcggtctgccggagcacgtagatttcaaagagatcatcgagcctctgcgtgacctgttcaaagatgaagtaagaaaagccggtctggaactcggcatcccggattacctggtattccgtcagccattcccgggtccaggacttggtatccgtatcatcggcgatgtaaccgcagaaaaagtacagatggtacaggatgcagatgccatctggcgcgaagaaatcgccaaagctggcttggacaaagaagtaaaccagtactttgcagctctgaccaatatgcgttccgtaggtgttatgggtgatgaaagaacatacgactatgccatcgcactgcgtgcggtaaccactacagatttcatgacggcagaaagcgctgagattccgtgggatgtcatcggaagaacaaccagcagaattgtaaatgaagtgaagcatgtaaatagagtaatgtacgattgcacggggaaaccaccggcaacgattgagttcgaatagttggagctaagctgtaaagcctttgtttacaagggttttacagcttttcttttataggattgcattttcattgcattatttttcttcaactgttctgtgatagattgctgtatgttgattgctggtataattagcaatgctttcagtagcagattgtacttgtaatattccagtcagttttttagcaacttcaagattcgtatttggatacagatgaccataagtgccgagtgttgtctgtattttttcatgtcctaaacgttccttaataagtaaaggattttcgcccatgctgataagcaatgaagcgtgtgaatgtcgcaaggcatgaattttaa

SEQ ID NO: 2522 - DNA, 17375 bp, Unknown
  gut microbiota DNA sequence
acggcaaccgaatgagggtaaaatataccgcaaagtggggcttgcagattgcggaaatgatttttcagacacgctctagttcattacctctgtcaattctgatttttcttcactttattttaccatagtgttttctaaagtgctattccaatatatacaaaagtgtaaatgaacgatcctgtgccacttcatcagtactcattatataattgtaacttgccataatagcaaacattcgcaggagtttctttttggcaccgttttggcaccgcaagccttctttttcaattttaaatttatccgtatttcatcttgctgataaacatttcactgtttctaatctgatgaatttacgaataattcttttcttagagtacagaaaaaccccggaaaccttgcggttccggggtatcttacgtttggacacaatgttatcttacgataacgatatatataattttatctgctaatcagtgattactcgatgatagaagcaacacggcctgatcctacagtacgtccaccttcacggatagcgaaagtcagaccctgttccatagcgatcggatggatcagttcgattgtcatttctacgttatcaccaggcatgcacatttctgtaccttctggcaggctgataacacctgttacgtcagttgttctgaagtagaactgcggacgatagttgttgaagaacggagtatgacgtccaccttcatcttttgtcagaacgtaaacctgagctgtgaattttttgtggcatgttacagaacctggtttagccagaacctgtccacgaacgatttctgttctctgaacaccacgcagcagagcaccgatgttatcaccagcctgtgcttcatccagcagtttacggaacatttcgataccagttacaactgttttcttaacgtcttctttaacacccaggatttcaacttcgtcgttcagatgcagaacaccacgctctactctaccagtagcaacagtaccacgaccagtgattgtgaatacgtcctctacaggcatcaggaacggtttgtcagtgtcacgctgaggatccggaatgtagctatctacagcatccatcagttccaggattttgtctccccattcgctgttcggatcttccagagctttcagagcagatccctggataatcggagtgtcatctcccgggaattcgtactcgttcagcagctcacggatttccatgtctaccagttccagaagttcttcatcgtctaccatatcacatttgttcatgaatacaacgatgtaaggaacacctacctgacgagacagcaggatgtgctcttttgtctgagccataacaccatcggtagcagctacaaccaggatagcaccatccatctgtgcagcaccagtgatcatgtttttaacgtagtcagcatggcctgggcagtcaacgtgtgcatagtgacgtttgtttgtttcgtactcaacgtgagcagtagagattgtgattccacgttctctttcttctggagctttatcgatattttcgaatgctacagcttcacctgtacccagtctttcgtgcagagtttttgtaatagctgcagtcagagtagttttaccatggtcaacgtgtccaatggtaccaatgttacaatgtggtttgcttctttcaaatttagctttagccattattaattttcctccttaaaacttgcgccttacggcaaaattttaatttactatattattagacctgctatccttgattatattgcaaatcaaggatatttgcaagtcatatttccataatttcagcaattacgggcgcctgatagtaaggcgttattatttagcctttgcagacaaaaccttttcctgaacggacttcggaactggttcgtatttttcaaagaacatggagtagttaccacgtccctgagttctggaacgaaggtctgttgcgtaaccgaacatttcagccagcggaacatatccacggatcatttttccaccaccgatatcttccataccttcgatacgaccacgacgggagttgatatcaccgataacatcacccatgtaatcttccggagtagtaacttcgactttcatgataggctccagcagtacaggagatgctttctgcattgcttccttgaatgccatagatccggcaatgtggaatgccatttcagaagaatcgacttcatggtaagaaccatcgtatacgtttgcatgaacacctactacagggaatccacccaggataccagacttcatagcgtcttcgataccttcacctacagccgggatgtattccttcggaatagcaccaccaactacggtagattcaaatttgtaagtttcttctgcgtttgcatccattggctcaaatttaactttacagtgaccatactgtccacgtccaccggactgttttgcatatttgtgctcaacgtcaaccggttttgtgatggtctctttatatgcaacctgaggagcaccaacattagcttctactttgaattctctcagcagacggtcaacgatgatatccagatgcagctcacccatacctgcgatgattgtctgaccagtttcctgatcggtatgagcacggaaagtaggatcttcctctgccagttttgccagagcttcacccagtttaccctgtccagcttttgtcttaggctcgatagccagctcgataactggttccgggaattccatggattccaggattaccggatgctgatcatcacagatggtatcaccggtagtactgaacttgaatccgatcgctgctgcgatatctccggagtaaactttgtccagctcctgacgtttgttcgcatgcatctgcaagatacgtcctacacgttcttttttatcttttgtagcatttaatacataagaaccggagttcatggttcctgagtatacacggaagtatgccagtttaccaacgaacgggtcagtcatgatcttaaataccagtgcggagaacggttcatcatcagaagaatgacgaacaacttcgtttccgtccagatcagttccgttgataggcggaatatctgtaggagccggcatgaactccaggatagcatccagaagtttctgaactcctttgtttttgtaagcagatccacagcaaaccggaacagctgtacactcgcatgtaccttttctcagtgctgctttcattgcttctacagaaggttcttcaccttccagatattccatcatcagatcatcatccagctcgcagattttctctaccagttctgtatgatacagttctgcttcgtcctgcatatcttccggaatatctactacagagatatcatcacccttatcatcgttgtagatgtaagctttcatctcgaacaggtcaatgattccctggaattcatcttctttaccgattggcagctgaagacaaattgcattttttcctaatcttgttttaatctgatctacagcgttgtagaaatctgcacccaggatatccatcttgttgatgaatgccatacgaggtacattgtatgtgtcagcctgacgccatacgttttcagactgtggttctacaccaccttttgcacagaacacaccaacagcaccatccagtacacgcagggaacgctctacctctacagtaaagtctacgtgacctggggtatcaatgatgttgatacgatgttccagagcaccttttttcggttttgtctgttcttccagagtccagtgacatgtggtagctgcggaagtaatggtgatacctctttcctgctcctgttccatccagtccatggtagcagtaccttcatgtgtatctccgattttatagtttacaccggtgtagtataagatacgctctgtcagagtggtcttaccagcatcgatatgcgccataataccaatatttctggttctctctaatggatattctcttccagccaattggatttcctcctttagaatctgtaatgagcaaatgccttattagcttctgccattttatgcatgtcttctttcttcttaacagatgcaccggtgttgttcatagcatccagaagctcatttgccagtctgtcttccatggtcttctctcctcttttacgagaatacagagttaaccaacgaagagccagggcctgacgtctttccggacgaacctcgataggtacctgataggtagctccaccgatacgtctagcctttacttccagtacaggcatgatgttgttcatagcttcttcaaaaacttcgattgctggttttccagctttttcttcaattttagcgaaagcgccgtatacaatcttctgtgctacacctttcttaccgtctaacatgatgttattgataagtttggtaaccactttattattgtacatcggatctgctaacacgtctcttttctgagtatgtcctttacgtggcacgttacttccctccttaatcaatagattatctcttaggtactcacatgacagcctgagcagttaaacaggtactgtcgactatgtgttcgcactggtaaattcctctatttgacccgcaaccatcagggtataaatggaatgaccgtacatagtattgtgatattgtcaaattcgttttgttatgctgctaggcagcgataacgcagctttttgtcttattttttaggtcttttagctccgtatttggaacgggcctgttttctgttagcaacacctgcggtatcaagagtacctctgatgatatggtatcttgtaccaggtaagtctttaacacggcctccacggatcagaacaacgctatgctcctgaaggttatgaccttctcctggaatgtagcttgttacttcgattccgtttgacagacgtactctggcaatcttacgaagagctgagttaggttttttaggtgtagcagttttaacagctgtacacacacctctcttctgtggagaagacagatcgctggatttttttcttaaagagttaaagcttttctgcagagcaggagcggtagatttcttaacagaagtctgacgtccttttcttactaactggttaaatgttggcattccatttcacctcctgtaattattccttttctggttctgcggttgctatttctaaaatcatacgactatgcagccgtcttacctgttataaggtaattttgtgcgcattaaaataactgcatttccatgcgcacctgtagtatcatagcatccaaaaaataaaaagtcaagggagtatttctgattttttatcagtttcccttgactttttacttatttattcgctatttgctgatttactcttcggtatcctccagagttaccagttcttcagcgatttcatctgtttcttcgtcggtaccagcagcttcggaagtttcttctactgtgatatcctcttccggtgtaacttccagatcttcatcgtccatcacgatatcttcctcttcttccttcagcatgtcgtctgtggaaagtttgatattgctgtaacgtttcagaccggtaccggccggaatcagtttaccgatgataacgttttctttcagacctaccaggtggtcaacttttcctttgatagcagcttctgtcaggacttttgttgtctcctggaaggatgctgctgacatgaaggaatcggttgccagagaagctttggtaatacccagcagaacctgttttccttctgcaggagtttttccttctgcttccatctgttcgttgatgtcttcatattcaaggaaatcaaccatggttcccggaagaagttctgtgtctccgttgtcttcgatacggatcttcttcagcatctgacgaacgataacctcgatatgcttatcgttgatttctacaccctgcagacggtatactctctgtacctcacggatcatataatcctgtacggcacgtacacctttgatcttcaggatatcatgcgggttaacagaaccttctgtcagttcatcaccggcttcgagcatctgtccatccgtaactttgattctggatccgtaagggatcagataagtcttggattctccgctttctttatcggtaattacgatctcacgtttcttcttggtatctttgattgcaacttcaccaggaatctctgtgatgatggcaagtcctttcggttttcttgcctcaaacagctcctcgacacgaggaagaccctgtgtaatatcgccaccggcaacaccaccactatggaaggtacgcatggtcagctgtgtaccaggctcaccgatggactgtgcggcgataataccgacagactcaccaacctgaacagcttcaccggttgccatgttggcaccgtaacattttgcacagataccaactttacatttacagctcagaatcgtacggatcttgatcttgtcgtaaggtttgccttctgcattgacaccttcgctcatgatcttagctgcacgtttcggcgtgatcatgtggtttgcttttacaagcacattaccatctttatctttgattgtctcgcaggagaaacgtcctgtgatacgttcctgcagactttcgatttcttcttttccgtctgtgaattccttcacatacatacccggaatctcatctctgccttccgcacaatccatctcacgaacaaccagctcctgagatacatctaccagacgtctggtcaggtaaccggaatcggcggtacgaagggcggtatcggacataccttttcgagctccatgggcggacatgaaatattccagtacatcaagaccttcacggaagtttgacttgataggcagctcgatggtgtgaccggttgtatcggccatcagtcctcgcatacctgccagctgtttgatctgtttatcagatccacgggctccggaatcggccatcatgaagatgttgttgtatttatccagaccattcagcagggcttttgtcagctcatcatcggtctgtttccaggtttctacaacctctttgtaacgctcttcttctgtgatcagaccacgtttgaagtttcttgtgatcttatctacagtttcctgtgcctgttcgatcatctgcggtttctgcggcggcacggtcatatcggaaatcgatacggtcatggctgctcttgtagaatatttatatccggttgctttgatgtcatccagtacttcggcagtctttgtctgtccgtgtgtgttgatgactttctcaagaatctgtttcagctgtttctttcctacgtggaaatcaacttccagaatcagttcattgcccggaacggaacgatctacaaatcccagatcctgcggcaggatctcattgaacaggaatctacccagtgtagattctacagttcctgtaaccacttcaccgttcggcattgttttcttacgacgaacatgaattcttgactgcagtgtcaggtatccgttttcataagccagaatggcttcgtttaagctcttgtaatatccgccttctcctttgcttcccggtctttcctgtgtcagatagtagatacccaggaccatatcctgtgaaggaacggctaccggaccaccatcggacggtttcagcaggttgttcggagacagaagcaggaaacggcattctgcctgtgcttctacggacagcggaagatggacagccatctggtcaccatcgaaatcggcgttgaacgcggtacaaaccagaggatgcagcttgattgctttaccttctaccaggatcggttcgaatgcctgaatacccagacggtgcagtgtaggagcacggttcagcataaccggatgctctttgataacgtcttccagtacatcccatacttccggctgtactttctcgaccattttctttgcatttttaatattatgagcggttccgtttgcaaccagttctttcataacgaacggtttgaacagctcgatcgccatctctttcggcagaccacactgataaatcttcagttccggtccaacgacgattacggaacgtccggagtagtcaactcgtttacccaacaggttctgacggaaacgtccggatttacctttcagcatatcggacagcgatttcagagctctgttaccaggtccggttaccggacgaccacgacgaccattatcgatcagcgcatctacagcttcctgcagcatacgtttctcgtttcttacgatgatatccggagcacccagctccagcagtcttttcagacggttgttacggttgatgatacgacgatacagatcattcaggtcagaggtagcaaaacgtccaccatccagctgtaccataggacgcagatccggcgggataaccggcacaacatccataatcatccattccggtctgttaccggattcacggaatgcttctacaacttccagacgtttgatgatacgggcacgtttctgtccggttgcatctttcagtccggctttcagttctacggattctgcttccaggtcgatggactgcagcagctctttgatagattctgcacccatacctacacggaaggtatcaccaaactgttctcttgcttcctggtattctctctctgtcagcacctgtttcagctgcagattggtgttacccggatcaagaacaatataatttgcaaaatacaggactctctccagtgttctcggagacagatccaggatcagccccatacgggacgggattcccttgaagtaccagatatgagataccggtgctgccagttcaatatgtcccatacgctctctacgaacgcttgattttgtaacttctacaccacagcgatcgcagacaacacctttataacggatctttttatatttaccacaatgacactcccagtctttgcttggtccaaagattctctcacaaaacagaccatctttttccggttttaatgtacggtagttgatggtttctggtttttttacttcaccatgagaccattcacggatcttttccggagatgccagaccaattttaatcgcatcgaacgtcattggttgatatacttctttattggttgtttcagccatttggttgctcctttctaggattcactcccacgaccgctgttacacggtcgcaggactttttctatcgcatcagagaatgtcttctctcttagaaatctaattcttcgtcagcagactcatcagctgcgtcttcttctacatccaccagttcttcgccttcgaattcctgtttgctgaaaccatagtttccgtaggactcttcttcatcgcggttgtaacgtttgtcaccctcgatgatggagcgcagatcagtatcgccatagtcgatattttccatgatttccacttctgtattatcgtctttcaggactcttacatccagacccagggactgcagctctttgagcagtaccttgaaggattccggaatacccggttcagggatattgtcacctttgatgatcgcttcgtatgtcttcacacgaccgatcacatcatcggatttgactgtcaggatctcctgcagagtataagatgcaccgtatgcttccagtgcccatacctccatctctccgaaacgctgaccaccgaactgagctttaccacccagaggctgctgtgttaccagggagtatggtccggtagaacgtgcatggatcttatcatcaaccaggtgatgcagtttcagataatgcatgtgaccgatagttaccgggctgtcgaaatattcaccggtacgaccgtcacgaagtcttactttaccgtcgcgtgagatcggaacacctttccacagttttctgtgatctctgttttcatacagataatccattacttccggaagcagttcttctttgtgtttgtcagagaactcttcccaggacaggtttacataatcatttgccaattccagagtatccatgatgtcgttctcgctcgcgccatcgaataccggagtagcaatgttaaatccaagagctttcgcagccagactcagatgaatctccaggacctgtccgatattcatacgggaaggtacacccagagggttcagcacgatatccagcggacgtccgttcggcaggaatggcatgtcttctacaggcagaactcgggaaacgacacccttgttaccatgacgaccggccatcttatcaccgatggatatctttctcttctgtgcaatgtagatacgaacagcctggtttacacccggtgacagttcatcgccgttttctcttgtaaatactttcgcatccacaacaataccatattcaccgtgcggtactttcagggaagtatcacgcacttctcttgctttctcaccgaagattgctcgcagcagacgttcctcagctgtcagttcggtctctcccttcggagttactttaccaaccaggatatctcccgcacgaacctcagcaccgatacggatgataccacgctcatccagatctttcagagcatcatcaccgacacccggaacgtcttttgtgatctcttccggtcccagcttggtatctctggactctgcttcgtattcttcgatatgaatagaagtatatacatcttcctgtaccagtctctcgctcagcagaacggcatcctcgtagttataaccttcccaggtcatgaatccgatcagcgggttcttaccaagagcaagttcaccattgtaagtagaaggaccgtcagcaattacctgacctgcctctacgtgttcgttcttgaacacgattggtttctggttgtaacagttggactggttacttctcaggaatttagtcagacggtatacatctgtggtaccgtcatcatttttcattgtaatttctttagatgtagacttggtaatggtacctgccttcttggcaaccacacaaacaccggagtctacggcagcttttgcttcgatgcctgttccgactacaggagcttctgtaatcatcagcggtacggcctgacgctgcatgttggatcccatcagcgcacggttcgcatcatcgttctgcaggaacgggatcagggctgtagctacagagaataccatcttaggagatacgtccatgtaatcgaacattcttctttcgtattcctgtgtctcttcgcggtaacgaccggatacattcttatgaaggaaatgtccttcttcatccagcggttcgttcgcctgtgctacatggtaattatcttcctcgtcagctgtcatataaacaacttcgtctgtgacgcgaggattcttcggatctgttttgtcaatcttacgatacggagcttctacaaatccgtattcgttgattcttgcataagatgccagagagttgatcagaccgatgttcggtccctcaggagtctctaccggacacattcttccgtaatgggagtagtgtacatctcgaacctcgaatccggcacggtctctggacagaccaccaggtcccagtgcggacagacgtctcttatgagtcagctcacccagcgggttgttctgatccatgaactgagacagctgagaagaaccgaagaattcttttacagcagctgttaccggtttgatgttgatcagagactgtggagaaataccctccggatcctgtgttgtcattctttcacgaacaacacgttccagtcttgacataccgatacggtactggttctgtaacagttctccgactgcacggatacgacggtttcctaagtggtcgatatcgtcgtcggttcccagaccatattccagatgtaagttatagttaatagaagcaaaaatatcttcttctgtaatgtgtttcggaatcagatcatgaatatgatgtttgatggcttctttcagctcatcttcgtcttcatattcttccatcagctgtgccagtgccggatagtataccagctctgtaacgcccagttcttccggattgcagtctacatatgtggtcagatctaccatcatattggacagaacttttacgtttctctcttctgtctgaatccatacaaacggaactgccgcattctggatagaagttgccagttcttttgttacttctgtacctgcttctgccaggatctcacctgtggtggtatccactacgtcctcagccagtacgtgaccgctgatacggttcttcagatgcaattttttattgaatttatatctacctactttagccagatcgtaacgcttcggatcaaagaacatgcttgtgatcagacttcttgcgctgtccactgccagcggttcgcccggacggatcttcttatacagctctaacagaccttcttcatagcaggttgctgtatctttggtaaagcttgccagaatctttggctcctcaccgaacagttctgtgatctctgcattggttccttttcccaaagcacgaatcagaacagaaatcggaacctttcttgttctgtctacacgtacccagaaaacatcgttggcatctgtttcatattccagccatgctcctctgttcggaattacggtagaagaaaacagtctcttaccaaatttgtcatgagcaatcgcatagtaaataccaggggaacgtactaactgactgacaataactcgttctgcaccattaattacgaaggtaccggttgctgtcatcaacggcaaatctcccatgaaaatctcatgctctttaatttcgtcgttttccttattgtacaatctcacctttacttttaaaggtgctgcgtaagttgcgtctctttctttgcactcttcgatagaatatttcacatcatcctcgcacaaagtaaagtccacaaattccaagctcaacttgccactgtaatctgtgatcggagagatatcagcaaatacttcctttaaaccttcctcaaggaaccagttataggaatctttctgaacctcaatcaagttgggcatttccaaaacttctttttgtctctggtagctcatccgcatacttttaccgtttgtaataggacgtattctgtttttttccattgaccgtttcaccccttgtgtatttgatttattactgctcatgcctgtttcgtgcttcttaagattagactagtaggcatatcttgccataatagtgcattttttacaatatcacagtttgtcaagagtgtcaacccatttttctaatctttttttattttttcaagatgtcatggggaaaagatcaaatctgctttggtcctttacccatgacaccttcttcattataaaaacccggaagagcaccgtagctcttccgggttctccatctttcgactaaatgctgtaacctaattatttcagagttactttagcgccttcagcttccagttttgttttgatttcttcagcttctgcttttgcagctgcttctttgattactttcggagcaccgtctactactgctttagcttctttcagtcccagacctgttgcttcacgaacaactttgataactttaactttgttaggaccaacttctgtcagttctacgtcaaattcatctttttcttctgctgcttctgctgcacctgctgctgctacaacaacacctgctgctgcggatacaccaaattcttcttcacatgcttttaccagttcgttcagttccagaacggacagttctttgatagcttcaataaattcagctgttgtaagttttgccatttttatttacctccaattataagtttgttttcttttttaatttttttgaagcagcttacgctgcgaggaagttcgacatcgttttgcgctgtcgaacagctaagtttctaacctcaggctgcgctttcagcttgccttcgctaagaaacttatgcttcttttgcttctgcgatctggctgatgacgcgagcaaagtttgtgattggggactggatgcttccaagcagttttccaagaagttcctctctggaaggtacttcggacagtgctttgattccagcctggtcatagtaaccaccttcaacaacacctgctaccagttccagctgcggagctgtttttgcgaatttcgcaaggattcttgcaggagcagttgcatcttctttagagatagccagagcgtttgttccatccagatgtttgcacagttcttcacacggagttccctggaatgcaaagttcatcattgtgtttttgtatactttgtatacaacgccagcttctcttaattccttacgcagctgagtatcctgagctactgtcagaccactgtagtttaccagaacaacgccctgagcatcagcgatatttgcggaaatctcttctacgatcggttttttcagttcaacttttgccatgattggtgcacctccttatagattttgtgtaccgccaaatatgaaaaaagcctctctgcacacagcaaagaggagatcaattcttcattaagaatgtattttcctcggcaggcgtacttgccttatgccttacggcacctgctgtcttcggcgtgatactggtgtattatagcatcggaacgtttttctgtcaagcggtttttgtatttttttgttttttattttcaccacaactcttttccgatctacgatagaaaaaagagcgtcatccgaagattccgctcttttttcactttaacttatatgattacacaagttttaatgggttaatcttaacgccaggtcccatagtaggagctactgttacgctcttcaggaactgtcctttcagtgtagcaggttttgctttgttgattgcacccatcagcgtctggaagttgtccgctaactgttcttctgtgaaagaagcttttccgattggcacgtgaataatgtttgttttgtcaagacgatattcaatcttaccagctttgatatcctgaacagctttggtaacgtccatagttactgtaccagctttcgggtttggcattaagcctttcggtccaagtacacgacccaggcgaccaacaacacccatcatgtccggtgtagcaacaactacgtcaaagtcaaaccatccttcgttctggatcttcgggatcagttcttctgctccaacgaattctgcgccagctgcctgagcttcatcagcttttacaccttttgcgaataccaggacgcgaacagttttaccggttccgtgaggcagaactactgcaccacgaatctgctggtcagcgtgacgtccgtcacaacctgttctgatatgagcttcgattgtttcatcaaattttgcaactgcagattttttagctaaagcgattgcttcatccggatcatacagttttgcacgatcaactgcttttgcagtttccatatattttttaccgtgtttcatttcctataacctcctgtggtaattgcggggattgccctcccacgatatttgtctgtttgtgaccttccggtctcaaagttacattagtaaagattagtcctcaactacgatacccatacttcttgcagtaccagcgatcatgctcatagctgcttcgatgcttgctgcattcagatctggcattttcatttcagcgatctcttttactttgtctttggaaatagtagctacttttgttttgttcggaacacctgaacctgatttgatgttacaagctttcttcagcaaaactgcagctggtggagttttggttataaagctgaaacttctgtctgcgtatacagtgataactacagggatgatcagatctcccttgtcagctgttctagcattgaattcttttgtaaactgtacgatgtttacaccatgctgacccagagccggtccaactggtggtgctggtgttgccttaccagcaggaatctgtaatttgatatatcctgttactttctttgccattgtaatgacctcctataatgtggtaattgcggggatttccctcccacgaatcatttctgtgcgaaacctcgtacttcgatgattctgtttacaacttcttaatttctgcgaaactgatctcaaccggtgtttcgcgaccaaataactcaacattgattgtcacagtctgcttctgactgttgatcgtctggatgataccagtagtatctttccaggctcctccggtaacaactacgctgtcgccttctgcaaaatcgatttcgatggtctcaggctggatacccagcatgccgatctcctcttcgctcaaaggcaccggtttggatcccggtccgacaaatccggtcacaccacgggtattacgaacaacgtaccatgtatcgtcgttcatcaccatgttgatcagtacatatcccgggaacattttcttggatacgagcttctgtgcaccgtttttcaactctgtcacatcctgcatcggtacccgtacttccagaatctgatcttccagatgtcggttttcgattgttttctcaatgttggctttcactttgttttcatagcccgaatatgtatgggctacataccagtttgcttctgccatttcatcacccttgtccttatttaatcagtaaattaacgaactccagaaccgcactgtccagaacggaaatgatcacgcccaggacaactgtgataccaacaacggcaactgtctgtctaccgactgtttttttgtcagtccagataatcttgtcaaattcggacttcagacctttggtccagctcttctttggagctttctccttcttcggagccttttctttttttgcagcttctgccatagtcctcacctcttacacgacaatcttatttcgtctctttgtgcattgtgtgtgttctacagaatttacaatactttttggtctccagtctttccggatgattctttttctcttttgtcatgttgtaattccgctgtttacattctgtacatgccaatgtgatttttacgcgcacgacttccacctccactgtgttgatttgcgttgttgcaacggacttttttcttctgccatcgaacttcacgactttcgattttaggcataaaaaaaagacctacttccatgtcgcctactaactatatcatgcgtcaagggaaaagtcaagtaaaatgaaaaagctgtcgaagatttttttccgcgacagcttttgtacatttgattttcagatttttatttctccagttccagctcatccactgccagtttcagagcacccatgattccctggttatcatttaagcttggcagtacgatataatgttccagatcttccatctcttttgtcttgatatagccgccaagctgttttctgacttcttctcttactaacggcatcatatgttcctgatgcataacaccgccgcccaggatgattctttccggggacagtaccaggatcaggtctaccagtgcctgtccgatgtagtaagcttccatttcccatacttctttccgatctgccagttccacaccttttttaccccagcgtgcttcgatcgccggtcctgctgccagaccttccagacatgttttgtgatacggacatttgccttcgtaat

SEQ ID NO: 2523 - DNA, 7672 bp, Unknown
  gut microbiota DNA sequence
ggtacggaactcatcagaagttcggtgtaaggatgtgccggattgtccatgatctgttttgccggtccgtattcgatcaggcagccacgatacagggttgcgatgtaatcggatacatagtatgcagtcgacaggtcatgagtaatataaataaatgagattttatatttgtcacgcagctctttaaagaggtttacgatgttcatcttcatagatgcatcaattgccgcaacaggctcatctgcgatgatcagtttcggacgggtaatcagggctctcgcgatagatacacgctgcagctctccacctgagaactgagtcgcatattttccttttacgactgccagagacataccaacactctttaatgcttcatcaacaactttatctgcttctgctctgttctttgcgatgccaagacgaagagcagtgttatacaggtaagtatctacggtctttcttgcggagaaagattcgtatggattctgaaagatcggctgtacatccagtttgaactgttttggatcatagctttttttatctgcataagattttccatccagaacgatgtcacccatatccgggttatgaagacgaagaatcatcttacataaagtagatttaccgcaaccggactctcctacgatagacaggattaccggtttatcatcatcgatagataaagaaacattatctacagccaccagctttttaccacgcagcataccacctacacggaaaatcttgctgacgccttttacttccaataatttatcagccattcgtcttcacctcctcttctaataagtgacacgcagcgaaacgacccggtcttatttcccggaatttcgggacttcactgcggcaccgatccgtagcatgcggacaacgaggtgcaaaacgacatcctggcggcggattcttcagtgccggcggacgtcctgcgataccaactcgctgtacatcctcacctacacgcggaagagcatctaccaacatctttgtatatggatgaatcggatcattgaagatatcttctgtcttaccgagctctgcaatactaccggaatacatgatcgccatacggtctgtgatctgataatgaacacccatatcatgacttacaatgatcattgtattctttaactgtttctgcagacgcatcagcatcataagaatacccttctgtacaactacgtccagagcggttgtcggctcatcggccagaacaacacccggagacataaaggttgccagtgcaatgatcgcacgctgtctcataccaccggacagctggaatggaaatgactccagaacatccggggaaagattcagttctttcagataatcagcaactcttgccagagtttcctccggtttttcattctttttctggtcctttggaatagaatccagaaactgtgttttcagacgaacgatcgggttcagaacactctgtgcagcctgtggcacatatgcgatattgttccaccaggtgtcacgaatctttccagattcgaatgaatatttctttccgtctttttcaccttccagaacaacacgcccctgatcgatcaccaacggatagtcaacaatatcataaagagtgttcagcagggtggttttaccacatccggactcgcctgcgatgccgaagatctcattgtctttaatctcaaagttaatgtccttgagtacgtgtacatcaccgtctattgtcttataagacgttgacaaattctcgattttcagcatacctatcacctgcctctcttcttagcctgataatcgttgtaacctgtaatcaacatgaacaggccaacaaataagataacggttgcaacaatcggagaaccgatccagagccatctcttagcaaggactgcattgtatcctcttgcccactgaatcatgttaccaagagaaaccaggtttcccggtgacagacccagaacggccaaactggattctgaaccaattgcactcagtgttgcattcataaagttggaaagtgaccaggacagtgcgaacgggagaatctccgttataacgatctgtaaggtactttcaccggagaaacgtgctgtgtgaataaagtcacgctctttgattgtcagagccatggaacggatctgacggcttggccatgcccaggcgaatagtgcaagaacaagtgccataacaattacagtagagcttcctttcatcagggaagtcatcatgatcagaatcggcagagacgggattactacgaaagtatccgtgataatcatcagcactctgtccaatgcgccgcctgcaaaacctgcaagcagaccaaccagaacacccacaacagtaccaatagtagctacgatcagaccaatcatcaaagaattgtgaatggcttcgatcagcagccatacaatatcctgtcccatactggtagttccaagccaatgttcagcagaaactcccagattattcggatatgtattataggtaaacggatttgtatgtgggataaaatatactacgaacccaatgatcaggaaaaagcaagtagaaatcaagcctgcttttaaacgaaaattggctgttttccaaaatttcttcatgtctgtccctccctcttatcagccgtaccggattcgcggatcgatgaacgggtagatcaggtccacaattaaagttgctgaagcaatcgctacgatggaaatcgtaatacagccaaggatcatattataatccgactgcaggatcgcggcctgaatcagagaaccgactccagggtatccgaaaataatctcggtcatgatggaaccaccgaagacaccaccaaggctcattgccagtgctgtgatctgggtcagaatggagttacgcattacatagtttttgccgatagcgaactcggaaagtccacggaaacgggcataacgtacataatcttcttctgctgtggtgctcgccagagatttcatggagatgatccaccatccggtaccaagtaacagcagtgagattcccggaaggatagaagccttgaccacagaagcgatccaaggaccaaatccacctttagtattgataactgcctgcaacgggaaccattttaatataaatgcaaatacaatctgtaagatcaacgctaccaagaagtaaggaatcgggtaaataaaaattgcaattgcttccagaatcttggatgaagttttatttttccgaaatcctgccagaagaccgatcaggttacctacgatccacgcaataaatgtggaggtcagacataagatcagagtatacggaagatatcttccgataatttttccaaccggctccggataactcagcagtgacggaccaaagtcaaaatgcagcagaccgtgccacaggaaataaccatactgttgcagcaacgagccatcaagtccaaactgcacacgcaggctgctacgaagggcgtccatctcggctggatccatgttaccggaacgtgactgaatctgtgcgatcatgttttcaacaggatctgacggaaacatacgtggaatgaagaagataaaggtaacaccgatcaggatagtcagcgcccatgcaagcactcgctgcagaaagaattttttaaatttcatacacagcactcctttactactatttctacacaaaagggacggatcgtaagcttttcttacaactccgtcccttctgatatttcagcaaataactctgtcagtttttgctgttttcatcattttattactgttcctaaagacttaaaggattaagcctgtgtaggagtgatgtttggaagcatgtatttgaagcagctccaccaccaccatggaccattgtacgggttgtccgcattcggataaccttcccagtaagttgagttggtcggaacgaattttgtaccagagaggaagttgatttccggcatatctgttacacattccttaaggaattcagtatgcagttcgtaagatctatcactttccggatcagtattagcaagttcatgaagtatctctgtaactttttcgttattccaacgaagtccctgacctgaaccggtttcgcctacaggtttgatcagatcaccgtcaaatccgctgattgcagaatagaagtctttcaggataccgccggatggccagtaaccagcgatctggtagttaccctttccaccgtctacatcccatgttgcggaagatttggatgcgattgaacactggaaaccgaattttgtcagctggttgtatgcagcctgtacaccacgtgctgcctgggcctcagcatctgccagatagctcatttcaaaggtgaaaggtttgccttcataattccatacaccatttactttttcaagaccggctttttcaagcagttttgtagctgcttcttcatcatgtttccaccagcctgcaccaaacatggtaatcagttcttcatctgttccttcgatgcccagagaatcagccatacgttttgcataaccggtatcataaggtttgaaggttgttccatcgccaagatccagttcaaagttttccagccaatcctgcattgggattgtgtaggtttcctgcaggaactgtgtattgttcattaacgggatcggagccgcacgtcctgctccggagaacgtgttcatggagatctcatcaatattaagtgctaagcagataccccaacggaagtctgcattgtcatacggtgcgccctgaccatgtgagaatacaattccttttgcacccggatcgtctgggtttgcatatgggaaatccttgtaccagcagttaatattgtcgttagaagctttcatggtttcaaactcttccagtgttacttcacacagcaggtcaacttcgttgttgatcatagccatctgttttgtggtagagtctgcgaatgtacggaaccatacgtatttcggtggtgtagcattttcagcgtactcatactgagtggatcctgcaacaccaagtgtgctgtccttccagtcatcacgcagttcatacagcacccagtcacctaacttatcgtaatcttttacagtgtaaggacctgccactacaggatcttcatccttgaatgtagtaacatcggactgttttgaataaatatgttccggaacgatacggtaatcagttccccatacagtgataccatatctctgtacgaaacgtgggaatgattctttcatcttaaacagaactgtgtaatcgtctactttttctactgaatcaatgtacaggtttgttgctgcactggcattgattccgtcattttctttaatcatattgaaagtgaagacaacgtcatccgctgttacgtcttcaccatcggaccatttgataccctgacgaacttttactgtccactcggtaaaatcatcattggactcaggcatgccatcagcaatctcgccccactgttcaccttttgcggtatccatttcccacagatgagcactcatcagctgatgaataccgaatcccatctgggtacctgtcatgtagctattaaactgaccaggtacatctgttggggactgacactcaacgatcagtgtctcggaacgaggagttcctacttctgtagtaataccttcagatgctgctgttccgcttccgcctgaactgtcatctgtagaagttgttccactggaatcacttccgccaccgccacagccggctaacataccaactgcaagcgtagctgctgttaaaactgcaactatttttcttttcatctctttccctccctttaggtcttgaaaataactcagacaacatcatattcgtcaatcttccgttgtctctatataaattttccttttgcccatactacttttttcagaaaaactctgctggcgcctaccgtatgaacacgaacgaaaatctacattccttcacaatttttcttaatattgtgtttcgtcataataactacggaatcttttgtttcgctcacgacattatatagtttgtcaccccactatcgtgaacatttcatacaataccattcacttttccttgttgtttctggtgattttgacgtattgtttaaatgttgtttcgtcatgtttatatattataccattgttttttaaaaatcaagtacaatttaaccaatttcaaaaaaatccgctttggtttctttccccaaagcggatttttctgtttttgtctatattccattatttttctttgattttttcgctctttttcgtcaatttgcgaacaatcgccaggcatccaagaagtgcaatcaggtttggaagtaccattaaaccattgaacatatctgccatatcccataccagatctactttcaatgtggatccgatgattacgcagatcacaacgatcactgcataaacttttactgcaccatttccgaacaaatgccgaacattcacttcaccgaaataataccatccgacaattgtagtaaaggcaaagaacagcatacacaatgcaataaagatatttccaaagttaccgaatcctacgttgaatgcactctgtgccagttcagaacctgtctgtccgttaccgagtactccagtggacaggataaccagagctgtcagtgtcagaataataaatgtatcgataaatacacccatcattgcgatgattccctgatcacacggatccttaacctccgctgttgcatgtgcatgtggtgtggaacccatacctgcttcgttggagaaaagtcctctcgcaacaccgaaacgcatcgctttctgaaccgttacaccaagtgcaccgcctgcgattgcctgtggtgcaaaagcacccacaaaaatatctttgaatgcagttccaacccccggaagatgcatcaccaggatcacaaggcatccgatgatgtataacagcgccatgatcggaacgatcttttctgtgaagcttgcgattctcctgattccaccaatgaagatgatgccggcaatcactgccacacagattcccactgccagtttcggtacatggaatgcattgttaaatgctgcaccgatagagttggactgtaccatatttcccataaatcccagagccaggatgatagctacagaaaagaaacctgccaggaattttccaaatccgcccttgaatacgtattttatataatataccgggcctcctacataatgtccgttttccagttttcttgtatgctgtgccataacagcttccgcatagatggtagccattccgaagaatgcactgacccacatccagaagatggagcccggccctccggatgcaatcgctgttgctgctccggcgatattaccggttcctacctgggcggcaatcgctgttgtcagagcctgaaaggaactgagaccattttctcctttcccgccatgcagcgaaaaattaccaaacaatgctttcattccggcaccaaactttcgtacctgaataaatttcaggctgaacgagtaaatgataccggctcccagaagcaggatcagcagtgcataatcccacagaaacgtattaacacactcaactacttttgtaacaaattccatgttttttcttctccctcactttttcttacgtttcaagccaataccaaagaatgcgccggggcacatccttgcagagcgttttttattcacctgaaaccagtacagcgtttccgacaaaaaaggtcccggggaaat

SEQ ID NO: 2524 - DNA, 564 bp, Unknown
  gut microbiota DNA sequence
tcaactggaacaatattatgtttacactggcacttgtgcttgctatgatctgggtgatcgatgtactgaaagaaaagatgacgtcactaccgaaggctttgtggtatttcgtatcatttctcattgtagcggtgttgtgcattgtagcaatgaatgcaagtctggactacgaacatcatgcggtactgatcggttatttctgttatatttttcatgagagatgggcacttggaattccgttttgttacatctctatgtttaaagagccgtgggctctgcttggatttggactgacacttacttacaatggagagcgtggaaaacagaataagttagtaaattatcttttctatccggtgcatttgctgattttaggaatcataagaatgtatcttggaatttaaaaagacggcgtaaatgtgaatgcatttacgccctttcgcttctatatttgaggacttttcatcttaactatttaaaacataatacccgaatggcatttccgtctgttcttatttttcatgatgttccagagagtattgattatgaaatgacatcaaagca

SEQ ID NO: 2525 - DNA, 561 bp, Unknown
  gut microbiota DNA sequence
gggcgaaatgtgaatgcatttacgccctttcgcttctatatttgaggacttttcatcttaactatttaaaacacaatacccgaatggcatttccgtctgttcttatttttcatgatgttccagagagtattgattatgaaatgacatcaaagcattcgccggatgtgattaaaggaaagatagaaattgcttagtagtaaccaaatcccgttttactaccaactttactactaacagcccacaacaacttgctccatcttgccctattttgccaagatgtcagtcaatacacacatttcacaaatccccgtaaacccttgcaaaacaaggcattccggggcaaatcaaggagaaccaaaactatgataaaagtactttttatttgccacggcagaaaataaaatatatcatatgataaatcgtcagaaaagaaagaggatcagatatgcattctctttctttttttgatgccctgattttccatatttgaagtgaaactattcacagtatggagaaaaaggaaacggaggaaagaaatatgtgaccgatatgaaggttttt

SEQ ID NO: 2526 - DNA, 19711 bp, Unknown
  gut microbiota DNA sequence
ggatttatggagaggatataaataagaagttttaagtgactattcagtaggtaataccccacgagggtactgaacagttacgttttgcttattaaaagttaaggaaagggagggagagaaacggatttagcaagtaaattattggaagagctgaactgtgacactgcctttacgatccccctgtttggaggaattgaaatcgcagagtcggtggttgtaacctggatcattatggctgcactggtaataatttccatattacttacacgcaatctccaggtggaacctgaaaacatcagtaaacgccagctggcactggaaacagtgatcggtgtcatacaggatttcttcaaagatattcttggtgaaaaaggaaaaatgtatattccttatctgatgtcggtggccatttatattggcgtagccaatctgattggtattctgggatttaaaccaccaactaaagacatgaatgtaacagcagctctggcaatcatgagcattgtattaattgaatttgccggaatccatgcaaaaggtggaaaaaagtggctgaagagttttgcagaacctacaccggtggtgttgccgatcaacattctggaaatcttcatccgaccggtatccctttgtatgcgattattcggtaacgtactgggttccttcgttgtcatgaaactgatcgaagcagtagcccctgtactggtgcctgtaccgttgacctgttattttgatattttcgacggactgatccaggcatatgtgtttgtctttctgacagcactgtttatcaaagaagctattgagtaaatttaattggaaaagagaaaaggagaaaacattatgttagtagcaatcggagcagcagtagcagtattaacaggtatcggagcaggactgggaatcggtctggcaacaggtaaagcagtagatgcaatcgcaagacagccggaagcagaaagcaaaatcagcaaatcccttcttcttggttgtgcactggcagaggcaaccgctatttacggtttcgttatcggtctgctgatcatcttcttccttggctaatcaccattaccgaaacatgagaaaaacgagaaaggcaggtgagtaaagggtgttacggatagacttaaatctggtttggaccattatcaacgtcatcattctctaccttttactgaaaaagttcctgatcaaaccggtaactgcgatcatggataagagagagcagatggtgaaacagggtctggaaggtgccagagcccaggagagccaggcgaaggaactgaaggttaaatatgaagaagcccttgcatctgcgaaggaagaatctctccagctggttgagaaagccagaggaaatgcccaggtggaatatgaccgtattctgggtgaagcggatgaacaggcgaaaaagataaaagaagcggccagaaaggatgtggaactggatcgggaaaaagcaatgaaagagatgcagtccgaagttgcaggacttgctcttaccgcagtatcccgtatcctgcaggaaggtactgatccacagagtgacggtgcgctgtatgaacaatttttgaaaaaagcaggtgaggccaatgacacagaccgctgatcgttatggaaaagtgctttatgatctgagagttcccgcagaagatgtggaacagatgaaagcggctttgtgtgcggcgcctcagctggtgaaaattctcaatgatccgactcttaccaaagaggtaaagcatgagattatagaaacaatattcccgaagagcttacacaactttttaaagacagtcagtgaccggcgaagatgtgatcagatcgatgacatgctggaaagctacagggcctgtgtgagaaaggaaaagggaattgtggccgctacgctgtactgtgtccatgagccggatgagaatcagaaagctcagatggaacagttcgtcaggagaacctatggcgtcaatggcgtggaaatgactgttgaacagcagccggacctgatcggaggatttgttcttcgtgtgggggaccgggaatttgactggagtctgcgcggcagagtccgtcagctgcaacaacgattgatccggaggtgaaagaaatgagcacaatcagctcagaagaaattatttccattctgaaagagaaaatcgaaaattacgatgccatgtgtcaggaacaggaaaccggtaaggttatcagtgtcggtgacggaatcgcaacgatctatggaatcgatcatgcgatgtacggcgagatcgtaacttttgaaaacggcgaaaaaggaatggttcaggatatccgtcaggataccatcggatgtatcctgttcggtaaagatacaggaatcaaagaaggtacccgtgtggtacgtacgaaaaagaaagccggaatcccggtcggtgaaggatttgtcggcagagttatcaatgcgctgggtgagccgatcgacggaaagggagctgtagaagaagacgactactatccggtagaaagagaagcacctggtattattgagagaaaatctgtcagtgttcctatggagaccggtatcttgtctatcgactccatgttcccgatcggacgtggacagcgtgagttgatcatcggtgaccgtcagaccggtaagacagcgatcgcaaccgataccatcttaaaccagaaaggcaaagacgtaatctgcgtctacgttgccatcggtcagaaagcatctacgattgcaaaactggtaaatacactgaccaaacatgatgctatggattacaccatcatcgtttctgctacagccagtgactgtgcaccgttacagtacattgcaccttattcgggaaccgctatggcagaatattttatgcacaaaggaaaagacgtactgatcgtatacgatgatctgtccaaacatgcggttgcataccgtgccctgtccctgttgctggagcgttctccgggacgtgaagcttatccgggtgacgtattctatctgcattccagactgctggaacgttccagccggctgagcgatgaagaaggcggcggatctatcacagcactgccgatcatcgagacacaggcgggtgacctgtcggcctatatcccgacaaacgttatttccatcactgacggtcagatctttctggaaagtgatctgttcttctccggtatgcgtccggccgtaaacgttggtctttccgtatcccgtgtaggtggtgcggcacagacaaaagccatgaagaaagcagcaggaagtatccgtatcgacctggcccagtaccgtgagatggaagtatttacccagttcagttccgatctggatgagacaaccaaagcgcagttacagtatggaaaatgtctgatggaactgttaaaacagccattatgtaatccgctttccatgccacagcaggttatcactctggtagctgcaacacataaagttctggtagatgtggaagtaagcaaactgaaagcattccagatggatatgctgcagtattttgcagatatgcataaagagatcatcgatgaactgaatgataaaaaagttctcagcgatgaactgacagaaaagatcgtagaagtggcagaggaattcaagaagagcaggtgttaatatggcaaatgtaaaagagatacaggaccggatcaagagtatccaggacaccatgaagatcaccaatgcgatgtacatgatctcatcatccaagatgaagaaagcaaagaaagcgctgtcagatacagagccctatttctttgagatgcagtccgcgatccgccgtatcctgcgtcatgtgccggatattgagcatgctttcttcgatgcgagaccggagattccgaaaaaagaccggaagatcggccacatcatcgtaacagcagacaaaggactggcaggtgcttataaccataacgtgatcaagatggcagaagagcagctgcagtgggaaggaaaacacagtctgtttgttcttggagaactgggtcggcagtatttttcaaagaaaacactgccggacgtgtctgtggatatggatttccactttacggttcagaagccttccatgcaccgtgcccgtatgatcgggctgcgtatggtagaggaatatctggaaggaaaactggatgagatccatgtgatctacaccaacatggaaaatgctgtgaccaatgagacacagactcttcagctgcttccgttaaagaaagcttcgttccataccgaactgaaaatgggaattccggcggatgtacatcatgaggagatcatgctggtaccgtccgcagatgaagtgttaaataccatcattccgaactatgtagtgggaacgatatacggctgtctggtagaatcctactgcagcgagcagaacgcccgtatgacagccatggatgcctcgaaccggaatgccagcgagatgctgaaagccttatcgattcagtataaccgggcaagacaggcagcgatcacccaggagatcaccgaggttatcgcaggtgcgaaagcacagaaaaacaaacacaaatagaggcaaaaatatatagagagataagagaggaggagcgaatccatatgcagacaggaaaaatcgtacaggtcatgggacctgtagtagacgtccttttcgaaggacagactctcccgtccatcaaggatgctctggaagttgacaacggtgggaaaaagtgtgtcatggaagtagcacagcacatcggaaacaatatggttcgttgtattatgctgaattccagtgaaggacttcaccgtgatatggaagtaacagctacaggcgcaggtattcaggtgccggtaggagaaaagacactgggtcgtctgttcaatgtactgggtgacaccattgatggtggagaaagcctggaaaatgaacagcactgggtaatccacagagatcccccgacctttgaggaacagagcccggttgtagagatcctggagacaggtatcaaagtaatcgaccttctggcaccctatgccaaaggtggtaagatcggtctgttcggtggtgccggtgtaggtaaaaccgtactgatccaggaactgatccgtaacatcgcaacagaacacggtggatattccatcttcaccggtgtaggagaacgttcccgtgaaggtaatgacctgtggagtgagatgaaagcatccggtgtactggagaaaaccgctttggtattcggacagatgaacgagccaccgggatcccgtatgcgtgtagcagagacgggtctgaccatggcagaatatttccgtgatgaagaacatcagaacgtgcttctgtttattgataacattttccgttttgtacaggcaggttccgaggtatccgcactgcttggccgtatgccttcagccgtaggttaccagccgactctggctaatgaaatgggtgaactgcaggagcgaatcgcttccacaaagaatggttccgtaacttccgtacaggctgtttatgtgccggcggatgaccttactgacccggcgccggcaacaaccttcgcccacctggatgcaacaaccgtactttcccgtaagatcgtagagcagggtatctatccggccgtagatccgctggaatcttcttcccgtattctggaagcagatgtggtaggagaagaacactaccgtgttgcacgtaaagtacaggaaatcctgcaaaaatacaaagaactgcaggatatcatcgccatccttggtatggaagaactgtcagaagacgataaactgaccgtattccgtgcaagaaagatccagcgtttcctgtcccagccgttccacgtagcagaaacctttaccggtgttccaggaaaatacgtgccgctggctgagaccatccgcggtttcaaagcaatcgttgacggtgagatggatgaatatccggaatgggcattctttaatgtaggaaccatcgatgatgttatcgagaaagcaaagtcacaggaggcttaagataaggaggtaccggcatgagtggattttatatgcgagttcttgccagtgaccatgtattttaccagggaagggtagaagcagtgactctcccgggtgatgatggtgaacgtaccgtactggcccatcatgcagacagtatcatttccatcagagagggcgaacttcgtttccgcgatgtggaagaaaactggcatgaggcgatcgtaggtctgggctttgcagagatgatcaataaccgtctgaccattctggtagacaccgcagaacgcccggaagacatcgaccggaagcgtgcggaagaagcgaaagcaagagccgaggaacagcttcgtcagaagcagagcatgcaggaatactacatgtccaaagcatccctcgcccgtgcgatgaccagactgagtgcgacgaacaaaaagaatatagtataaaccagaaaccagcagctttcggataaaaatgtccgggagctgctggttttttacgttgttgcaaaaacaacccgtcccatatcttgttacatatagaccgtaaaaaatgccatcccccgaaatctgtcgataaaagcaggtataataggagaaaatactccagtaacagaggcgaacgggcgatgaacagaaatttaccatatatgaagatagcggtctgtacatccgaggtacagatcggcgaacagatcagagaatatgtagatgaatttacaggaaaaggcaatgcacagattcaggtggatgtgatgaaaaactgctatcggctggcgaagaaaatcctgaacagagaacactatgatgtgatctgtattggaaaaaaccttcgggatatcgacagctatacctttgcctccagcatccgtatggcagaccgggaaaccatcttttttcttccgggatggaaccgtctgaatctgaatcagatagaacacctggcgccggtgtcgtatctctcgatgccgctgtcaaaggaagaattccgaaaagaactctaccgcaccatcagccacctgggacccggaagcagatatctttcttttgacgtacagggacagaaaggacgcgtcctgtaccgcgatatcgaatacatcagaaaaagcggtaactccgtccttgtctttaccatgaaagaaatgtaccggatcccggttcctatgacagaggtggaacgggaacttgcaggagtggaggaacgcttcctcagagtccacagagattatctgatcaacggacgttacctctcctggctctggaaccaggaagtcggtctgatggacggaacccgcatccccgtaagccggatctaccggacacgcgtggaacgggtcgttgcagagaacagaaaaaagattgtggaataaagaaaagagcacaggcagccctgccggaaagaatgatagctttccggtggggctgctttttgtgctgcagggaacaaagatatatatagagaaaaaatatagaattgtccgtgggcatgtgttactataaaatatatgaccaaacggaggaaaaaggaatgaaaatagctgtatgtgatgacgaccggctgctgacaggagaaatcgacgggcaattacagaaaatccgtgaaaaaacgggtatttcttttgaaacagatatattttttgatggtgagacactatgggaagcaattgagaaaaacggttcctatgatatagtctatctggatatcgagatgaaaaatatggatgggattaccgtggcaagaaagatccgggatcgtgatccatatgccattctgatctttgtatccagttatgacagttattacgaacagttgtttgaagtcgaaccactgcgtttcctccacaaaccgatagatccggaaaaattcgaggaatatttccgggttgcatataagaaactgaccagcctggaggatcgcctgcattttgaattcaataaacgcctgtaccagattccctaccgcgatatcgtctatatggagagcagaagaagagtcattcatctgtttggaaaaaacggagaagaatatcgtttttataaaaaaatgaaggacctgctggaagagatcagccataccggaaatatgtttatccgtgtacactgttcctatgtggtgaactattactacatcaaatcccttagctccaccgaggtagaactcctgaccggagaaaaactcccggtgagcggggagtataagaatgaggcgttaaagaagtttatggggatgatggaatgagttcggtactgtggagtttcatgaattgtctggcggttgtttttgtaaaagaagactttctatctacatttttaaaacgtaaaaagaatcgctggatctttatatgcatatggattttctattttctgtttcattttatgacaaaagtagaaaactatatcataaacctgatacaggatgcaactgtgacggcaattgtatgctggctggggtatgaggcggctctgaggataaagattctgattgcggtgttgtcggtggctataggggcattgtcagaggaaatcatagttgtattgctcataaatataaaaggaagcattgatggaaatattatgctgtattccctgatgggtaaaattattttctggttatgtacacggattttatcaatggtatataaagggaaaatggaggcaatagaacaacaacgcagatatggaaatctgttactgctaacggcaggaagcactctggtatcaaattatatcatatttttgataagcaacagtgttcaggacaacactgtacagatgtggttattgatatctgtttttataatattgttattggatattatcgtgtttaaggtatatgcaatgcataaaatgcagctggatgtagaacgcgaaaacagagaatacgcctatcaggtacagtattatgataaacagatcaaagatcgtcaggcgatgatccaggaagttcgcagaaccagacatgatatgaaaaataacatgatttgtctgaaagaactgttaaatacagacgcggaaaaagcaagggaatttctggataaatacatcgaacaaagtgaagttacagatgaaatctcaaaaagcggaaatctggcagtggatgcactgattaactataaaaatatgacagccagagaaaaaggaatcaccatccacctggaaaaccagataccggcggaactgccgtatgaatctacagatctgagtatcattctggggaatctgctagacaatgcgattgaagcgacggagaaacttgaagttgaaaaagatatctttgtgagtctgatgtacaggaaagaaaagctgcttatcaaagttcgaaacccatacacaggtgatctcaaaaaagatcgcgcaggggattacatatcagaaaagaaggatcgtgagaatcacgggatcgggttgaaatcggtgcggaaagtggtggagaagtatgaaggtgttatggaaattcatacagagaaccagatttttgaaatatgtgtgattatatagaccgctgaaaggcgaagattgtaaacaaaaaatacaaaggaagaaaatatggaaaagatattctgggagattttggcggcttccgcgctggttattacaatggaacagtttttttcggcatttttaaagaaaaaaattgtgggatggaaatatacaggtatgtggatttttttcttcctgtatcatatgagcataatgggtttagtaaagggatatttagcgactatgactggaaatgtaattgctttggccattatctgctggttttcctatcaaacgacatttgcgataaatattatgatgatattgcttgcgatttcactaagtggaatatcggaaggcgttattgcaatatttatcttactggttcagggagatttgactggaaatctgtatctgtattcggtgatggggaaaattgttttttggatttgcattcggattttgtgcctgctatgcaaaggaaaggtggaaggagtacaaaagaaaggatacggcatttttctgatcataattgcaaatgtaaacatctgggtactggtaggaaatcttacaatatcaatccatgcagaaggcgatctggtaaaaatctggtcaggaattattacattcatgttattgttggttgatatgattgcactgaaattgtatctaatatatcaggaaaaagtggaagaaaaaagtatgaagcagctgtatgctgaacaggttcgaatgtatgacgaagagttacatgaaaagcaaaaaacaatagatggagtccgcagaacccgacacgatataaaaaaccatatgatctatttacaggagttattggcagaaaatccggacgaagcgaagaagtttctgaaagaatatcttggcgaaaatatagataacaaaagtgaattatccaaaagtggaaatctggcggtagatgcattaattaactataaaaatatcattgccagagaaaaaggaatcaccatccacctggaaagccggataccggcggaactgccgtatgaatctacagatctgagtatcattctgggcaatctactggataatgcgatggaggcaacagagaagcttgagaatgagaaagatatttttgtgagtctgctgtatcagaaagaaaaaatgcttattaaggttcaaaatccatacacaggtgatctcaaaaaagatcgagcaggaaattacatatcagaaaagaaggatcgtgagaatcacgggatcgggttgaaatcggtgcggaaagtggtggagaagtatgagggagttatggaaattcatacggaggatcagacttttgaagtatatgtgattttataagttggataaaaattaaagaacagaattctgagacaacagtaggtttatgatcctatcaaagtaaatgttgcattttaattgcattttatgccaaattgttacgagaaatcaccaaagatgctacaatttgctaagaaatattagcttgttatgcggagaaattaagtttcagttacgtttttcagattctgtttacagggggattttcgggtgctataatccaagcaaatactttgatatgcaaattattcgaaatgcaggaagggaaaagatacccgggcagaggagacggacagtaagagacagaggggttgaacctgcaggaacaagtggtttgcgccatcgaaaaggatggcagaaatggaggaagctatgaagagaaaaagcatgatggtagcagtgttgatggcaagtatggtactgggagcctgcgggaaaaagacagagacgagtgtggtggaagacccggtagtttcggaagcaccggcagaggaaacaacaacggaggaaacaccgacggaagaagcgtcatcaggtgaaacacagacaggggagacaacagaagaagcatccaacgaagcagcaaccggcgagacagaacagagcacaaaaggggttgatgtcggtgattatctggagaatttcggagagctgaaaaatatcttacagatgacaacgacagagtgctggcagttcccgaatgcgcagtcctatgtgtcagacggattttatctggagtggcagggcgagacattcagtatgaaaaatgaaggcaatcaggcagtggcactgtatggaatccatatcggggatgaagcgggagcatccggaaaagctatgaccgatcatggttggacagcataccagtatggtggctatatcatgcagacagacaaagcgcagtattatatggaactggaaagtgatgagaacggaaaagtaacctcctggtatctgaacaactggccggaaggggatatcacagaggcatacgattctctggaaaaacagtaagtaattgttgcatttagattgcaatttatgccgaatgattatgagttgtggcaggaaatgctacaatttaataaaaagcggtttgccatagggagtaatggcagaaatggaggaaactatgaagagtaaaagtatgatcgtagcagtgttgatggcaagtatggtactgggagcctgtgggaacaaagcagagacaagcacaacagaggatgcggtagtttcggaagcaccaacggaggaggcaacaactctggagccggaagatacaaccgaagatactgcgcagagtgcaggggaggcacagacggacagcagcagttcttcaggaagtgcaagtaccggttcaaacagcacaacaggaacaaatggaagtacatcgtcagataagaactctggtaatgctgctgcaagcagcacaacaacggaaagcagttctgtaaaacaggatacatcttccggcagtgaaagtgcacaggcggaaacgggcagtcaggacagtacacagactacaggagttgaggcacagtatcaggtatatgagggagtatattttgatgaagtgatttatacatggtcgttagatgacagcaaggtcagaccatattatgaaatccatgtttcaaatgtaacggatacatcttttgattttaccatttatgaaaaagacctgtacgagaacagtactttaaaattcaaaacaaatacagctgtatttacgggagatggaacacaggctgagttcaatggaaaaggttatcatcttgtatttacattcccgaatgagcgtgaatcccttcctgttgtaacagagatgcaggtatcaggattaagctggctggaaggaaatatatattgtaataatgatattccgggacatgaatttggctgagtaaagaacagaagttataaaaagagagtataaataaaggttattattgtaaaaaaaccatgacgagtaagagcatacaaaagtattaaacggtaacggagaggggagaactccgacgccggaaagaccgggcagcagatccaggggagtggaatctgcgtgcccggtttttggtgtatttcatagtgattttccgccaggcggaaccattttgatgatgccgggagaaaaagatttgcaaaatctactttctatctatgcggttttgtgggataataaaaaaagaaacatgcgggaaaccgtacagggagaggagaatagtaattatgagacgaaaaataatgatgacaggtatattagcgatgagcatggtatttgctgcgtgtggatccggtgcatctacagaagttgagcaggaagataccgaagtgatacaggaagaaactccggaagcggaggatgagccggaggttacagaaaccccggaggcaacggtcacaccggaagagtcgccggaggcaatggtgacagctgcgccggatgatgaagaggcacagaaggaggagacgatgcaggcgattccgcaggatcttacaccggtagctgcacagtatcaggtgtatgagggaacctataaagatataaatcttaacgaggcgatgtccgcagatggcggaagtaattcatactgtcagattgaagtgtccaatatcaccgatcagtcttttgatttcacggtatatcagatgaccgacggaaataagaaagaagtgctggataccagaaccgctacatttgtggaagatggaacaaaagcagtatcagaaaaggacggaacgaatctggtatttaccttcccggacagctggaatgcactgccgaaggttgtggagatgcaggtgagcggtctggatgtactggaaggaaattcctatgtcaataacaatgttccgggatatgaattcggttaaagaacaatctgcaaaaagataagatgataaaaaacatgtctgtatcttcccagtttagaagtacagacatgttttttctagagcgtgtttgaaaaaggcttttcgtgagctgcgagtcccagtttgtgggagattttatccgaatgagggcggtgtagcgggctacggcaaccgaataagggtaaaatataccgcaaagtggggattgcagattgcggaaatgatttttcaaacacgctctagtgtaaaaatgacaggaacacgttcaaaaatcaggattcgtggacgataatgtccgcaaactgtgcccgtgtcacctctgcgagttcctggggattcaggcagatggttgtgccgatccgaccgccgctgacatagatcttatcaaaattttccgcactgttgtggatgaaggtagggaaaagtttcttcattcccagcgggctgcagccgccccggacataaccggtgatttttgtgatctcttttaccgggatcagctccacggatttttctccggctactttggcagcctgttttaactgcacttcttccgcgatgggaaccacgaaaacatagtattgtttgctttttccctgtgccaccagtgtcttgaaagactgttctaccggtgcacctgttttttcggcggtatgaagaccgtcgataaattcatcacattcatattgaatcatgtcgtactggatatggtgtttgtccagcatgcgcatggcatttgtttttacttctttactcatgtttatcacctcaacaggattatacacattttttttatggagggcaatatccactgaaatttttctgttatttttagctacttttgccaaaaagaagaaaattagaaaaatccactagacaaatccgaaaagggcggatataattagcccataacaaatccagatgcagcgattcagttgcagatttccagaaaacgaattgaataaaataaagggaagtggagattactatggacttttctatgcttttttgcattatttttaccatgggagcagtgttttttgactgcaagtgggagaaagttcccaatctgtggatactgaccggatggcagatcagtatgacggagcatctgtgcagacaggttgcacaggggcttggtgaagcggtattccgcttctggggagggagtttgctggtgctgtttctgttctttccactgtttttgggaaagatgatcgggaccggcgatatcaaagtgtttgcagtgctcggtagcgtatttggtcccggaaagatccttggctgtatcgtgtcggcatttctgcttggagcgctggaatctgtattttttctgttctttcgctgcgactggcggcagcggttcttatattttcttcagtatgtgcagcgggcatgtacggaacgatcacttccaccatatctggtgccgggaaaaagaccggaaaatatccattttacaataccaattttaggcagcgtattgctgctgtatctgggagggcgaggatgagcgaacgaaatatttttgcagtgtgtgatctggatgtggattacgcttatcattttatggagtacctgagtaagaagaaaaatatcccgtttgaggtgcgggtatttacgagtgccgtgagttttcaggaatatgtaaaggaacatccggtagaactgcttctgatctccgagaaagcgatgaacagtgagatccggcaggcgaagatcggacagatcctgatcttatcggatggtgtgtctgccagaagatatgaggaatatccgtcgatctacaaatatcagtcatcgaatcaggtgatccgggaagctcttgaacactacggggagagcggcgcgggaacggtacagtcgttaaaactggagaagaaaaagatggaggtgatcggggtgtattcgccggtcggacggacgatgaagacaacatttgcgctgacgctggggcagatcctggcgaagaaacgggcgtgtctgtacctgaatctggaagcgtattccgggtttgaatatctgatggaacggaaatttgagcagacactgggtgatctgctgtattacctgcggctgggatcggatcagctggttacaaagatgggatcgatggtgcagagtatcaacaatctggactatctgccgccggtgctttcaatggaggatatccagagtacaacggcagaggaatggatccggctgttgcagcagatcatcgattacagcaattatgatgtgatcattctggatctgggggacagcgtcagccagctgtatcaactcctggaacagtgtaccagaatctatatgccgatccgggcagatccggtttcccaggcgaagatccagcagtttgaacatacgcttcaggtgtgggagaaacaggcggtactcgaccggatccggaagatcaaaccgccgtatcatcgcagtacgaggagcggaaccggatacatggatgatctggtgtggagtgagctgggagattatgtgagagagatgatccgaaaggaatgggaggacggatgatgaaacaggaacagtttgccggcatgcgggcgagactgatggaacagctgcaacagggagtggaatggtcggatgaggcgattctggaacggatcgatcagctggtgtcggaggcagcaagagagaaccggctgccggtgagccggagagaggagatccggagaaaactgttttattcggtgcgaaaactggatattttgcaggaactgctggatgatgaccgggtgacagagatcatggtaaacgggtatcagaagatcttcgtggagcggaacggacagaaaagcagatgggaaaagtctttcgtgtccagagaaaagctggaagatgtcgtgcagcagatcgccggaaaatgcaaccgcgtgatcaatgaaaattcgccgatcgtggatgcgagactggaaaacggttcccgtgtcaatgcggtcatctatccggtcgcgttggacggaccgattctgacgatccgccgttttccggatcatgcgatcacgatggaggatctgatcgcgaaagagagtatcacgagagaagcggcaacctttctggaacatctggtaaaagcgggatattcgatcctgatcggcggagggacatcctccggcaaaacaacatttctgaatgcgttatccaacgcgattccccatgaggaacggattattaccattgaagattcggcagagttacagatccagggtgtggaaaatctggtgcgtctggaggcaaaacctgccaatatggaaggaaaccgggagattacgatccgggatctgatccgcaccgcgcttcgtatggcgccggatcgcattatcgtgggcgagatccgcggggaggaggcggtggatcttttgcaggcgtggaacaccggtcatgacggaagccttggaacggcacacgccaacagtacgaaagatatgatttcccgtgtggagacgatggtactgatggggatggaactgccgcttgaggcggtgcgaagacagattgcgtccggggtggaacttctggtgcatctggaacgggcaagagatggaaaacggcaggttgcggagatcgcagagattctcggatttgcagagggagaggtgcggatgcatgggctatacaaaagggaaaaggatcagcttaaaaagaccggagagctggcacacagggagaaactggaacggtgcttcggtgagaacgaattataaaacgtatgtattttccaaaaaagagtggatcttttgcctgttacagagcatcgggattacgggagttgtgaatctgttctgttaccgttcctggtgggcgtggggactggtgatcccggttggcatctggtataccagatggaagcagaaagagatggcagagcgaagacggcgaattctgcaaaatcattttaaggatgtgttgcagagtttacagacggcagtacgggcgggatattcgatggagcaaagtgtaacggaatgtcgcagggagatggagcggcttttcggagagcgggatgatctggtgagagaactgcggtatatggaaagtcagatgcaggtgggtgtgccggtggagcagctgttttggaatctcggacagcgctccggtgtggaagaaatccgcaactttggggatatctttctgatcgcgcggcgttccggtggaaatctcgggaaaattctcggcaatcttgcagaggtactgggagaaaagatccgggttaccggggaaatacaggtggcgatcgcagggaaaaaactggaacagatggtgatgagcctggttccaggggcgatgatcctttatatgcagctgacttcccgtggatttctcgatgtgttatatcacaatctgccgggggcactggtgatgaccggatgtctgggtgtgtatctgttcagcttccggatgggaagaaagattgtgaggattcaggtatgaatgtagttctgggaatggctcttttgctgctgatagcagtgttcagcattataacttcaaaagaaaaaggaaaccggagaaaaaagggagccagatggatccaccggtggagccggaaaaagggctgggagcttccggaatggctgacggatgaatgtatctggcagacagaacttgcggctctggctgcgggcatgcttctgattgtaacagggatggtcggacacgcagaaaacatgcaggcagtttccgagctgcggcgtccggcgtacggacagggtgtacaggaagaaaatcttcaggtggaatggaaagatgagcagggaaaacgccagaaagaagaaatgaccgtacaggtgacagaaaaacagttttccgaaagcgagatagaagagattttctcagggttacgcgacaggatcgaaaacgagatgctgggggagaatgattcgctggatcatgtggatcatccgctgcatctgtgtgaggaactgccggactgtccggtaacgatccggtggttcagcagccggccagagatcatggactgggaaggaatatatggggaaatgatcggggaagagggagaagaagtgatcctcacagcaacggcccagctgcaggggaaggaatggcaggagagctggaatgtccttgtatttcccagggttttcggggaaaaagaacaggtggaagatatggtggaaaaggcaaatgcagatacggcaggaggctcggaatggatgcagcttccggcagtattacacggagaaaaactgatctggaaacgggcaggagacgggatgcagtacggagcggctttgcttgcgcttgtatttccggcaatggtacttctgcacagacagcagaaagaaaaggaacagaaaaagaaggaacggcagcagatgcagcaggattatccggagattgtgacaaaattgcagctgttgttaagtaccgggatgaatcttcgaaagtcggtggagcggattgcgaatgattatctttcttatatgcgcagagaggaggtgagaaaggcttatgagatacttgtggaaatctgcagggagatggagcgcggtctcggagaaaaagaggcttatgaacagctgggagagcgctggggactgttgtcttaccggacattgtcttctattctggtgcagtgtctgcaaaaaggaagtaacggcgtggaacaggttctggcaaaagaggcggagcaggcacagcggcttcgcaggcagcaggcgcagatcctcggggagcaggcatccacccggctgctcttcccgatgattttaatgttgctcgtggtgtttgtgattctgctggtgccggcatggctgatgtttgcagtctgacggtgtgggacagaaacgcatattatttttgtgataatagaagatttaaagtagtcagtccatagttgtatgtgatcaggaaaggaaacatgctctttatattacgcaggttactgcgtgttcacgaaactcctgtcttgtataatatgcgattctgacgatcaaaacacctccgggccggaaaggagggaaaaccatggcacttttacagagatttgtgcaggaagaagacgcgctgggaacggtagaactgattctgatcatcg

SEQ ID NO: 2527 - DNA, 2251 bp, Unknown
  gut microbiota DNA sequence
cctgaatgagggcggcgtagcgggctacgtcaaccgaatgaaggtaaaatatgccgcaaagtggggcgtgcagattgcaggaatgatttttcaaacacgctctaaacatgtttcatactattttatcataaagtaacacatatgaaccgcataattttgccgttctcccgattatgtgattaagccgaacatataccgaggaaaatacagagttttttcattctctctttctactgattattgtttgtttttcatgattccagtataataaaatacatacaaaaaatacgtatacaacatgcagacttacaagatccaaaggcagcgagccaccaaacctgtaagttcagtggctcgctgcctgttgcctttctacatatgctgtaattgatttattatgtattctgttctccggatcgcctcatccacctggcgtcttgccgtattgatccggtcctgtaccatccagtccactacgaatccatcaaaaaaataattcgcaaaagaaagaaagtcaccggtatccatatgcagatcacatgccagattaacatcattcaattccttactgaaattgcgaagatcgtattttgcctgctccatgttctgctttgcctgatccatcttggaatgtttcagcatcgtagtaaaaaatccaccaccaaacatatcaaccagtccccagttctttgcactgttcaggttctctctggctgttcgcagactgttcaaagctctgtttcctgctgttgaagataaaacattgccttctgcgttttgagcatacgatagtaatactgagattaaatattccgttgtaaagttctaacactccaggtatgctctgccgcttccttttcataccagtcacgggcttctttatctttaacttgtagtaacactgcataatgcgaccatgataataaactcacagattttccagacgctgtctggaaaatttctggataattgcttttttgaaactgcccccaaagctctgccatatataaatcattagataccaaatataatatagtttctatatcctccttactaaaaatagactttctcttttcacatgtagcagagaatgctgtacataaaacctgcttctctatctgttctccataggaattcataatcattaagttcagtcaagttgtgcattgttaatgtgctcagtaattggtactattctcgtaaccatctacagatatcaaccacttgcactcctttataatcataagtttcatgatgtgttcttgcaattatcatcttaggatatgcatctcttattgcaagcaaaggcgaatattctctttcaaatgttttttcatctgaaatattgtcgcttacctgaatatatatttgagcctcacgtttcttagctacaaaatccacttcctttttatagagttttcccacatatacctcatatcctcttctacgcaactccagataaacaatattttcgtaaactcttccaaagcccatgtttcgtgtaccattgactgcataacgaaatgatgtatcacaaagataatatttactattatttgccagatattttttcccttttaaatcataccgttttgcctcatagagcagaaaggcattttccaaataaccaatgtattttgacaccgtctttctggttatctcactctggtcattttttaaagttttgctgatattattaggcgaaagtaaattaccgatgttatccatcatgaattcagatatgttagtgaactctgatttatttcttatcttatacttttcaaccaaatctctgataagaatggttaaatatacatccctaacgtaattatactgtctgtcctcagtcttatacacataagcgccaggcataccaccagttcggacatactgatcaaaagcttcatcatatctatctgtaatttcatgataagttagatattccacgaaagaaaatggatatacttttatttccatcgttcttccggtaaaaagtgttgctaaatccgagctcaataaaaatgcgtttgaaccggtaatataaatatcataaattccttttgtataaatactattaattgcaagttcaaactgcgggcatagctgaacctcatcaaccagtaaaacattcgtcattccctctttgtactgatccaggatgtacttatgcaatgcatgatactccaacaaatgatcaaactctaattcctgaaggtttatcataacaatatttaccgcttcctctaatgac

SEQ ID NO: 2528 - DNA, 6351 bp, Unknown
  gut microbiota DNA sequence
gtgtcaaaagttctcttcgtcttggggactgggatgcgagtataatatttttcataattctccgttttctcccttctgccgttcctgtgcaattacaattccgcgacagtattttcttctattattatgccatattctctcttttttgtgaatcgtttttcattcagacaatacagtaacgagataaaatacgcttcgcgaattttactcattgtcgcagcagtcgtcaaggtcttgtgcaagcacagactttgactcgttgctcacgtaaaaaaactgccgtccgaaacacttcttttcatgttccggacgacagccatattctgtgaaagtaagcagaacgataagccgggttatgtcttgaatggtcatctatctaatcctgctgttgccagcaggcttcagcgacctacctaaaaacgtgacgggcagccacatagttttttgttcggtcttgcttcggatggggtttacatgtgccctctctgtcaccagacaggcggtagtctcttacactgcctttccacccttaccaggcgaacctggcggtttatttctgttgcactggccttggagtcacctccaccggacgttatccggcatcctgccctttgaagcccggactttcctcacctgacccctttcggttctgtcagccgcgaccatttattctacttaccgaatcagtctaccacaggaaaaacttttcgtcaaatacattttctattgtattatttgtatcgtgtgatataatacaaaatacaaggaggtgttttcatgatcataaaaatcaatacactctcgcagattcctctgtatctgcagcttcgcaaccagattgtaaaaggcatcggcaaaggggaactgaccgagggtgagtctcttcccaccgtgcgacagatggctgccgatcttggtatcaataccatgacagtgagcaaagcctaccagcttttgaaaaatgaaggttttctctatactgaccgccgtctgggaagtatcgttcatattccggaaaacgaggaaccttcttctctttttcaggaaaaactggaggacgaactggaacttttaagtgcggaagccaggatccgcggaatgcacctggaagattttctcagtctttgcagcaaagtatttgtggaaatggaggtggctgtggaatgatgctcttttggattcttgcgatcacggacctgatcatggtcggcatcacctgggcggtttatggaagttcggcaacgtatcgggacgggatgctccttggcgttcatctgccggagtctgctgcatccctcccgcctgtagttcagctgactgacagctacaaaaaacgtatccgacagttttatctgctgcatctgtttttgggtgttgcagttgccgctccttttttctggcggacttctgtggctatgatcctctggtgtatctggctttgtgtgtttttgatccgtgcagtctctttgctgtacagtgcccaccgtcaactgtatcttctgaagcaggatctgaaactatgcaatagggcagaagaatctttcacagcagctgttgatactcacactgccacacagacaggaaaggcaaaactccctctgtactggcatctgcttccgctggtgatggtttttattccgttgtttttctcctctgtccgtaactatatccacgccgatactaccggcttactctttctggttacctggattgccgtctggctgctttttcttctgatcgcatggtgctattcgaaaaccggtaaccgaatctacagtgcccatacggagattaatcttgctatcaacatgcaggaacatcgttcctggtcctggatgtttttcttctacagcctgtgcaacagcctggcctttatcagtgaactgattttcctggcaaacgatctggaatggtactggtggtcgcatctgctcttttttatcttccagacgattccgatcgttaccattttcgtgatctacttccgtgtaaagaagaaaaaggcacagattcttgcagcagacgatgcaccaatatacgtggatgacgattattactggagaaacggctggtataacaatcccgtcgatccccggcttatagttcccgaccgtttctgcgggacgaactttactaccaatatgggaagacctgcaggaaagattctcaccgccggtctggcagttgtggttgccggactgctgatttggatgtgcggactgttcttacgtatggattttgttccggtgcagatgtccatagatggtacacaagtttccatcacttccggttacaccgacacttctttctctaccgacgagatccgggatctgcagcttctggacagcctgccggatgattccttcgtccgctccaacggatccgctgacgggcatcagctgctcggtgtgtttagaggaaagaaaaccggtccgtgcagaatgtatgtagagctggatgaatccccggttctttccattcagaccgatgaatacacggtatttcttacggctccgacaaaaatacaggcagaaaactggtatcaggagctgaaagatcatatgtttgataactgacaacagaacaaaacacaaacggagttttcaataacatacaaacgttttttgaaaactcctttttatcactttttattcttttttctttccgttggaatcgtaaatcagttctttgtatttttccacaagttcttcgtactgttcctccgattctacgaatttctgaacctgatggtgcgctttcttatgtttttcggcgcgtggttttgcttccagaatggtataggtatcttcctctacctgcaacgcattttctatggctctggtcagaccattacagctgtatgtcgcgcccgaaacagcatcggtatccagcggtttattttccagcacttctgtgatcactgccggtgccacatggaaaagatattcctcattgtcataataagatagaattctgattttttctgctttctgatcttttaccgtaacttctactttgatttctccgcgaaagccattggctgttccctcatagttaccgtctttcagccggatctgactcgtgacatctgtcccgttttctgttttttccggataaatcgcctgatctacagctttcaggagtcctttgctgctgtaggtcgcaccggaaaccgtatccacctctgttgattgttctttcagcactttcggaatcagctctctgataacgctctgcatataagtagcatcatcttcataatcctgcacctgcacatcagaaatatttccatttttaatagtgaccgtcacatcgatcttaccacggaatccattaccggttcctgtatacgttccatctgtatacgaccctttctctgtcacttttacatctgctgttccgcttgccgtttcatttcccgttgcttttaacagatacagattcatgcaggaaaagacaagtattgtcaccgcaagaccccagcggttacttttctgctgtttgcactgatacggacagattgaacaatctccgctgtttttgcagcttcgctttcttctgtccaaagagaaaaaggaaagcagtgtataaattgctcccatcggacacagatatctgcaaaacgctctgaaaaatactgccgatatgaccagaacaatgatacagatccagacacctgcagaaatcagattctctttgctgaaatttcctctcagcagggacagcagactggcaaatcccttccaggggctgatgacatccagcagatttttcttccagacagcactcactgccacaatcaccagaacaggatatttcagtttggaaagaattttgtctgttttcaccgaaagcatacgtttcttacggtgttttgtctgttttcgtatcaggtttcccaaatcataactcagatcctgtgccgcaccaaaactacagatatatccgcagtaataccgtccgaaaaccgctgttgttacaacagtttccagcagcagaagaaccggttcccgcgcataagtaaaatccatcaccgaaaccgcatggatcagcttttttaccgcatacagactggcagcaaaagactccggtatccacagaaaaaacagaatctggattacaatttttataaccttagaatattgttttttcatcatcggataaagtttgtctgatttcctctctctgtctccggaagtggcacacctgctacttttccggcttcaaaacatttcatcatccaggccaggttctttgcgagattacgcatggtctgcagtccctccgcatccatcttcacttctcccggttcacagccatgtaccatgttccagtaagtagagccggctaccggcatctggcagatgccataatatttattcagtacatcgaaggaagcactgcatccaccgcgtcttgccactgctactgaagccgccggtttgaaggcaaatgctctgccgctgctgtaaaatactctgtccagaaatgacaggatccgtccgcttggatgtgcataatagaccggtgtaccgaagacaaatccgtccgcctctttcgcctttgccacgaatgcattgactttgtcatccgcaaacacacagccgttttcattacactgtccacatccgatacagtctctcaccggctgactgccgatctgaaagatctcatactcgatgccctgtctttccagttcctttcctacttccagaagagactggtatgtattgccttctttttttgcgcttccgtttaacatcaatactttcatactttccaccctttcttttgaaaatgccagggacaaaatcactttcacccctgacattttttcatatatcttttataaatatatatttttcgcacattattttacacatcaaaacagctgccgcccacgaattccctcaggatagagttcttcgggatatcctcactggggatccccacaaaataatccaggaattttaacagccgcttcgcttcctgatactccggttcgtccggtccaatctggaagagtaccggctccgcgtacagtttcagcactgccagttcatacagaagtgccgagttaaacattgcatctgcctgttcctgataggggaagatattttcatcctctccacggcgaaccgacggccacatcgcaatcgttgctttcgcactcgttccgcgggttcggttatcccggacaatccggcgaatcaatcgtccgtccgtcgtcggaatccggttgtgttcgtcaatatttaactgcgtcagcgcactgatatagatcttgaatttgctctccgtcggaagcgaatagctcagccggtcgttcagtccgtggattccctcgatcaccagaatatcgttcggctgcatctgcaggaaatcccctttgtattcccgttttcccagtttgaaattaaaccgtggcagttccacccgctcgcccttaagcagcgcattcatatcgcggttgaaaagttccacatcgatagcttccagacactcgtaattgtagtccccgttttcatcccgcggcgtatcttcccggtttacaaaataattatccactgcgatcggatgcggtttcatcccgtgagccgccagctggattgacaggcgatgagaaaatgtggtttttcctgaagaggacggtccggcgatcataacgaattttacaccgccacgctcgatgatctgctctgcgatctttgagattcttccctcctgcagggcttccgagatcagcagcagttcctgcatttttcctttcgagatcttctcgttcagttcccctaccacggaaactcccatcatctcgccccatttttccgcttctttctgcacctgaaaaatcttcggtgacggcgtaaacggcggcagtttttccggttctttccgggtcggcatctgcatcaccaagccctcgtcatacggatacaatttgaaatacttcagatatccggtatgccataccatatacccgtaaaaataatcctcaaattcctccagattatagatatttacccgggaacttctccggtaacgaaacagtttttctttgtcatacatgccatatttgtgaaagagatcaatcgcagaagccgtagacacactccgcttcatcaccggcgcacgttttttcaccagttcgtgcatatacgcttccacccgattcagaaacggctgatcgatcgtcacatctccgtcgatcgtataataaaatccctctcccaccgtaaaatgcaggacgatttttctgattttctcatgtcctgccacatgataaatcgcctttaacagcagcaaattcatacttcttttgtaggttttatgcccgatactgtctgccac

SEQ ID NO: 2529 - DNA, 3937 bp, Unknown
  gut microbiota DNA sequence
atggtggtgcaaatgagagtaccggaaatcaatttagctcacgggctacaggcccaagccgctaacgatctttaccgttacttttagtataacggatgacacatctgttctacaatcttttctaaacaaaaaagatatcatttccgatgtaccataacttacataggaaacaatatctttttatgaaaaacttccggatgccactccggttttattcatggtgtagcacgcgaggcgcgcatgggaatttagctcaaagttgccctgcccacgttgccagaccaggaagccaggagtctgccgcgtccctttttacgacactacccctctactcccggaaattcccagccttcttatacttattcataattccaaaatacatcaccaacagcagtgcagacgcaaaaatccacgccaccgggctcgccagacaaatccccagataactcttataatgcgaagcaaccacagccgtcagccctcttcctgccagctctgcaatccctgccgtcatgggaaggaatccatatcccattccctggataccgtttcggtatacatttaccacattaagcggaataaagaacaacgccacgcacttcatataaatatccaccagacccacgatctgatccagattctcagacacaaacagtccggtcagcatattaccaaagaagaacaccagcactccgaacaccaccgaataaatgctacccatgatcgttgttgcccggaatcctctgctgattctcttcaccttacctgcacccatattctgtgcacagtaagtagccatcgtagtacccagtgccacataaacctgcgttgccacctgctcgatcttatttgccgcagtaaacgctgccacatgcacagaaccaagcacattcagtgcagcctgcaccatcatcgcaccgatcgcagtgatcgaatactgcagtgccatcggaaaaccgatggccagctgctgccgtaccagatgaccatccagtttaaaatcccagcgatccagcttcagaatcggcactttcttaataatatagaccagacaaagcagcgccgaaactccctgcgcaataaccgtcgcatacgccgctcctgctgctcccaggtgaaacacaatgatcagtaccagatccagcacaatattcagtgctgcggaaaacagcagaaaatacaacggcgtcttactgttacccagcgcacgcaggatacccgctaacagattatacataacctgtgtaaaaatccccgcacagatgatcataatatacttatatgcatcctgaaaaatatcctccggtgtattcataagaatcagcaacggcttcataaacgccatactgatcaccgtcatcaccacgctgacgatcacagaaagtactgccgcagatccgaccgtcttacgcatccccggcatatctccggcaccgaatcgctgactggtcagtaccgtaaaacctgccgtgagtcccatcagaaatcccaggatcagaaacccgatcgttccggtcgatccgacagccgcaagagcctttgttcccacaaacttaccaacaatcaccgtatccaccatactgtaaaactgctggaaaatatttccaataacaataggtatcgtaaaattcaggataatcttccacggtgttcccaccgtcatatctctttccatagagatcctcctctcataataactcctcattttgcgcgataaaaatccggggacacagccccgggatctttatcacgttatttactttcacccattatatgcgatgctttttcatttttcaatactattttttgtaaaattattgttacctttttccggtctggccatccagttttttgttttgatatacaaaacggcagcacccgtactgatcgccgtcgcaaggattgccggaccaacgatcgccgttggtgtcacactgccatattctgtccgaaaagcaatgatattgaccgggatcaactgcagggaagatatattcaggatcaggaaatcacacatttcattacttgctgcaccgacagctaccgcccgctgtttttttctccgccgctcttcttccagatccgacagttcttccatcgctttcagcccggccggcgtggccgcccagccgagtcccaggatattcgccagcagattcgttgcaatcgatttcctcgacgggtgattcccggggatttccggaaacaaaaagttcagcaccggctgcattctctgctccatcgcctccagaagtccggacttctctgcaatccgcatcatccccacccagagtgccgtaaccccagccatcactacgcacagacttactgcctccttcgaagactgaatcgccgcctctgatacttcctccagatgcccggtcaccgtcccgtagataatcccgatcagaatcataccgccccagagataattcataaaaagctgctccgtttttgttggattctattatgtatacgccctgcatcgtaaaaatatacgtaactgctctaccgttctttatgaaaatgctgtaatgttgaaaaaccattgctgcgacgatattcccgtttatgtaatacagcagctttttatgatcacacgtatattttttatttctgaaacttctttctcccccattatctttactttcccccctccattcgttacaataaatcataaggcaaaagcttgtccgaaaacttttcggaagaaaggagaaggttatgaaattttcattttccccttcctccactgatctgaaaaaagtggaagaaggaacacaacttttattgggggatatcaaatcagaaaaggaactggagattcaggtggagtttcaggaaaatactccgcttaccgtaacgcgggacggtgatcacctgcagatcatctgccaggaaccggcgcattattaccgcggactgaactgggcggtacatcatctggaggatacctggaacacgaaaagtgaacctgtatacttttcaaaaaacggggtgatgctggactgctccagaaatgcagtatttaccgtagaaaaggtaaaatcttttattcgtatcatggcgaaactgggaatgaacaccctgatgctctacaccgaagagacttacaccgtaccggatgaaccttatttcggtgcttaccgcggccgctacagccaggatgagatccgcgagatggatgcttacgcgagaacttttggcatcgaacttgtaccgtgtatccagacactggcgcacctgcacaatgccctgaaatggccgctcggagataccgtcaaagacaccgccgacatccttcaggtaggaaaagaagaagtctacaccctcattgaaaaaatgcttcgctccgtaaaagagtccttttccaccaaccgggtacatctcggcatggacgaagctgcacagctcggtcttggaaaatatctccgggaaaacggatataccaaaagttccgttctgatccgcgaacacagcgcccgcgttttcgagatctgcaaaaagctgggactggagccgatgatctggagcgatatgtatatcactgccaacaccggcggcggttattacgatctcgccgacgataccgattgcagcgactgggaaaaaccggatccggatctcggactggtttactgggactactataatccggagcagaaaatctatgaaaaaatgatccgcgttcaccagcagctttccaacaaagttatctttgccggaggttcctggatctggaacggaatctcaccgaactattccaagacctttacctgcacccgtgccggacttgccgcatgtaaaaaataccacatgccggaagtcttctgtaccgcatggatggataacggcgccgaaactcctgtagatgcggttctgcccggtctggctctgttcgcccatctgggattccacgaagattttgatgaacatg

SEQ ID NO: 2530 - DNA, 1995 bp, Unknown
  gut microbiota DNA sequence
cgacaaaactgacaccgaatgtgtccgcaggaagtacatccggaagtgtgacaaagaaaaatacgcagaagagccagaccacacagtcccagaccggtaagaagtcttccggcacaacactgagaagagtaaatccgaaaacaggcgatatgcagcagacagcctggtatgcaggatttgcggcagcagcgcttgcagtactcggtattgccggtaagaaaacccgtaaaaaagaaatctgagaccgataaggtatagaacgaacaaccctcccatatagtactgtatgggagggatttttttggatacagggaaaagcatctggatacaaaagagcagcagagtcgtgaaaggactgatcgtatcgtacctggtcagcgggacaggacttttgcttctggcattgcttttgctgaagtgccagctggatgagggaaaagtatccgcaggtattctggctgtttatgtgctctctggactctgcgggggaatctatatgggaaaaacagcggaaagaaagagatatctgtggggaatggtactcggagggatgtactggatcattctgatgagcattatggtgttttccggtgcgggtacaggaacgggagtgaaaggtgcatttcttacgctgctcatctgcgccggatcgtcaactttgggcgcgatggtggcgggcgcgtgaaaatagcgtaaataggaagaagttgcgaaaaaaactctttgaaaatgaaggaagatatgctataatgcaagaagtaataacataaggaggaagcaaaaatgaaacatatcaaaactttaaatacaaaaagtttacagaacacaatgaaaaaaggtggatgtggcgaatgtcagacatcctgccagtctgcttgcaagacttcttgtacagtaggaaatcagagctgcgaaaacacaaaataagaattcgacaggctccatgatgcttggaacataacaggcagcggttcaaaaagccgctgcttgctttttgtttgttgtgcatcggataaaaactgctgattgagaaaagaaaaaggagaacagaaagtgattcatcaatataaaagtaatggatacgcaattgttcttgatgtaaacagcggatcagttcatgtggtggatgatattgtatatgactgtatcgccctgctggatcagggatgttcgaagggagaagtgacagaaaaactgtctgcttcttattccaaagaagacctgaagacggctctcgaagagattcaggagttgaccgatcagggaatgttgtttaccgaggacatttatgaaaatgcgatcgagcattttaaagagcggccaacggtagtcaaagcgctgtgtctgcatattgcgcatgactgtaacctggcctgtaagtactgctttgcggaagagggagaataccatggaagacgtgcactgatgtcctacgaagtaggaaagaaagcactggatttcctgatcgccaattccggaagcagaagaaatctggaagtagacttcttcggaggggaacctctgatgaactggcaggttgtcaaagacctggtagcttacggaagagagcaggaaaagatacataataaaaacttccgttttacactgaccaccaacggtgttctggtcaatgatgaagtgatggaattctgtaacaaagagatgggcaacgtggttatgagtatcgatggacgaaaagaagttcacgatcatatgcgtccgttccgtaaaggtgccggaagctatgacctggtagttccgaagttccagaaatgggcagagagccgtaaccaggacaaatattatgcccgtggtacatttacccattataatctcgacttttccaaggatgtactgaatctggcagatctgggattcaaacagatctctgtagagccggttgtggcaccttcggatgcggattacgcattgcagccggaagatcttccgaaactgtttgaagagtacgataacctggcgaaagagatgatcaaa

SEQ ID NO: 2531 - DNA, 1977 bp, Unknown
  gut microbiota DNA sequence
aaaagattatgtaattacttcacataaatcaaaggaacctgcgacggtgatgatcctggaagcacttgatattccggtatttttggactgtgacatgtgcctgggcgagggaaccggcgcggtaacaatctatccgatcctggatatggcactggcggtttatggaagcatgtctacatttgcggatattcagatggataattatgtgccactggtgtaataagagaaagtgaaggaaatcagaaatgtttcatgtagtaacagggggaagcggcagtggaaaatctgcctatgcggaacagtgtatcctggattttcagggagagaatagaatctatattgcgacgatgtacccgtttgatgaggaaagccaccggcggatcgcgagacatcgcgccatgcgggcggaaaaaaagttcacgacgatggaacggtataccgatctggagcatcttacgataccggcaggtgcggatgtactgctcgagtgcatgtcaaatctggtggcaaatgagatttatcaggagggcggagccggggaaaatactgtggccgcagttctttcgggaatccgccatctgctggaacaggcgggaaatctggtggtcgtgacgaacgaggtgttttccgacggtatcacctacgatccggagaccgaaaaatatctggaaaagctgggtgcgatcaacggtcagatggcacagctggcagacgcagtcacggaagtagtctacggaatcccgatttctcataaaaagacaggtgaggagagaaaaaatgaagaagttttatcatagttttctgatcgcattttcgatgtactcgaagatcccgatgccgcagtgtgaatggaatgaggaaaacatggcgtatgcgatgtgtttctttccgtgggtaggtgtcgccatcggcggtgtcacctggctgtggggaacattcggggcgcggctgggactttcagcagctttttataccgtgatcctgacattgatcccgtggctgatcacgggtggaattcatctggacggactgttggatacggcagacgcgatgagttcctggcaggagcgggatcgccggctggagatcctgaaagattcaaattccggagcgtttgcggtgattacgtgtgtggtttatttcctgttctactacggcgtatacagccagatcagtacacgggcgcttgcgatgattccgtttacgttttgtctgtcacggacgttaagcggactggcggttgtgacattcccgaaagcgaagaagacgggatcggtatcagcgatggcacgcggagcgaaggatcagagagtgaaggttacgatgtgtgtgtatctggtggtgctgttgatcgggatgctgctggtggactggaaggttggacttctggtgtatgcgatcgcagggctggtttatgtgctttattatcggaatgcgatgaaatattttggcggaactaccggggacctggctgggtgctttttgtcgctttgtgaggtgtttatggcttgtggggcagtgcttggtgcgctctggttttaaaagatgagattgaataactgtatagtaaagtaaaaggagaaccaacaatgaaattagtaatcggcggtgcttatcagggcaaacaatcttacgcatcgaaaacatacaacctgaccaatcccgactggaaagacggccagacctgcacgatagaagatctgaaaacagcaaaagcagtccatcatttccactccttcatccgcagagaactcgacgaaggaagatccgtccaggatctcgcagaaacaatatggaaagaaaaccccaatctgctcatcgtaacgaatgaggtaggctacggaatcgtcccgatggaagcgaaagaacgggaatggagagaagcctgtggtcgtgtctgtacgaaactggcggcttatgcggatcaggtaacccgtgtatgctgtgggcttggaacacgaatcaagtgagaaaagg

SEQ ID NO: 2532 - DNA, 987 bp, Unknown
  gut microbiota DNA sequence
ttgtcgtttctttcctgcacatagatctgatcgatcagggctgctactttatctgcggcctcctggtcagatgcactgtcgtctgttgcttcttctgttgcttcttctgtcggctctgcttcttctgtggcttctgcatcctttgttgtttctgttgttgtggatgaactgtcatcctttgctgtgtttccacatcctgtcatcatggacatggtcatagctgctgaaagcatcagcactacaattttctttttcatctcatggttcctcctgtctttgtccttttgagattgtgtaccacggtggtacaggacggctctccgaagaaggttgtctggggtcctgcccgcatgaaacgtaaaaaacctccgtccggagacgaaggtagtaggtactacatttggaattcttcttatagtttcagaatcagtttcagggataccagaaccgtttaacggttatagatgtttctttcaccataagtgccggaaaaaccatttttatacaagcaaacaggtttttctttcgtactgccaattcctcgtggcctgaactttcgttcccgtactgcgcaaaggcaggtctcccggctgatcgctcaagcggttcgacaccttcccggtttcccagtggtttttgtcttccctcgcgaatcacggtgacgagttcgtacaggattcacacctgtttcccttttcaccggattaacagaaatcttctgtcatccgacaccttacgcttttctatgtggtcgatattcggtaatttttaccgttatctttttaacagaatgagtatatcattctacgtgcatactgtcaatcattattccgtgaccgttggaaaaactcacgaaaaaaatacaccggatgctgtgctgtctgctctcacaccgtttttcaaaatataatttcaaatatactccgtgctcacagaaaatccgctggacaccagcggattttcccttattctcgttctttatttgtg

SEQ ID NO: 2533 - DNA, 50706 bp, Unknown
  gut microbiota DNA sequence
atgagtaaataaaaaagctgctgcatactctgtatgcaacagctcagatgccgctggccggactcgaaccggcacggctgttaaccgcttgattttgagtcaagtgcgtctgccaattccgccacagcggcatggaaaatggtttattaaaaccgaagtctatgatatcatatcagtgaataaaaagcaagtattttctttttgcatcgaaagtaaacagtaaaaaaggatttcctcttgtatcggagaaagggagcagatataataaaaagacagagctttttacatagaaatagaaaaacgggggagaagcgatggcaggacagacaaactgtgagagttgtgcaaattacgtatacgatgaagaatccgattgctactgctgtgaagtagatctggatgaagatgaaatgtaccggtttctgagcgataccttttatcagtgtccatattatcagctggatgatgaatatcggatcgtgagaaaacaaatgtaaaaaaagaataaagtctctgtttcggtttgacaaacaaaagattgttcattagaattgaaagatagtggtaactgtgaagaaagaaaacagttacagaaagtgagaaaaagaaacagggagaacggaggaaaattatgtatcaatatcaggatcagaaagaaatgcgccgggcactcaacagcaagatgatcattatgctggtcggaatcatgctggtagtgacagcgttgacatccagcctgtcttacggtatgcgctgctggtcaatggcgggtatggcagacggcggcgacaaagatattctggaggcattaaaacagatcggtatcacaagcggaacgcttcgtatctgcagcgtgatctattatctgcaggcagtgatcgaggtatttgtaggagtcttctgtgcacggctgagcaaccgtctggacaaaaatgcacttctgtggaagatggcatgggtgattctggttgtggaagtggcagcaggtgtcgcattgacactgcttcatatgacgagtgcgattatgattgtttctaatctgctgttaccgggatttttgttatgggcagtcaacagtctgagaaaagtagcgaagaatcatccggatcgtatctatgcggtggaaccgaataaccggaacaagggaaaagggaaagaaaaaggaaaagcaaaagcttccgtacagccggcaaaagcaggtcagaaaaaaagtctgatggagcatgccactcaggtgacaccggcagatatcacaccgctggaactgaccagagaactggaaaaagccggagagagcgccggggctgatccggaaacagcagcagaagatacggttgcggaagaaaatgaacaggaagaagaaacttcggagaagacagaagaataaaacagaaaatcaaaatccctgcaagccggaaagccaccggcgatgcggggatttttgcaatagaaagaaggcgagacgatgcgattttttcatttatccgatctgcatatcggaaaacagttatacggttattcactgctggaagatcaggagtgggtattgaacaaaatttatgaactgatcgataaagagcggccggacggcgtcctgatcgcaggggatgtctatgacaaatccgtgcctgcggcggaggcagttaccgtatttgaccggtttcttactaaggtaagtcagctggaaccgaagattccggtgctgatcatcagcggcaatcacgattccccggagcggctgtctttcggggcagagattctgagccggcagcaggtctatgtggcgggcagctgtccacagtcagaaaacgaacatctgaaaaaagtgacgtttcaggatgcgtggggcgagacggatgtctggatgctgccgtttgtaaagccgggatatgtgcgaaaactgatggaggagagcaggaaaaaaacggacagagaagacggagcagggcagggaagcgacggctcccaggaggcagatagagagccggaaaccgaaagggaagagatccgcagggattataacgaggcggtaaaatttcttctcgaaagggagaacatcgacactgccaggagaaatatcctgatttcgcatcagttctacacagcaggcggggagataccaaaaaccagtgattccgagacgataacggtaggcggactcgatcaggtggataccgcgtgtctggcaccattttcctatgtggcgctgggacatattcaccgtccgcagtcgatgggaagagagagcatccgttactgcggatcgatgttaaaatattcggtcagtgagtgggcacaggaaaaatcggtgacggaagtgatcctggaagcgccgggacaggaaccggtcatccggctgcatccgctgaaaccattgcgcgaggtatgtgtgatccggggaaccctcgaagaaatcctggaagccaacaaagaccgcgtcagtgaggattatgtcagtatcgttctgacggatgaacaggaactgtatcagccgaaggaacagctggagcggatctttacgcatattctggaagtgcgtacggagagaaactggaaacttgcgaaagaatgggaggacggacaggaagaggagacacagacagatccgaagctggtctttgaacagttcttctcccagatccaggggcggcagctgcttgaggaagaggcagaagtgcttgaagaagtatttgcgaaagtcagggaggatgaaggatgagaccgatgatactgacgatgtccgcatttggctcctatgcggactgtgtgacgatagatttcggacaggtacagcagggcgtatttctgatcaccggggataccggggcaggtaagacaacgatctttgacggaatcacctatgcactgtacggacagaccagtggaggacggagagacggaaccatgatgcgcagccagtatgcgccgagcgggacaaaaacgtacgtggatctgacattttccaccggcggacaggtctggcgggtgcttcgaagcccggaatacgagcgagagagcaaacggcggaacaaagacggcgagcggacgatgacaaaggagcggggcagtgtggaactgtaccagccggacggcggtctgtatccgggaaccagacaggaggtcaatcggaaactggtggagatcctcggggtggatgccagacagtttatgcagatcgcgatgatcgcgcagggggattttctgcggctgttgctggcaaagtccgatgaacgaaaagaaattttttcccggatctttgacacccggatcttcggtcgtgtgcaggaagaactgaaaaacagaagcaaacggtgttacggtgaactggaagacaaccggaagctgtgtctgcgggaaatagaacagctggaagtttcagaaagtacggcgcaggaaaaggaagaacttctgagaaccgggcagaaagaaccggatctggaggcagtgcttgcctttgccgagcgtttactggaagaagagaaagcgcagtatgaacagagccaaaaagagatgaaaaaaacaactgcggtgctggaaaaactgaatcagcgctacagtgtggaaaaagagcgggcgcagagttttgcgaaacttgcgcagctggaaaaacggctcggcgtactggaagcggagagagaggagaaagatcaggaaaaagaacgaatcggtgctgcaaaacgggcggcaagagtagagacggtctatgcaggctaccgtgaggcggcggagagcagaaaacgggccaagatgcaggaaaaacagctggaaggatggctggaggaacggaaagcggaaaccggaaaactgaaagagaaagaggaaacatggagcagctatgtaaagaaactggaagaaaaagaggtgccggttctcgaacggctgcgacaggcactcgaacagtatggacagctccagagtcatctgaaagaggcagaacgtctggaaaaacacagacagcaggaggcggaccgttaccggagggcagatcgcgcttaccggcagcaggcagagcgctacgaggcactgtatcaggaatatcttgccggacaggcggggattcttgccgcacagctgaaagagaatgccccgtgtcctgtctgcggctcgctgcaccacccttcccccgcgaaacggcctttggcaaatctgagccaggaactggtggaaaaggagcgggaacgccggaatcaggcggaaaatgaccgggaagcgtgcagacagaagtaccaggagacagaaaatcgctatcagcaggaaatggcggttatccgggaacagcagatgcgcctgttgcagagggaacagaacgaagaagaaagcctggaagtgatgaaaaaccgctgggaagaatgggaagagaaagccaggaaacgactgaaagacggggaagaaaaaatccagatttcgaaaaaagaattggatcgagccacgcagagcctgcaaaagtttttacaggaagagaaccggaaaaaagggcagctcgaagaggtacagcgacagtgtgagattttcaaagagcaggaaaaagaaaaacggacagcttatgaagcaatgcgaagcgagcaacagtttgagacggaagaggattttcagaatgcatgcatgaaatctgcagagctggagcgccgggaaaaagtgctggaagcctatgaagaacagctcagacagagccgccaggaagtggactggctgagacagcagctgaaaggaaaagaaacaccggatcttgcacagacggaaagtgagctgaaagagcaaaaagaacagcagcggatgcaggagagagaactccgaaaactgtacagccgcagagagacgaatcagcaggcggcccggaagctgcaacagctgacaaaggagagggaagaactgcgaaaacggtatcaggtgttgaatacgctcagccgtaccgccaacggcagtctcgccggtacagcaaagattgatctcgaatcgtatatgcagcggcagtattttcaacagatgatccgctgtgcgaaccgtcatctggaacggatggcagccggacagtttttgttaaaatgcaggagcctggaaaacctctctactcagggaaatgccgggctggatctcgatgtgtacagcctgatcaccggaaaggtgcgggatgtcaagacactgtccggcggggaatccttcatggcggcactggcgctggcactcgggatgacggatgtgatcacacaggctgtgggagccgtccacatcgatacgttatttatcgatgagggatttggctcgctcgatgaaaatgcgagagaacaggcaatccgcatcctgcagggactttccggcggcagccgcctggtgggaatcatttcccatgtgacagagctgaaagaacaaatcgagcaaaagctggtggtgacaaaaggaaaatccggcagtaaagtcgagtggaaataagaaaaagacctatgcagaccgcaaaatttgtggtactgtttttaatatggtctgcaaagacaaaaagtagttatacagcagaaaggggtaagaatcatgagacagtatcatgagacagaaaaaaatgagatccagaaactggcaaagatgtaccgggaatttctggatgcaggaaaaacagaacgggaatgcagcagcaatatctgcagaatcgcaaaagaaaatggttttgaaaatctggaggatgtgatccgtgaaggaaaacagttgaaagccggagataaaatttacgcagaaaatatgaaaaaatccgtgatcatgatggagatcggaacagatgatatcgaaaacggtatgctcctgatcggttcccacatcgattccccacgtctggatatcaaacagaacccgttgtatgaaaacggtggtatggcatatctggatacccattattacggcggaatcaaaaaatatcagtgggtagcttctccgatggcgatccacggtgtgatcgtaaaaacagacggaacgaccgtgcaggtaaatatcggtgagaaaccggaagatccggttgtcggtgtgaccgatattctggtacacctgtccgcaaaacagatggagaaaaaaggaagcgttgttatcgaaggcgaggctctggatcttctggtaggcagccagccgatcgataaaaaagaaggcgaaaaagaggaaaatccggtgaaagcctatgtgctgcagctgttaaaagaacagtacggtatcgaggaaaaagattttgtgtccgcagaactggaagttgtaccggcaggagcggcaagagatttcggtctggacaacagcatgatcatggcttacggacaggatgacagaatctgtgcctttacctctctgatgggattcttacacagtaaaccatccgcaaagacaaaagtatgcctgtttgtggataaagaagagatcggaagcgtcggagcaaccggtatgcatgcgcatttcctggaaaataccgttgcagaagtgatcaacagcctgggtgcatattcagacctgaaactgcgtcgtgccctgaaaaactccaagatgctgtccgcagatgtcaatgccggatacgatccgctgtatgccgaagtatttgaaaaaaataactccgcatatgtgggaaaaggtgcagccatcagcaaatacaccggttccagaggaaagagcggttccaacgatgccagtgcagaatatctgggaagcctgcgaaaaacctttgacgatgccaatgttgcatatcagaccgcagaacttggaagaatcgatgcgggcggcggcggaacgatcgcttacatcccggcagcttacggtatggatgtgatcgatatcggtgtgccgatcctgaacatgcatgcgccgtatgaggtaagctccaaggcggatgtatacgagacaaccaaatgctacaaggcattttatgagatgtaaagaaataaagaagaaataaaaaaagatataaaacagaggctgtggtgcgtgccggaaagaccgtacaacagcctcttgtgtaaaaggaagaggaagatgacagaccaaactgcttacttaaatctggtactagaaaaactgaacgaacgaatcgcaaagctgaatctgtccctgcaagaaggggcaaaagaagtggaagatatgcacgaatattactgggaaaactatacggagatggaccagtacggatatgaggattatgataatcagcaggccctgttgaatcagctgaacacaaaccagcagcagatgcatctgaagcaccggtttcagaaaatgctggattcccctttctttggaagagtggatttttgctatgacggagaggacgaggcggaaagcttttatatcggcatcggaaacttcgccgagagaaccggacagacgcctctggtctacgactggcgggcaccggtcagcggtctgttttacgattttgaccggggagaagcctggtatgaggcgccgggcggacgtatggacggggaaatcgtctccaaatggcaatataagatcaaaaacgggaagatggtgtacgctttcgagagtgatgtgaagatcgatgatgacatcctgaaagcggaactgggtgcgaacggggatgttcagctgaaaaatatcgtgcgcacgatccagaaggaacagaatgcgatcatccgcaatacgagcgaccggatcctggtgatccagggagcggcgggaagcggaaagacttcggtggcacttcatcggattgcgtatcttttatatcatgaccggaaaaacctgaaatcctcgaatattctgattttatcgccgaatggtgtattttcggattatatttcacatattttaccggaactcggggaagaaaatattcaagagatgagttttgatctctttgcctaccgggaactgaaagatgtggcgccggactgcgaagaccggtatgatatgatcgagcggaatcttgcgcatcccaaggaacggggacggtactgggaaaaacagtctccggatttcctgaatcagatggaaggatacctgatggagctggaagacagtctgatggatatccgggatttcacctatcgaaactatgagatcaaagcatcccggattctgacgctgttttacacccgttttctggagattccgctgttatcccggatggatgcggtgcgggagtatgtggtggatgattatgagacacttgccggacgtgatctgaacgaggaagagcagcagtatttttacgatcagttcatggcgatgtatgagacgagagatatctatgtactctacagccgttttctcgaatccatcgggatgcgtccgcttccacgggtgtggtatgagaaacggatgctgcggtatgaggatgtctacccggtactctatctgaaataccggctggtgcagcctgcaaaacgagcgggcgtcaagcatctggtgatcgatgagatgcaggattataccccgatgcagtaccagatcctggcaatgttgtttccgtgtaagatgacaattctcggagataaggcgcagacgatggatgaaaaacagcaggatgtgctgaagtttttaccggggattctgggaaagaaacttcgaaagatcgtgatgaacaaaagttaccggaatacggtggagatcgccaagtatgcggcggaacttgccggaattaccgatctagagctgtttgaacgtcacggaaaaccggtcgtggaagaagtattttggaatccggagaaagcggtgaaaaaaatcgcggagcacctgcgggtgcagccggatggctatgaaactgccgcagtgctcaccatgacggatcaggaagcctgggagctggcaaaagccctgaaagagcggctgggagaggattcggttacctatatgaacaaagacagctcccgtttcaaaaagggcatcacagtgacaacgttctatctcgcgaaaggactggaatttgatcaggtatttaccgtctggggacggcagccggaggacgcactgatccggcaggcgaaatatatctgcgcgacgagggcgctgcatgagctgtatatgtatcaggttgcgtcaggagaaaaacaggtataaagaaaaaggatatcacagccagaaaattactggcagagatatcctttcttttctaactcctgcccgatcagatcgagtgtctcattggaatctgcggagacggtgtgataatggtatccggaggtgacatcttttaacggggtagatttgccgctttttaattcttccagaaagatctgtacatctctgcgggaagagatatgcaggggtgcctggatctgtccgtagattttatggtggacaaagacatcctccgcagtaccgccaagatccacgatggtgcataactcatcggcgatctgctcgctggtgtgaaaaactttgaaaatacgggagacacgaagcggtgcctggatcagatagccgcggttggtggaaagcacttcatgtccctgcgcgcgaagcagagccatgtcctgcacgatcacctgacggctgacgtcaaaatgttttgcaagtgcagtcccggaaagcggtgtctgcgttccggataaaagttgtaataattcctgtcggcgttcgctgcctgtcatgagatccctcctgtcgtaaatattctataaaagagtatatgccagaaagaaaagaatttccagccatattttatgagaaatttataaaaattttctgatagttttcttgcaggaagtatttcccaaggtataaaataaagcacatgagaaaggagacgaagatggatatgaatgaaatcaagaataattcgcccaaacggccggtgatcttttattatgcgatcgcgctgatcgtcctgctggcactgaattttattctggtgccgtggatgagcgagcggagtgtagcagagacaggctataacgaatttttaaaccaggtcagtgcgggtaatgtaacagaagtagaagtacaggagcagaactccgtcatctattataaggttaaggtaaatggcaaagagcagatctgcaagaccggaacgatgaatgatccggagctggtggatcgtctgaatcaggcaaatgtgaaattcggttctgtgatcccacagaaacagtcggtgctgggaaccctgatcttcagctgggtgatcccgatcctgatctttgtcctgatcggtaactggctgtccaagaaaatggcaaagagcatgggcggaggtccgggcagtatgatgttcggaaagagcaacgccaagatttatgtaaaatcatctaccggtatcaagttctctgatgtggcaggtgaggatgaagcgaaagagctgctgacagagatcgtagattatctgcaccatccggaacgctatcaggatatcggtgcacagatgccgaaaggagcgctgctggtaggccctcccggaaccggtaaaaccctgcttgcaaaagcagtagccggtgaggcaaacgtaccgtttttctccatctccggatctgagttcgtggagatgttcgtaggtatgggtgccgcaaaagtgcgtgacctgttcaaacaggcgaacgaaaaagcaccgtgtatcgtatttatcgatgagattgatacgatcggtaaaaagcgtgacggcaatatcggcggcaacgatgagagagagcagacactgaaccagctgctgaccgagatggatggatttgacggttcgaaaggtgttgtcatcctggcagcgaccaaccgtccggattccctggatcctgccctccttcgtccgggacgttttgaccggagaatcccggtggaactgccggatctgcagggaagagaagagatcctgaaggttcatgcaaagaagatcaagattgcagacaacgtagatttcagcgcgatcgcgaaagcggcagcaggagcttccggtgcggaacttgccaatattgtcaatgaggcagccctccgtgcggtcagagatggcagaagatttgccacgcaggcagatatggaagagagcatcgaagtggttatcgccggttatcagaagaagaatcgcgtactttccgagaaggaaaaactgatcgtatcctaccatgagatcggtcatgcgctggtagcggcaaaacagacgaactccgcaccggtacacaagatcacgattatcccgagaacttccggagcacttggttacacgatgcaggtggaagacggcgaacattatctgatgaacaaagaagaactggaaaacaagatcgcgacctttaccggtggacgtgcagcggaagaactgatcttccattcgatcacgaccggtgcttccaacgatatcgagcaggcaaccaaactggcaagaggcatgatcacacgttacggtatgagcgatgagttcgatatggtagcaatggaaaatgtcagcaaccagtacctgggcggcgattcttctctgaactgttcgttcgagacacagacgctgatcgacaaaaaagtggtcgaactggtaagacagcagcatgagaaagcactgcagattctgcaggacaatatcatgaaactgcatgagctggcaaaatacctgtatgaaaacgaaaccatcaccggagaagaattcatgcagattctggaaagacaatagaaaaagccctttaattcttaaaaaaaatgtggtaatatgaagattatatcagagcgtgtctggtttcaggcacgctccattttgaattgaggaggagcgtaatggaaaaagaagtagtttccaagaactttattgaacagattatagaaaaggacctggcagagggaaaatacgagacaatctgcacccgtttccctccggaaccgaacggatacctgcatatcggacatgcaaaatccattctgttaaactatggtctttctcagaaatataacggaaaattcaacctgcgtttcgacgataccaacccgacaaaagaaaaaatcgagtttgtagagtccatcaaagcagatgtaaaatggctgggagctgactgggaagaccgcctgttcttcgcatccaactattttgaccagatgtatgaagcagccatcaagctgatcaaaaaaggaaaagcatttgtctgtgacctgacagcagagcagatccgcgagtaccgcggaaccctgacagagccaggaaagaacagcccgtaccgtgacagaagcgtggaagagaacttggatctgtttgaacggatgaaaaacggtgagttcgaggacggaacgaaagttctgcgtgccaagatcgatatggcatctccgaacatcaatatgagagatccggttatctaccgtgtggcacatatgacacaccacaacaccggagacaaatggtgcatctacccaatgtacgatttcgcacatccgatcgaggatgcaattgagggagttactcattctatctgtacgctggaatttgaagatcaccgtccgttatacgactgggtggtaagagaactggaatatccatatccgccgaaacagatcgaattcgcaaaactgtacctgaccaatgtggtaaccggaaaacgttacatcaaacgtctggtagaagaaggcatcgtagacggatgggatgatccgcgtctggtatctatcgccgctctgagaagaagaggatttacaccggagtccatcaagatgtttgtggaactgtgtggtgtgtccaaggcaaacagctccgtagattatgcgatgctggagtattgtatccgtgaagatctgaaactgaaacgttcccgtgtaatggcgatcctggatccggtaaaactgatcatcgataactatccggaaggtcagatcgaagagctggaagctccgaacaacatggaaaacgaaactctgggaaccagaaaagtaccatttggcaaagaactgtatatcgagagagaagactttatggtagaacctccgaaaaaatacaaacgtctgtacccaggcaacgaagtacgtctgatgaacgcatactttgtaacctgcgtcggctacgataccgatgaagagggcaacgtaacagccgttcactgtacttacgatccggcttccaagggaggcaattctccggacggaagaaaagtaaaaggaaccattcactgggtaagcgcccaggataacgtacaggcagaggttcgtctgtatgaaaatatcatcgatgaagaaaaaggggtatacaacgaagacggttccctgaacctgaatccgaactccctgaccgttctgaaaaactgctatgtagagaagagcctgaaagatgccaaagcatacgacagcttccagttcgtaagaaacggattcttctgtgtagatgcgaaagattccaaagaagacgcactggtattcaaccggatcgtttctctgaagagttcattcaaactgccgaaatagaaaaccaatggggacggagaaaagtggctttttgccacttttctccgtccccattggttttcagcaattattcttcggttgttttttcagaatcggtttcttcgctttcgccagtttcggcttcttcttcggtttcagcctcttcacttttttcttcttcctcatcctccggaaccggagtatcggaaggaatggtggtgtagctgcggcatggtgtgcagctgttgacttccggatttttttcttcttcgtcgtcccacaggtcgtcgaagtcttcttctccgaggtcattgacttctttgcatttttttacatatgcgaaagcagcgcccagagcagcaccggcaacggcgatgccggtaatggtttttaaaagttttttattcatttgcgtcagtctccttttttcgtactttccaatcaggtgatattctgtaactgtaaagatgaaagatactgaacagttacgatatttgtatctattttaatccattttacagtaaaaggaaagggttatttttacagagtgtttttgcttgcactgggtggtggcaggaagtataatgaaagaaatctgagattgttgtccgaaaagccggataaaaataaaacaatggcagatggtgttgaaaggaagaggactggaatgtataaagcttgtatttttgatctggatggaacactggcggataccgtggaatcgattgcaaatgtggcaaatcagattctggaacgttttggagcgccggcacagcctgtggaggactataaatatcatgccggtgatggcgggaatgtgctgatggagcggtgcatgaaagctgcaagagcagacatgagtcatctggaagaaggtcagagactgtaccgtgagatctttgccgaaaatccgttatataaagtcacggtatttgacggaatgaaagagacgctggaagaactgaaacgcagaggcgtaaagctggcagtgttatctaataaaccgcatgaggcggcctgtctggctgtgacaggattgtttggaacagatacctttgaggtgattcagggactggaagtggggatgaagaaaaagccggacccatccggagcactgaaaatagccaaaaaactgcaggtggagccgtcggagtgcatgtatgtgggagatacgaacacagatatgaagaccggaaaagcagcagggatgtatactatcggtgtcctgtggggatttcgggaccggaaggaactggaagaaaatcatgcggatgagattatcgatcacccgaaagcattattgaagatacaggaggagaaataaatgtatagcaaagcgtgtgtggaaacttttttaaaaaatcagggacagctttttgatgagccggtggcagagacttacgaggaagcagaagaatttctggaagaatgtatggctgccgtggtaaaaaatatcaaagaagtaaaagaatatctggatgagagcggtatggacgtggaaggcatgagcaaagaagaactgcttgaagccagcgagatcttccctctgccggatggaacgtatctgatcgtggaaggataatacaacgaatatgaaagaacggatacacagaatgaaatggttttctatgtgttaagaatccataaaacgaaacttaaaagaagattaagaaacctcccgtctgtttctgaagatttgtctgttaggatatttgtcagagaaattcaagaggacgatgcagcaggaaaaggctgtatcgttactattgcattgcatatcaataattggttcagtggatcaattttgattcggaaaaatgggaggtttttttatgaaaagaaaagagtggacgatgggactgtattttgtgtatctggcatttgtggtgtgggtgatcctgctcaaattcaacatcacaccggcggatctgccgcatcttcgaaatatcaatctgatcctttatggcgattccgggatcataaacggacaattggatgtgtgggaactggtggaaaatatcctgatttttgtaccgtttggtgtctatgccggtatgctggtgaaagagagatcctggtggaaagtgatccttgccggtgcgggattcagcctgattctcgaaactctgcaatatgtgttcgcaatcggggcaagtgatatcacagacgtgatcaacaatacacttggggcagctcttggtatgcttttgtggaaaggatttcatcggatcgcaggagagagaagctttatgatcgcacaggtcatcgcgacgatcggaacagtcggcatgatcggaatgagtgccctgctcctgatcgcaaatgcatagccgtacatcgatatatatggaaaaaatcagacaaaatgtatacgcatgttggatttttatttaaatatttgtaaaagacattgaattctaaaacggatgatgctacactaaatgagatataagaattaaagtaactattcagtagggaatattccgcgaggtgttttggcatgaatatgccaaaatcccgagacctgtaagccaaaatgccatcaccgaaggtgattttaaatgcattttggctcgtaactgtgaaggtactgaacagttacgattaagtttctttaggagggaaaagcaaatgagaatcttagttacaggtggagctggttatatcggaagccatacatgcgtggaactgctgaatgcaggttacgacgttgttgtagtggacaacctttataacgcaagtgagaaagctctggacagagtagaaaaaatcacaggaaagaaagtagtattctacaatgcagacatccgtgataaacaggcaatgaatgacatcttcgacaaagaaaaagtagatgcagtgattcattttgcaggtctgaaagcagttggagaatctgtagtaaaaccaatcgaatactatgaaaataatatcgcaggtaccttgaatctctgcgatgccatgagaaatcacggtgtaaaaaatattatcttcagttcttccgcaaccgtttacggagatccggcatttattccgatcacagaagaatgcccgaaaggaacctgtaccaacccttatggatggaccaaatggatgctggaacagatcctgacagacctgcacactgcagatccggaatggaatgttatcctgcttcgttacttcaacccaatcggagcacataagagcggcatgatcggtgaagatccgaaaggaatcccgaacaacctgcttccgtatgttgcacaggttgccatcggcaaattggaatgcctgggagtattcggtaatgactatgatactccggatggaaccggcgtacgtgattacatccatgtagtagacctggcagtaggtcatgtaaaagcactgaagaaactggaagaaaaaccggaagttcgtgtatacaacctgggaacaggacatggctacagcgtactggatgtggttcacgcatttgaaaaagcatgcggtcatgaagtaaaataccagatcaaaccgagacgtgcaggcgacatcgctatgtgctactgcgatcctaccaaagcaaaagaagagctgggttgggaagcacagtacggcatcgaagagatgtgccaggattcctggagatggcagagccagaacccggatggatatgcaactgaagaaaaataatatagaaatgtaatacatatagcccccggttttcctgtggaatgagaaccggggactgttttttatttacgcgagtaacgagtcaaattcgcaaagcgtattttatttcgtttacgcgggcaacgagtccaagattgcacttactggaaacgcaaatatttgttgagaaaagtgaaaagagaagccggaagaggaacatttaagtttcctttcggcttctctttttgaaatatatttaccgttatttacgcattatgaagaatcgatttatgctcataaatcgattcgcttgtcagctggataccgaggcgtttgaaggtctggatatccacctgtgacagcatcacgcttgtgtgtacctggcagcctttcaggttcgggatctgatcgagggctttctgtgcagccggattcagcgcggtactgctggagagagcgatcaggatctcatccgtgtgcagtctcgggttacggcttcccagataagcggttttcaggatctggatcggttcgatggcagccggggaaagaatatgtgtctcatgggagatgcctgccagttctttcagtgcattcagaagcagggcagcggatggtcccagaagatccgaagtttttccggtgatgatcttgccgtccggcagttccatggcagcagccggtgcaccggtctgttcggcacgttccatggcagcaccgacaactttacgatcctgcggtgtgatatgcgcctgtttcatcagcagttccagtttgaagacttcgtcttctttcttggagccgtctaccagacctgctttcgcctgataataacggcggatgatctcctgacgggaagcctcctggcatacttcatcgtcgatgatgcagtttccagccatgttgacacccatgtctgtcggagatttgtaagggcactcgccgaagatccgttcaaacatggcttcgagtaccgggaagatctccacgtcacggttgtagttgacagtggtttcgccgtaagcttccagatggaacgggtcgatcatattgacatcgttcaaatctgcggtggcagcttcgtatgcgaggttaaccggatgttttaacgggatattccagatcgggaatgtctcgaacttcgcataaccggcgcggacgccgcgtttctgttcatgatacagctgggacaggcaggtagccatctttccgcttccaggtcccggcgctgtgataacgaccagaggacgggtggttttgatgtaatcattctttccatagccttcgtcgctcacgatatgagaaacattgttcggatatccgtcgatggaatacagaatgtataccgggatattcagtttttccagttttttcttgaaggcatctgcacttttctgaccggtgtactgggtgatcgcaacgcttcccacatacagaccttttccgcggaatgcctcgatcagtcgcagcacatccacatcataggtgataccgaggtccccgcggactttatttttttcgatatcgccggcgctgataacaacaacgatttctgcctgatcagaaagctgcatcagcatctgcagtttgctgtccggtgcaaaacccggcagtacacgggatgcgtggtaatcatcaaaaagctttcctccaaactccaggtagagcttgttgtcaaactgattgatacgttcccggatgtgctcagactgcatggataaatatttttgattgtcaaatccgattttcatctaaccttgtcctcctgtataaaaaataaagataactgttctgtgtttttttaacaccgcctatcggacagttataaaaataaaaattcattccctagtatactacaaaaacagcgagaaatgctataaagaaatgaaaaaaatacaggaatttgaaaattcggtgacgaaagagggaaaagagttgatttatcataaagaaatctttataataatgaaggtattagaaggaggaaattatggaccaaagaccgaataattataatgatcaggggtcgaacggacaggaaccgaatggaaatggcggacccggaggcccaaagaataaatcatctctgctggtgctgctgatctgcgtactggcaaccctgctgatctggacagtgttcagcaatattttacagagttccacatcgaaagagatcacttatgacaaattcctggagatgctggataaaggagaagtcaagtcggtagaactgcaaagcggtgtactgacgatcgttccgagagaacagaaagtggaaggtgtggaatttgaatattctaccacagcgatggaagacggcaccacactgacagcgagacttctggaagcggaacagaaaaccggaaaagagatcacattcaacgagatccagccggatccgaccggatcgatcatctatacgattttaagtctgctgataccgtttgtatttctgattttcctgatgaactggctgatgagaaagatgaacaaaggcggcggaatgatgggcgtcggaaagagcaaagccaaagcctatgtacagaaagaaaccggtgttacgttcaaggatgtagccggtgaggatgaagcgaaggaatccttgcaggaagtggtggatttcctgcataatccgggaaaatatacgacgatcggtgcaaaactgccaaaaggagcccttcttgtaggacctcccggaaccggtaagacactgcttgcaaaggcagttgccggagaagcacatgtgccgttcttctcattgtcaggttccgactttgtggaaatgttcgtcggcgtgggagcttcccgtgtccgtgatctgtttgaagaagcgaaaaagaacgcaccgtgtatcattttcattgatgagatcgatgcgatcggtaagagccgtgacagccggtacggcggcggtaacgatgaacgggaacagacactgaaccagctgcttgcggagatggatggttttgattcatccaagggtatcctgatcctggcggcaaccaaccgtccggagatcctggatccggcgctgcttcgtccgggacgttttgaccgtcgtgttatcgtggaacgcccggatctgaaaggccgtgtcaatatcctgaaagtgcatgccaaagatgtgtctctggatgaaaccgtagatctggatgccatcgcactggcaacttcgggagctgtgggttccgaccttgccaatatgatcaatgaggctgcgatccttgccgtaaagaacggaagaaaagcggtttctcagaaagatctgtatgaggcagtggaagttgtactggtcggtaaagaaaagaaagaccggatcctcagtcaggaggaacgccggattgtgtcctaccatgaagttggtcatgcactggtaagtgccctgcagaaagatgcggagccggtgcagaagattacgattgtaccgcgtacgatgggagcactcggttatgtcatgcatgtgccggaagaagaaaaatacctgaataccaaggctgagttagaagcgatgctgataggtcttctcggcggtcgtgccgcagaagaagtggtatttggcaatgtgacaaccggagcgtcaaatgatattgaaaaagccactcagatcgcgaaagcgatgatcacccagtacggtatgtctgaaaaattcggactgatgggactggcaagcgtggaacatgaatatctgaacggtcgtgcaacgctgaactgcggcgatgcgacagcgacagaaatcgaccacgaagtgatgaagatgctgaaagaatcctatgagcaggcaaaacagctgctctctgaacaccgcgaaacactggataagatcgctgcgttcctgatcgagcgcgagacgatcaccggaaaagaattcatgcagattttccatgaggtggaaggtacagcggaaacgcagccggaactgccagaaaaacctgcagaaaaagcaccggagaaagcggatgcagaaccggtggcagaaaccggagcacaggatgtatcagcggatagtaacgatacagaagaaaagaaggtacaggagccggtgaatgagaatccacaggagtctccagtacaggaataaaaagaagtgacagaataaggaaaatggaacaggaaactgccccattttccttttttcaaaagcagagatctgataaagagagaaagaagggaaggatgcgggaatgtttgatattcaggaagaactgaagaaattgccgggaaaaccgggcgtctatatcatgcacgatgcgaaagatacgatcatctatgtgggaaaagcgatcagcctgaaaaaccgggtgaggcagtatttccagagcagcagaaatctcggggtaaagaaagagcagatggtgcagcagatcgcgagatttgagtatatcatcacggattccgagttggaagcactggtacttgaatgtaatctgatcaaagaacaccggccaaaatacaatacgatgctcaaggacgataagacctatccgtatctgaaagtgacggtcaatgaggaatatccgcgggtactgtttgtgcggagaatgaaaaaggataaagcaaaatatttcggaccgtatacaagttccaatgcggtcaaggactcgatggaactgatccggaagctgtaccatgtccgtacctgcaaccggaatcttccgcgggatatcggcaaagaacgtccctgtttgtattaccatatcaaacagtgtaaagcaccgtgtcagggctatatttccaaagaagagtatcagaaacagatcgagggcgtgctggattttctgaacggagattacaaaaagctgctgaaagaactggaagaaaagatgcttgcggcgtcggaagaactgcggtttgaggaagccggggaataccgggatctgatgcagagtgtgcagaagatcggtgagcgccagaagattaccggaagccagggcgaggacaaagatgtgatcgcgatggcgatggatgaggaggatgcggtggtacaggtcttctttatcagagagggcaagatgatcggaagagatcatttttatctgcggatcgcagcggatgccacaccgtcacagatccttctgaactttgtcaaacagttttatgcgggaacgccgtttatcccgaaagagctgatgctgcaacgggagattgacgagattgatgtgctcgaagagtggctcagtaaaaaacggggacagaaagtccatatccgggtgccgaaaaaaggaaccaaggagaaattggtggagctggcggcacggaatgcacggatggtactgacacaggacaaagaaaagctgaagcgggaagagggcagaacgatcggagccatgaaggagatctgtgatctgctggaactggagagtttacagcgagtagagtcctacgatatttccaatatcagcggttttgagtcggtaggttccatggtggtctatgaaaagggaaaaccaaaaagaaacgattaccgtaagttcaagatcaaatcagtacagggaccggacgattacgccagtatgcaggaagtgctgacccggcggttccggaggggaatcgaggaacagaaagacaaggaagaagacgaattcagcggtttcagccagtttccggacctgatcctgatggatggtggaaaaggtcaggtgcatgtggcggaacaggtacttgcggatctggggctgacgattcccgtctgtggtatggttaaggacgacaatcaccggacgagaggactgtattatcaggatcatgagatcccaatcagccataccagcgagggatttaaactgatcacgagaatccaggatgaggtgcatcgttttgccatcgaatatcaccgcctgcttcgcagcaagggacaggtacattcgatcctggatgatatcgagggcatcggaccgaccaggagaaaagcactgatgaaatatttcaaatcaatcgaggagatccgggcggcgagtgaggaagaactcggcaaggttccgtcgatgaatcggcagtctgcacaaaaagtctatcaatttttccattcctgatggttgatttcttgcagtctgtgctcgcatgtgataagatatttataaagtttttgaaaaaggagagcgagatatgaaggctgtaaaactgaccaaactggttcaggaaatgaacctgaagaatcttacgccggaagtggacatggaacatgtacgcatcacccttccggatatcaacagacctgcccttcagctgacaggatattttgaacattttgcctctgaacgtgtacagattatcggttatgtagaatacacctatctgatgcacctggatccggaacagagaaaacacagttttgagaattttgtatccaaacagattccctgtgtgatcttcacaacgatgacggaaccggatgaagatatgctggagatgggaagaaaatacaatgtgccgatccttggaaccgaaaaaacgacatccaattttatggcagagatcatccgctggctgaacgtacagctggcaccgtgcatctccatccatggcgtactggtggatgtatacggcgaaggtgtcctgatcatgggtgagagcggcatcggtaagagcgaggctgcgctggaactgatcaagcgtggacatcgtctggtaagtgacgatgtggtggaaatcagcaaagtcagtgatgtggaactggtgggaaccgcaccggatatcacccggcattttatcgaactgcgcggtatcggtatcatcgatgtgaagacgctgttcggtgtggaaagtgtaaaaaatacccagtccatcgatctggtcatcaaactggaagagtggagccgggataaagaatacgaccgtctgggactgaaagaagaatacacagagatccttggcaacaaagttgtctgccattctctgccgatccgtccgggtcgaaatctggctgttatcgtagaatctgcggcagtcaaccaccgtcagaaaaagatgggatacaatgcggcacaggagctgtacaaccgtgtacaggcgaacctggcaagaaagaaggaggactaaaaaatgagttactgttttggaatcgatatcgggggaacaaccgtaaaatgcggattatttacaacagagggtgaacttctggaaaaatgggagatcaaaacccgtacagaagaaaacggaaaagcgattcttccggatgtggcagagaccattctgaaaaaaatggaagaaaaaggcattgcaaaagcagatgtcatcggtgttggtgtcggagttccgggaccggttgtaaaagaaagagaagtacaggtagcagtcaatctgcactggggacgtacgatgctggcagatgttctggaagaactgctgggtcagatcccggtaaaagtaggaaatgatgccaacgttgcagcactcggtgagatgtggaaaggcggcggagaaggtacacagaacctgatcatggctaccctgggaaccggtgtcggcggcggtatcatcgtggacggaaagatcgttaccggtgcacacggagcaggcggagagatcggacatgcatgtgtggaaccggaagaaaccgaaagctgtaactgtggaaataaaggatgcctcgaacagttagcttccgctaccggtatcgtaagaatcggtaaaaagatcatggcagaaaatactgctgagacaaaactgacactggatgatttcagcgcaaaaaccatctttgatgcatacaaagaaggtgacggtgttgcaaaacagatcgtggacaaatttgccggatatctgggaaccgcactggcaatcttctcctgcgtggttgacccggaagttatcgttatcggcggtggcgtatccaaagccggacagcctctgatcgacgctgtggcaggtcattataaagaacatgcctttatcagctgcaaagatacaccgatcgttctggcaaagctggacaacgatgcaggaatctacggagctgcaaaactggtagttgcgtaaaacaggtattctgatacatttgtaaaaaagattcaggaactgtcggaaagcaattttcggtaaataaaaaagaatggagcatatgtgaatttttaacacatatgttccattctttttttgtgaaatcctttatggaaactccatcgcagatatcagagtaccctacccggcagagtaatcttgcacagaggctgtatccggtgttgcaggagtgtccggtaccggggcagtgtcatccggagccgcaggcacggtggaatcatcgcccggaacggtgtcggttccatctccgtttgtatcggttccatcggtatcggtatctgcatcctcgtcggagtctgacggatccgtttcgtgtgagtgccacggagacggtgtcggagccacataatggcgggtacagcgaaccgtagggatggtggaagtttcgaaatattcggtgcgggtcgggcatccggagcctgccagcagtccgctggacgtacagatcgtcgcttcctttacggtagaaggcatctcaaagtctacatgcggaagatcctcatggatccggctcataacctttttccacagtgttttgtggaacgatttgcagtcatcttccagaaattcgttggtgtcataacctgcccataccgcgcaggtataatatggggtaaatcctgcaaaccacacatcacgggttgcagaggttgtacctgtcttaccggctaccggcatattgtcaagctgcagtccgttaccggtaccgccttcgtcattgacaacactctcgagagcgcttgtcagcagatatgcggtgctctcacggaacacttcggttgtctgcggcttgttttccagaaccacatccccgttctgatcgaggattttggtgtaaaataccggtttggtgtaagtgccgccgtttgcgatcgtcgcataggcagcggtcagttccagggtggagacaccattggtgataccgccaagtgccgtaggttcccgcgcgtcatcatatacctgaccgttgatgacttcatgatcggtaaccttatcaaagccaagttctttcagatacgtgtagccaagtcgtggtgtgatgtcacggaaacactgcacggcgatggtgttacaggaatatttgagggcatcgcggatcgtcattgtaccgcgataaccgctgtaggcatttttgaccggtcggttggtattttcataagtgatcgcctggtctacataggtatctgccagcgtaagtcccagatcgttgatcgcaggtccgtaaacagccagaggtttgaaggtagaacccggctgccggtaggtgtcggttgcacggttcagcgtcagactggcggttttttccccgcggccgccgacgagagctttgacataaccggtgtgctggtcgatgatcaccatggaagactgcggctgtgcagcaaagctgatccgttcggcaacgatagtttcgccttcgcctacaacagctgctttgtattgatccacataattctgtgcttcctcttccgagtcaaacagcaggtcgaaattttcgtctccgtgatctttaaaatacagtttcatcatttctttactgtagttctgtgtggtcccatccgctttctgcaccgttaaagcccagtcgataccaacctgcgtatgagcagggaagttttcttcgttctgatattcctcatccagaatggactggatcgaaggatcctgggtggtgtagatacggagaccgccgctgtaaagcgcattctgtgcctgtaccttggtgtaccctttctgctcctgcagatcggtaatgatctgggaagtcagttcgtcgataaaataagaatacggagtggcggtttcctgcgaagaatccgtcgcctgaatccgttcgtagacattatcggcaagcgcttcctcatactgcgctttggtaatatacccctgatcgagcatattggtcagtacctttttgcggcgctttgcattttcctccgggaaacggatcgggttgtacgcgtaagggttctgcgggatcgcagccagtacggcacattcggacagcgtcaggtcttcactatttttcccaaaataccgctgtgctgccgcctgtaccccataggttccggcggagaggttgatggtattcagataattttccaggatcacgcttttggtgtccatgccctctgcggtcagggaagcctccagctgaagtgccagatactgctcctggatcttacgtttgaaacgctcgatcttcccctcgttcgtccagttggtaaatacgttgtttttcagtaactgctgtgtcagggtacttgcaccctcattaaaatgaaatccatgggaaacaccgtttacaaaggcacgcaggattccctgaatatcgattccgttatgctcataaaaacgttcatcctcaatggcaacgatcgcatgctgcatgtccagcggaatcttgctgatcgataccgacatacggttggcgttcggagcggagagtttctgaagctgattgccgtctgcatcgtatacgaaggtggcattgccgctgggcatgatatttacatcggagatatccggtgaagtatcgagaatggcacggaaagcgccgacgcccatgcagcagaagatcacacatactgcagcaaagctcaggaacagaacacgcagaaaagtaacacccgcccgttttcctctcttcgaggaggcggaagacagttgttttcgctttttatgggtggaattttttccaaaattcatttgtgtacctcctttatctgcttattatagcaaatttcaaaattcaagaaaagcctatattaaaaagttcacattttccttgcatccgtgcaggaaaatcccctataataaaaataatcatgtttattaaggagaattaccatgttggaacgatataaaacagtctatcgtggaaaagagggagaaatcatcgaaaaaaaatcccgttttattgccacggtacggctggtggagacggaagaggaagcgcttgcgtttatcgaagagatgaaaaagaaatactggaacgccacacataactgctttgcctatgtgatcggagaacggcgggaatgtgtgcgttgcagtgatgacggagaaccgagcggaacggcgggaaaaccgatgctggatgtgctgctgggagaagacatgtacaatacggcagttgtcgtgacgagatattttggcggtacgcttcttggaaccggcggactggtgcgcgcgtattcgaaggcggtgcaggaaggactggcgcagagcgatctgatcgaaaaacagtatggaaatatcctcgagatcggaacggattataatggtgtcggaaaaatacagtatctgatcggagagaacaaaataccggtgctggagtctgagtataccgataaagtgcggttccgtgtactgcttccgctcagcgagacagaacattttcagaaactgctgaccgaggcgacgaatgcgcgggcaagtcaggagattgtggacagctgttattatgcggtgtggaacggacagatcctgatgggagaggagttgcgaggataaacagtatcgccagaaaatgggtgaaaagataagaaaatcaggatatatgcgagtaaggagttgaaaaaacgccggtgccaaaaaagcggcactgacgtttttatcttgctatatagtatatagcggcaattgttttattaaacagtctctggttccggataagtctcacccagggtatcgatcacgattgttgcgatcacctgatcttccagcggtctgtcacggaaatcggtcggtacagtcgcgatcttatcgatgacatccagaccttcggtgatcttaccgaaagctgcataagcaccatccaggtgtggagaagtctcatgcatgatgaagaactggcttccggcagaatccggatgcatggcacgtgccatggacaaaacgccaggtgtgtgtttcaggtcattggcgaaaccgttctgtgcgaattctcccctgatggagtatcccggaccacccattccggttccttccgggcatccgccctggatcataaatcccggaatgacacggtggaagatctttccatcgtagaaatgtttgtttgccagactgataaagttgttgacggtgttcggggcaatctccggatagagttcgcctttcatcacatcaccgtttttcattgtaatcgtaataacaggatttgacatgataaacgctcctttgtcttttcatttttcagctgttacagctgtcagaactcattataatatggaaagaacaaaggcgcaagaaaaagaatacgtgaggaacttatggaaagagaaattgatttacaggaaatatccgacgggaaattatatacaaataaagatatggtaaaggcaggatgcggtgaatgtcagggatgttccgactgctgtcgggggatgggaagctcgatctttctggatccgatggatatttaccggctgacaacggggctggaatgttcctttgaagatctcttaagcacctgtgtggaactgcatgtggtggacgggtttatccagccgaatatgaagatggtgggaaaggaagaacagtgcccgtttctgaatgaaaaaggtcgctgcaacatccatgcgatccgtccggggatctgccggctgtttccgctgggaagatgctatgacggcgagggcggatttcagtattttcttcagatctatgagtgcaaaaaggagccgaagtccaaagtaaagatcaaaaactggctcggtgtggaagagattggaagatacgagcggtttgtggcacagtggcattatttccagaaggatgcacagaaagtgctggcgggaatctcacaggaggctcttgtaaagaagattcatctgtatctgctggcacagttttaccagaaaccgtatcaggcaggacgggatttttatgaacagtttgaagaaaggctccgggaagcaaaacagcagatcggggttgcaggataaaatcccggattccgagagtagataaaaccggaagggcgggacgcgttggttccactcttccggttttatgatgtatgacggttgtatctttgtctgacaggtcaggttgtcttcagtgaatcccggtacggaatataagaagtatcgaaaagacaaagctcatcgagactgttgaattcgcggataatgccctccgggtatttgcgaagcgccatggaaagctcgtccagatggttgcataagaaagcttcccagctgagatctgcggattccggtgcgtcgtattctttcaacatcagttcgcagaaacgggcggaaaactgattgtcccagtaagcgggaccggtcatataccagcagttgctgccgcctctccggatgcgggagatctttccgttaaaaccggtggtgacacataatttggctgtcttttctgcggaaaatgcacccgcgtagtaagactcatagacataaggatcaaaaatattttccatacagtacaggtcagacgaacagatataagaatttttcagtacctttcgtgctgcatagatggatgaaagattgttccggactgcatactctgtattttcaatcaggtgtacgccgtatttttcttccagataagaaaatgcttctttttgatgaccgacaacgatataaatttccgggatctcaacctcgatcagctgacggatcatgcgctcgatcatgatctcccccttgacctttaaaaatgcctttggtttcgtatcagacagaggcttgaaccgggaacacataccagcggcaagaatgatggcgttatctacatgatagggacgcagcgcatcgtaattgccattttgaaaacagtcatcgaattcagactttaccatgacgaaagaatcctcctgtggttaaaacacaataataacgtatcgattgtagtgcagtttcgggagaatgtcaagcagagaaggaaacggaatgcacagaaggagataagaatattgtaagaaatttgtgaacagatggaattgaaatgtgtggaaaaatgtactacaatgattgggaacagatggagtataacaggcatctgcaataataaggaggggaacagatgaaaaaaagaaagaacatactgcttgcactgggaatcgttctgacaatgtccatggcagttccgtcagcagccgcagtaaacagagagtccggcaaacagtctgttgcaagtcaggaggtaacccaggatgtaacccaggatgtacaggaagttctggaacaggatctgctgaccgatgtatcggaacaggccgtaaaaccacagtggaaacaggtttcggtgaatgacgatacaaaatggatgctgcagctgaatcaggagacaaacgctgcggatggcgcgtatgtgatcaatggaaaaacatactggttcgaccaggaggggtatctggttacaggaaccgtaaaagtagaaaagacaacggccggtgatgcgacaacgggaaaagccgcactgaaggcaggtacatacttcttccagaacgtgggtgagagtccggaaaaagatgatctgggaagcatggtgaaaaatgcatgggtcaacgatacggaagatgggtctgcatggttttatatgggaaccgacggaaccatcgacaccggtatcagcggctggcagcaggtagaacagagtttctgggtaaaaacagacaaaggtgtcggagcgatacaggaagaaggctggtaccagatcaacggcgcatggtattatctgcaggcagacggcttccgcgatgagacaaaggtcggcatccaggaggtaaacggaaaaacctactgtctgaacaaagacggaattgcacagaaaggattccagatctgggacggtatcggttatatctgtgatgtacagaaaggaacggtagtgaaagccaataacagctggcagctggttgccggtgactactactggtatgaagacggaaaacctgccaccggatggcgggttgtcaacggtaaacacttttatatgaatccggaaaacggaaagatgatgaccggattctacaaagatgagacaggtaagctgtattacagcgatatctacggagcaagactggagcaggcaggatggaatctgatcaacaatacctggtactggatcaacaccgatgcttccgtagcgaccggatgggtcagcccgaacggaaagacaaaatattatatgggtgaagacggagccatggcagtcggctggtgtgtgatcgacggtacctactatttcttcaccggaagcggagccatgcataccggatggctgcagcgcttcagcggctggtattatctgaacgaagacggaacgatggcaaccggctggaaagtggtcaatggaaaatggtattactttgatgaaaatggaatgatgcagaccggatggacacaggtaaacagtgtctggtattacatggatgccagtggcgcgatgcagaccggatggctgaaagttccgagcggctggtactatctgtccagtaacggtgcgatgatgaccggctggtatgtagtcaacggaaaatggtactacagcaacgcagcaggaacgatgatgaccggctgggtagagtgcccgagtggctggtattatacggatgccagcggagcgatgcagaccggatgggcaagaatcaggggaaaatggtattacctggatgctgcaaaaggcggtgcggcaaccgtaggctggaaacggatcggcaacttcaaatattacttcaatgaatactgtgcaatggagcaggatcttgacaatatccttggaagacagtcctcttatcagatcacggtcaaccgggtaaaatgccaggttatggtatatgcgaagagcgagaccggaaaatttgatatcccggtaaaaactttcacctgttccgtaggaaaggcaggtaccccgacccatgcaggacagtatgcaactctgaaaaaagataacccggtaagactgatgggaccatcttacggaaaatacggaacacagatcaacatctacggtgactggttccactctgtagcatgcagtaatagtgatccgacatttgctctggcagcaggtaactacaatatgctgggacagccggcatctcacggatgtgtacgtctgtgcgtaagagatgcaaaatggatctatgataactgtggtctttatacaacggttctgatctccgataccgaggcaacaccgtttgacagaccggctacgatcaagattccggcaggacagaactgggatccgaccgaccaggaagcattagacaaactggcaggaaaaaccagtaaataataaaaaatttgtatgagatacaaaaagaggatcagcctggaacatgtgatgtgtttcaggctgattttcttgcattgtatatcaatcattggttcggtgggctgattttcttgcattgcatatcaatcattggtccggtggactaattttgattacaattttgtgaataacgtttaaacatcttttacgagggttgaaaagacggcttatttgtaataaaataaacgcatgaaaaggaaaaaaattccagcgagaggagagatatcatgaagcagagaagacgtctgttatttggactgggaattttggtttcattatcgatggctgttccggcgtatgcggcagatgcaacacagggaaccgcacaggtgagtgaaagtgtacaggaagtgctccaggatgaggaaaatgtggaagtcccgggaacagaaaatgaagaaggcggaaccgtcgatgcagctgatccgacagacggacaggacgaaaacagtaacggacagcaggcagacagtgaggatgcggcaaccgcagcggtaaagagtggatggcagcagatcgctgcgaatacctggatctattacgatcagaacggcaaccgggattatacgaaaaccggtatgcagaccatcggagataaagtgtattacctggatgaaaacggggttgcacagtccggtacatttttggcagcagacggaaaagaatatgtttttgatgcaggaaaaggaacggctacattaaagatttcggatggctggaatgagatcgacggcaaatggtactggtatcagaacggaaagccatacaaaggatggctgcagcgtttcagcggttggtactatctgaaagaagacggaacgatgacaaccggctggtatgaggtaaaaggtgtcaggtattattttgatgaaaacggaacgatggtaaccggctgggtacaggatggagaaaactggtattatatgagcgcaagcggagcgatgcagacaggatgggtacagactcataccggctggtactatcttggcaacagcggtgtgatgcagacaggatggtatgtggtaaaaggcaaatggtattacagcaatgccgcaggaacgatgcagacgggctgggtgaatgatggaaaacactggtattacatgaacgcggacggcgtgatgcagacagactgggtacagacgcacacgggctggtactatcttggaaacagcggcgtgatgcagacgggctggtatgtggtgagaggacactggtattacagtaacgccgcaggaacgatgcagacgggctgggtgaacgacggaaagaactggtactatacagacagcaacggagcgatgcagacgggctggttaagaaacggcggtggctggtattatctgaaatccagcggagctatggcaaccggatggaaccgtgtcggatcttacaaatattatttcaacggaagcggagcaatgttacaggatctcgacagcgtactcggtcgccagccttcctattatattacagtaaaccgcagaacctgccaggttatggtatatgcaaagagcgaaaccggaagatatgatatcccggtcaaaacatttgcctgttccgtaggtctgccggcaaccccgaccccgaccggtacttataacacgctggcacagtaccgctggcatactctgatgggaccttcctacggacagtactgcacgagaatcgtaggcggtgtgctgttccactccgtagccggaaacagcatgactgtgaaaaacctgaacgcagccaactacaatatgctgggacagccggcatctcacggatgtgtacgtctgtgtgtaagagatgcaaaatggatctatgacaactgtgcagtaggaaccactgtaacgatcggcgattccctggtagcaccgtttgacaaaccggcaacgatcaagattccggcatggcagacatgggatccaaccgatccggcagcaccaaaataaaataacagtaacagtaacagaaataaaaaaccttcgcaagggtaaccttgcgaaggttttttgtttctgttgtcatagcagtccgtttcagagaaacttaccggaaacacgagttcacgctgttttagcagctctcaagtaccttccgtatccgctccgggaaatcaggactcatgtttgctgattttacataagcggtaaggaaatcaagaactccggtttctgtatcacgactatgagaaatggcatctaaaaatgccttctgttctctgtaagcttcttttgaaatagcagccacatacgcttttcctgttctggtataagattttccgatcgaatccactttcagataacctttattttcaaggacaaccagcgcgggagctactgtattccgttttaaagacggctctgcctttaaaacttctgaaatcagacaaggatgatccatattccatatggtattcataatctgttcttccctgggtgtcaatccatacatatttctatcctccgtaaaattgctttcttcgtatttgaatatacgaaaaaccccatttccaacttcctctagtataaagaaaaaagtgaaaaaaatcaatagaattatggaaaaatcaggcagtttattgacttttttggaagcgttgtcggatgacagatgatggaaaataagacaaataaagtggatttgcaatacaacgagataaaatgcgctttgcgaattttatctcgttatcacaacaaaaaaccgccagaagtaaattctgacggttaagcgtgcgttagaggattcgaacccccggccttttggtccgtagccaaacgctctatccagctgagctaaacgcacattttactttgtgttgtttgggtgtccctcacaacaaagcctattatacgggagagctgagcaaatgtcaacactttttttgaaaaaaattaaatttttttaattgttagaaaaacaggtgaaattagggagtgggaaagaggaaaaccgaccgaaggaaaccgtacagattgcttgaaaagaaagaaacgatgtgctactgttaataggtaactgtgaagacacgaaacagttacgtcaagaggaaaatacacagggaggatatacaaatgagagcaagtggtgtgttgatgcctgtttcttcactgccatccagatatggaatcggctgtttttcaaaagaagcatatgaatttgtagactgtctggaacgtgcaggacagtcaaagtggcaggttcttccgttaggacctaccggatatggagattctccgtatcagccgttttccacattcgcaggcaatccgtattttatcgatctggatacactggtggaagaaggtcttctttataaagaagaatgtgaacggctacagtgtggcggggatccgagatttgtagattatgagagaatctatttttcaagaaatgagattttaagaaaagcctacgaacgtttttcagcggatgagaaattccaggcattttgcaaaaaagagcaggaatggctggaaccatactgtctgttccgtgcgatcaaggacagccagaacggagcactgtggacaacctggccggaagaactgagaaaaagcggttcgaaggaagtacagaataagaaaaaagaactggaaaaagagatggaatactaccagttcctggaatatgagtttgaccgtcagtggaacaaactgaaagcgtatgccaataagaagggaattacgatcatcggagatcttccaatctatgtggcaatcgacagtgcggatgcgtgggcaaatccgaagatgttccagatggacgaggatggtgtgccgagtgcgatcgcaggctgcccgccggatgctttctctgcaaccggccagatgtgggggaacccgctgtatgactggaaaactcagaaaaagaccggatacaaatggtggatccagcgtatgaagagaagctttgccctgtatgataccgttcgcatcgaccatttccgtggatttgcagagtattatgcgattccggcagatgcagaaaatacaatggaaggggaatgggtagaaggaccgggcattgatctgttccgggcgatgggaaaagcactgggagagatggatgtgatcgcggaagacctgggaacactggacgataaggtgtttgatctgatggataagacaggatatccgggaatgaaagtcctacagtttgcctttgattccggcaatacgaacttctatctgccacatcattataagagaaactgtgtcgtgtatacaggaacgcacgacaacgatacgacaaaagcctggtattatggcatgaacgactgggcgagagagtattcaaaggcatatctgaataactatgaccgtccgtgggaagatatcccgtgggattttatccgggcggcagaagccagtgttgccaatctggcagtgattccgatgtgggatcttctgtgctgtggtagtgaaggaagaatgaatcatccgtcgacactgggggaaaactggaaatggaggatgcttccgggcgagttccgtgaggatatcatcggacgcctgcgctggctgaccgatacgttccagagaatgctggttcctccgaaaaccgaagaagggcagggggaaaacgaagatgaaacagatgcttcagtatctgaaagcgtataaaaaagagtcggtcatcgcaccgctgtttaaaatgctggaagccagttttgaactgctggttccgattgttatggcaaacatcatcgatgtcggtatccagaacggggacaagtcgtacatctggaggatgtgtgcactgatgatcggactgggcgtgctgggactggtatgttccctgacggcgcagtattttgctgcaaaagcggcgatgggatttggaacggcactgagaaaagcgctgtttggacacattaacagtctcagttacaatgaactggatcagatcggaacaccgacactgatcacccgtatgaccagtgatatcaaccaggcgcagactggtgtcaacatgatgcttcgcctgttcctgcgttctccgttcatcgtcatcggtgcggttatgatggcatttaccatcagcgcgaaactgacgatcattttcctgatcgctgtgccgttgatcggactggcgatttacctgatcatgcggattaccgtgccgatctataaaaaagtacagagtattctggatcagatcgtgcttcatacgagagaaaattatgtgggagccagagtggtacgtgcattttccagagaaaaagatgagacagagcagtttaatgagatcagcggcagcctgaaagatacccagctgtatgcaggtaagatttccgccctgatgaacccggtcacctatgtcatggtaaatattgcgatcctgtgtatcctgtggttcggtggctggcaggtacagatcggcagcgtatctcagggagagatcgtagcgctggtcaactatatgaaccagatcctgctggcgctggtagccctggcaaacctgatcgtggcagtgacaagagcgctggcatgtgcgatccgtatcaatgaagtcttccaggtaaacagttccatggaagagggaacgaaagaaggcacgaaagagagcggaaaaccgcgggttgcctttgatcatgtgacctttacctatggcggcgcacaggaggcttccctgacggacatcagtttttctgcgatgccgggagagacgattggtatcatcggcggtaccggatccggaaaatccacgctggtcaatctgatcccgcggttctatgacgctaccgaaggttcggtgacggtggacggtcaggatgtaaaaacctacacgttccagcatctgcgtgaaaagatcggtgtggttccacagaaagcggttctgttcctcggaacgatccggagcaatctgcagtggcggaaaaaagacgcgaaagagagtgaactgtggaaagccttacagatcgcgcaggcagaagaagtggtgaagaaaaaacagaaaggtctggatgaaaaagtggaaaccggcggacgaaacttctccggtggacagagacagcgtctgaccatcgcgagagcactggtcggcgagccggatatcctgatccttgatgacagtgcatccgcactggacttcgcaacggatgcggcactgcgcagatccatcaaagaaaatacgaaaaaagcaaccgtattcctggtatcccagcgtgcggcaaccgtaaaaaatgcagaccagatcctggttctggatgatggaaaacttgtgggaaaaggaacccatgaggaattattgaagaattgtaacgtatataaggaaatctgtatgtcacagttttccagtcaggaggtagcacagttatgaaaaataaaaagaccataaaccgtgtcctggaactgattcgcccgtatacgtatctggtggtcagtattctggtgctggcggcagtcacagtagcggctaccctgtattccccgatcctgattggtaaaggtgtcgactgtatggtggaaaaaggactggtaagttttccagatctgaaactggtactgatccagctggcagtcataactgcgatttccgcggtatctcagtgggtgatgagccttctgaccaacaaaatgacgtacaagatcgtggatgatatccgcagaagcgtatttgcccatatggaaattcttccgctccgatatatggatgcacaccagccgggtgatgcgatcagccggatttccacagatgtggatcagttctccgacggtctgctgatgggatttacccagctgttttccggcgtgatgacgatcctcggaactctgggatttatgatctctattgatggaagaattacactggtcgttgtactgatcacaccgttatcgttcttcgtagcaaactttatcgcaaaacgtactttcaccatgttccggttacagtctgaaacgagagcagagatgacctctctggtggaggaaatggttggaaaccagaaggtggtaaaagcatttgcctatgaaaaagaggcagaggaacggtttgatgacattaaccagagattacagtcatgcagtctgaaagcaacgttcttttcttccattaccaacccgtccacccgttttgtcaacggactggtgtatacgggtgttggtatcttcggagccttttccgcgatccagggaagaatcacggttggtcagctgagcagtttcctgaactatgcgaaccagtataccaaaccgttcaacgagatctccggtgtggtaacagagcttcagaacgcgctggcatgtgcgggaagaatcttccagttcctggatgaggaaccggtaccggaaaatgcaccggatgcgaagacactggatcatgtggaaggacgtgtgggattcgaggatgtaagtttctcttacaccagtgaggttccgctgatcgagcatatgaacctggaagtaaaaccgggacagcgtgtggcaatcgtcggtcctaccggatgcggaaaaacgacggtgatcaatctgctgatgcgtttttatgatgtaaataaaggtaagatcacactggacggcgtgccgattcaggatctgacatgggaaagtctccgttccagttacggaatggtgcttcaggagacctggttaaaagcgggtaccatcctggaaaatatctcttacggcaaaccggatgccacaagggaagaagtaatcgaagcagccaaacaggcacacgcccacagttttatcaagcgtcttccgaatggatatgacacggtaatgggcgaggacggcggaagcctgtcccagggacagaaacagctgctttgtattgcaagactgatgctgttaaaaccgccggtactgattttggatgaggcgacatcctcgatcgataccatgaccgagatccgtatccagaaagctttccagaagctgatggaaggacggacaagtttcgtggtggcacatcggttgtcaactattaaggaatcggatgtgatcctggttatgaaagacggacatatcctggagactggtaaacatgaggaactgctggagaagaaagggttctatgcacagttgtatcagagtcagttttgtaacgtgtagataggatatgcaaaaaagggacgcgccagatcccggatggaacgttcaggcaaatagtatgcaaaaagtgacgcggcaggttcctgatggaacattcgtgcaacgtgggcaggggaactttgaactaatccctaacttcgactaagactctcgcgagagcgctcgagcctaagtctacgtaagggctggatttcaaagcttcccctaaccgcccacaaagtgttgcacgaacgttccatcaggaacctgccgctgtttgtttgcaaaaggggggacatctgggaaaagagctttataagtcaacaaaaccatatcagcccgtattagttccagaaaacgtcagcagagggagcgggcagcaggggcgagggacactttgtgggcgtttagggcaagctttgagatccagcatttacgcagactttcgcgagggtcagctgaccctcgtgaatatagtcggagttaatgcttagcttaaagttgccctgcccacgtccctcgcccctgctgcccgctccctctgcgtccgtcttgaacatactaccttaacaacttaaacatactatcttaacaacttgaacacactacctcaacaaactttgacacatcctcagaaaaatgctatagtatagaccaaatctatttaacccaaaaacaacgaatctaaaaatcaaaaagggggtaaacccatgtttcataaagtcatcatcaccctcctgaaacccttatctttcctcccagcccttctggttatgtatatgatattttctttttcggcgcagatcggtacggagtctggaaatttgagttttcaggtgagtgaaaaactggtagaggtcggagcaaaagtgctggataaggatctgacgaacagtgagatcgagatgtatgcgaacaaataccatcattatgtaagaaaactcggtcatatgaccgaatattgtgtgctggcgatcacgctttgtgtgccgttgtatgcgtacggtgtccgggggatctggctgtatttgctggcgggattcttatgtgccggttttgcggcgacggatgaatatcatcagtcgtttgtggcagggcgtggaccgtcggtgcgggatgtctgcatcgatacatttggtgcgatgatcggtatcacaggaacgcagatcgtcggctgggcagccgtgaagagtacgaaagaactggaaagagagcggaaacgaaagagaaagcaaaagagaaaaaagatgcaggaacgctgattgagacaaaagtagtatcatgcaaaagttcaggattttgctgtaaaaaatggttgcgatgtgagctgatcaatcataagagagatagaaataacagactgtctgaaaacagtaaaacagatgagcggaacagacagaataagattgaattagaactaccactatattataataaaatcagtgattccgaacaggcaaaacgccggttcgaacaaggaggaaaacaatgagttacgcagatgatttatttatccgcatgtgtcaggatattatcgataacggattaagcacggaaggagaaaaagtacgtccggtgtgggaagataccggggagagtgcttatacgatcaaacggtttggcgtggtcaaccggtacgatctgtcgaaagaatttccggcgctgacgcttcggagaacggcgctgaaaagcgcgtttgacgagattctgtggatctggcagaaaaaatcaaacaacattcatgatctgaacagccatatctgggacagctgggcagacgaggacggctccatcggaaaagcctacgggtatcagctgggagtgaaacatcagtataaagaaggcatgatggatcaggtcgaccgtgtgttatacgatctgaaaaacaacccttacagcaggagaatcatgaccaatatttatgtacatcaggatcttcatgagatgaacctgtatccgtgtgcgtattcgatgacatttaacgtgacaaaagaaaaagacagcgacaaactgacactgaacggtgtgttaaaccagcgctccaacgatgtgctggcggcgaacaactggaatgtctgccagtatgcactgcttctgatgatgatcgcacaggtgtgcgatatgaaagcgggcgaactgctccatgtgatcgcggacgcacatatttatgaccgccatattccgctggtaaaagaactgatcagcagagaaacccatccggcaccaaaggtatggctgaatccggaagttaaggatttctatgcatttaccgtggatgatctccatgtggaagattatgtaaccggaccacagattaaaaatatcccgatcgctgtgtaagactgtgtagatgcgggaaattgtaaataaaatgtgatgcgtaactgtagcaggtttgcagaaattacgagaaaaagaacagaatttcccccggaatcataaagaaagaacggattttcgggtgaaagtgagaaatgtataagacaggagaaaaacaatgaatcttattgtagcagcagataaaaactggggcatcggaaaagataacaaacttctggtgagcatcccttccgatatgaaatttttccgtcaggaaaccatgggaaaagtcgttgtcatgggaagaaagacactcgagagctttccgaacggactgcctttaaaaaacagaaccaacgtggtactgaccagcgataaaaattatcaggtgaaagatgcagtgatcgtgcacagcatcgatgaagttctggaagaactgaagaaatatgatgatgatgagatctacgtcatcggtggaggaaaagtttatgaagaactgcttccatactgtgatgtggcgcatgtgaccaagattgatttcgcttttgaggcggatactcattttccgaatctggacgaggatccggagtgggaaatcactgcatccagcgatgaacagacgtattttgatctggaatatacatttgtaaaatacgagagaaagtaataagaaaaaaaggcaactgtgaggttactgaaaagttgcgaaaaaagaaagcaacaggaaagaccgggaggacattgggtcaacatggaaaaaaacgattggcaggatcagaaaaataataatggaagcgattttatgaaagttgtccaggatgccatcaacagcggggactatcagcagttaaacgaacaggttcgaaagacggtcagcgcatccgtacaggaagtgtacaatatgggcggaaaactgcaaaatggcttcaaagagggcatgcggcaggcaggaaacggcttgcaggaaggcttcaaggaaggcatgcagaccgcgcagcgggagtggaaagaagcctggagagagtcgggaagtaccggatggcgaaaaactgaggtgacataccggacaaactatggaaaaaatcaggcaccggcgtatcaatcgggagcatggaagcaggcgcagcagggaaaacagctgcctgcaatttattcaccgaatccgccgggaagaatcacaggaacggttcttgccatcaccggatattctctgaccggggtatttgcactcagtacgatcattatgggaatcgtgacagcgatctttccgcatgcaccggaaattatcggaacctctattctgggagtgatcacagcgggaagtctcggcatgggaatcaccggatctgtactccgcggtcgtgtaaaaagattccggcagtatgtacagcagatcggtgaccgggcatactgcaacatcaaagaactggcagataagaccggaaagacagaagaaaaagtccgcaaagatctgaaactgatgatcgataaaaaaatgttccggcagggacacctggatcagaaagaaacctgtctgatcgtcacggatgcgatgtatcagcagtatcttgagaccgaagaacaggcgaaaacggtacagatgcaacagcagcaacagaaagaacagcgctcccggatgccggaagagtgcagaaagatccttgaagaaggacaggaatacattgcctatatccgcaaatgtaacgatgatcttccgggagaagagatcacaagaaaactgagccgccttgaggcgattatcacccggatcttccaggaagtggaaaaacagccggatctggcttccgatcttcgcagatttatgaactattatctgccgacgacaagaaaactggtggatgcttaccgggaaatcgaactggacagtttccggacggagcagaacgaaaagaccaaaaaagagattgaagacaccctggatacgatcaaccaggcatttgaaaaactgttgaacagcttctttgaagagcgtgcgatggacatttcttcggatatttccgtattacattcgatgtttgcgcaggaaggactgacaaaaggagcctttgaacagagtgctgaagacagaaaacagcagtaaagaatgaaaatgcatttgtcggcaacgggaaaaaagaatctgaatatgcagagaagagatgaggaggaacaaatatgagtaccttagatgagatggagatgccaaccctgacctttgatccggctccggtgccggaggagaaagctccggtcgttccggtacaggaagaaaaagcggaactggacgacagcatgttaaatgataaagagcgtcagatggtggaaagcttcgcgaaacagatcgacattcgcaataccaacggcatcctgcagtatggtgcgggaacccagaaaaagatggctgatttttccgagaaagcactggaaaatgtaaagaccaaagatctgggatctgtgggcgatatgctgagcaatgtggtgacggaactgaaaagttttgacgcacaggaagaagaaaaaggatttttctctttcttaaagaaaccggtggataagatcaccacgatgaagacaaaatacgaaaaagtagaaaataatgtggaaaagatctgtaccgcactggaaaatcatcagacacaactgatgaaagatgtggcgatgctggatcatatgtatgagcagaacctgctttattttaaagaactttccatgtatattctggcaggaaagaagaaactggaagaagtaaagaccaccgaactggcgcagctcatggcgaaagcacaggcgagtggacagccggaggacgcacaggcagtcaaagatctggttggactgtgtgaccgcttcgaaaagaagatccatgatctggaactgacccggatgatctcgatccagaccgcaccgcagatccgtctggtacaaaacagtgataccatgatggtagaaaagatccagacaaccgtagtcaacacgattccgctgtggaagagtcagatggttctggcactcggtgtggaacatgcgtctcaggcagcgaaagcacagcgtcaggttacggatatgaccaacgacctattaagaaagaatgcagaagtgctgaaagtggcatccgtggaagctgcaaaagaatccgagcgcggtatcgtagatctggaaaccctgcagaatacaaatgcatccctgatctccacactggatgaagtgatgcagatccaggcagacggcagagtgaaacggcaggcagcagaagtggaacttcgcaagatggaagatgaactgaaaaacaaactgctggaaattcggtaataaacaaaaaaggaaggtgcagcaatgtatcgcgaacatacaaaaacaattaaaatcggaaatcaggtgatcggcggcggtcatccggtactgatccagtcgatgacgaatacaaaaacagaagatgtggcggcaacggtcgcacagattctggcactggagaaggcgggatgtcagatcatccgctgcgctgtgcctacgatggaggccgcaaaagcactgggggagatcaaaaaacagatccatatcccactggtggcagacattcattttgattataaactggcgatcgcagcgatggaaaacggtgcggacaagatccgtatcaatccgggtaatatcggaagccgggagcgcatccaggcggtggtcgatgtggcgaaagaacgccagattccgatccgtgtcggtgtaaatagcggttctctcgagaaagaactggtggaaaagtaccacggtgtgaccgcagaaggtctggtggagagtgcgcttgacaaagtaaagatcattgaggatatgggttacgatcagctggtgatcagcatcaaatcttcggatgttctgatgtgtgcaaaagcacacgaactgattgcccaaaagaccgattatccgctccatgtgggaatcaccgaggcgggaaccctgttttccggaaatatcaagtctgccgtaggactcggcatcattctctatcagggcatcggcgatacgatccgtgtatccctgaccggagatccgctcgaagaagtcaaatccgccaaacggatcctgaagacactgggacttcgaaacggcggcatcgaagtggtatcctgtccgacctgcggaagaacgcagatcgatctgatcggtcttgccaacaaagtagaagatatggtacaggatattcctctggatatcaaagtggctgttatgggctgcgtggtaaacggaccgggagaagcgaaggaagcggatatcggaatcgccggaggaaaaggtgtgggacttctgatcaaaaaaggagagattatcaaaaaagtaccggaggatcagcttttggagacactccgggatgagttacttcactggaatgcataagtggtgaatgagacatgatgacagaaaaagaatttttagatgtatttccccagttgaaggtggatccggaactggaaagcctgctgggggaagtaaaagtaatgaaagtagcgataaacccgcagaaggactgtctgcgggtttatgttctgagtaggcagtggattcataaaaagcatatttatcatctggaagcggcgatcaaagaacagttttttgccaatgcacctctgcaggtgaaaattatcgaaaaattccagctctccagccagtatacgccggaaaatttcctggatgtgtaccgccagagtattctgctggaattaaagcagtacagtgcactggaatataacatgttttataccgcacagatcacattcagcgatccggagacgatgaatctggtgatgaacgattcagtgatcgcgagagaccgggagcacgaactggtgcgggtgctggaaaagattttctgtgaacgctgtggttttaacctgaaagtacatccggcgtatcggaaaccggtggaaagtaagagcagaaagaacagtgaactgcggatccaggaggaagccagacagattctgttacattccaaagtcggtaacaaaaaccgtgacagagatgcagaggaagatctgtccgggcagggtgtggaagccccgtttgccgaagaccgggtgatcggagccgatggaaaagaacagaaaccacaggggaaagcaccacagaaaaccggtgcggacggtggaaaacagccggcaggaaaagggaaagatgcgaacaaaggcggcttccgggatcggaacggtggaagaaacagcggtcgcggcaatttccagaaaggccgttacggtgatggcccgcgcccgctgaaacgttcggacaacccggatgtgatctacggaagagattttgacgatgatgcgatcacgattgattccatcgccggagagatgggtgagatcacgatccgtggacaggtaacctccgtggaagccagagagatccgaaacgagaagaccatctacatgttcaacatcacagactttaccgacacgatcacggtaaagatgttcctgcacaacgagcaggtgccggagatcagcggtgcgatcaaaaaaggtgcttttctgaagctgaaaggtgtgaccacgatcgacaagttcgaccatgaaatcacgatcggttccctggcgggcatcaagaaaatcagtgattttaccaccagccggatggacaacagcccggaaaaacgtgtggaactgcactgccatacaaagatgagtgatatggatggcgttaccgatgcgagtgtgttggtaaaacgcgcctacaaatggggacatccagccatcgcaatcacagatcacggggtggtacagtccttcccggaggcaaaccatgcgtatgacgatatcgtcagcgattaccgcaaacagtaccagaaagatcatccggaggcgacgaaggatgagatgaaacaggtctatccgccgtttaaagtcatttacggcgtggaggcatatctggtagatgatgtgaaaggcatggtcaccggaagcaaggggcagagtttggatgatccatatgtcgtatttgatatcgagacaaccggtttcagtccggtggcaaaccggatcatcgagatcggtgcggtgcgtgtggaaaagggttctatcgtggatcgtttttccgtctttgtcaatccgcaggtgccgattccatttaagatcgagcagctgaccagcatcaatgacagcatggtggtggacgcggagacaatcgaagacgtgctgccgaaattcctggaattttccaaaggtgcggtcatggtggcacacaatgccggatttgatatgagttttatcatcgaaaactgcaagcggcttggcatcgaacaggaatttacctatgtggatacagtaggtcttgcccggatgcttctgccgggactgaaccggttcaagctggatacggtggcgaaggcgctgaatatttccctgctgaaccatcaccgcgcggtggacgatgcggcatgtacggcggaaatttttgtaaaattcattaaaatgtgcaaagaaagagacatctttgatctggatgcgttaaatgaggcgggaaaactctcggagcatacgatcaaaaaactgccgacctatcatgcgatcattctggcaaccagcgaggtgggacgtgtgaacctgtatcgtctggtgtcaaaatcccatctggagtattataaccggcggccgaggatcccgaagagtgtctatctgcaatacaaagaagggctgatgatcggatctgcctgcgaggcgggagaactgttccaggcgattttaagggatgagccggaatcggagattgcccgtctggtagaattctacgattatctggagattcagccgatcggcaataacatgttcatggtgcgggacgaaaaccgggacaatgtaacctgcgaggaagatctgcgggatctgaaccggcgaatcgtaaagcttggtgaacagttccagaaaccggtggttgcgacctgcgatgtgcattttattgatccggaggatgaagtttaccgaagaatcatcatgaccggaaaaggattcagtgatgcggatgatcaggcgccgctgtatctgcggaccacagaagaaatgttaaaagaattcgaatatctgggagcggagaaggc

SEQ ID NO: 2534 - DNA, 48961 bp, Unknown
  gut microbiota DNA sequence
aaacccgaacaagatcgcggatgtgtgtgaccgcgtctgcccgatccgagacggtaaattcccgccggtcattgaaaattcagaccagatgctccgtgatatctgttataacgaggcacatacgatctacggacccgatcttccggaaatcgtatcggcgcgtctggagagggagctgaactccatcatctccaacggttatgccgttatgtacatcatcgcacagaaactggtgtggaaatccaacgaggacggctatctggtaggttcccgaggatcggtaggttcttcttttgttgccacgatggcgggaatcacggaggtaaatccgctgagcccgcattatctgtgcggcgagtgctattatgtggattttgactcggacgaagtgaaagaatactccggtcgtgccggttgtgacatgccggataaggtatgcccgcggtgcggaaaaccgttaaagaagatgggatttgatattccgtttgagacgttccttggatttaagggaaacaaggagccggatatcgacctgaatttctccggtgagtaccagagtaaggcacacaaatatacagaggttatcttcggtgcgggacagaccttccgtgccggaaccatcggtacgctggcggataagacagcgttcggttatgtgaaaaattattacgaagagcgtggcgtgcacaagcgaaactgcgagatcgaccggatcgtacagggatgtacgggtatccggcgaaccaccggacagcatccgggcggtatcatcgttcttccgttcggtgaagatatcaattccttcaccccggtacagcatccggcaaatgatgtgaataccgatattatcacgacgcattttgattaccattccatcgacgcgaacctgctgaagctggatattctgggacacgatgatccgaccatgatccgtatgctggaagatatcacacattttgatgcacagcaggtaccgctggatgatcagagcgtcatgtcgttatttaagagtacggaggcactgggaatcacaccggaagatatcggcggatgcccgctggggtgtcttggcatcccggagtttggtacggatttcgttatccagatgcttctggataccaaaccgacctcattttccgatctgatccgtatttccggtctgtcgcatggtacggatgtatggctgggcaatgcgcagacgctgatcgaggaaggaaaggcgacgatttccacggcgatctgtacccgtgacgatatcatgatctatctgatcaacaagggactggagagtgagctttcgtttaccatcatggagagtgtccgtaagggtaagggactgaaaccggagtgggaagaggagatgaaagcccacgatgtgccggactggtatatctggtcgtgtaagaagattaaatacatgttcccgaaagcgcatgcggcggcgtacgttatgatggcgtaccggatcgcgtactataagatcttttatccgctggcttattatgcggcttatttcagcatccgtgcttctgcattttcctatgaactgatgtgtatgggacgggagcgtctggaatattatatggcagattataagaagcggagcgacacactgacgaagaaagaacaggataccgtaaaagatatgaaaatcgtgcaggagatgtatgcgagaggattttcgtttacggaggtggatctttacaaggcacaggcacaccggttccaggttgtggacggcaagctgatgccggcgctggacagcatcgaaggactgggagataaggcggctgacgcggtagtgcttgcggcgcgtgacggacagtttttgtcgaaagatgatttccggcagcggacaaaggtcagcaagagcgttatcgactttatggatgacctgcatattttcggcgatatcccggaatcgaaccagatttcgctgtttgattttcaataaacagaaaaaaataattgaaagcaacatatgtaattgaaaagaaaatattagcatgatatcataaaaaagatttcagaagggaaaaaataattgacaaacggctgaaaccgttacgaaaacagagaaagggagaaaccgcgtattacgagtatgaatacagcagaacaggggaataatgcgaaacagctgaaaggaagattcactgttgcggttctggtcttttttatcgcactgctggcagcgatggcagccacatatgcatggtatgtatacaataccggccggcatacgacgaaggtgcgtatgtcggccggtacgggaatcaatctccagatcagtaacaaatacgatgacgaaaccgcatacaaagtatgagtttaagatacaattgacatccgagcaggtaaaaaatcttgccacggaaccgcttaagattgatttctcttattttgtcaagtcagataaagcacttgaagatctaggtactcaggctcaatatgccaattataaggtaatattaacagcgcatcttgcgaacaagtctgggactgctttaatagaggatgtatcagattacctgatctataccaatgcaaaattttataatggaataatttccacaagagactttgataaaaagtgacattttgacggtgtgaatttacagaaaaattcacaccgtcaactaatgatatatcttatatcagttttttctgtttacacaaaacttgaagcactctcagaatgtgccaaggcacattctttgttatttgctgttccaactctatattcttcggcagatatcagggaaattttcagaaaaagcttaaagcagcacctctctaaacgcctccaacaacctctcattctgctccggcagcatcacgcaaaatctcacaaaatgatcatccaaaaacggaaatgtagaacaatcccggatcatcagtcccttccggatacaatgatcgaacagatcctgtgaagtaactccaggtttgcggatcttcatcaggataaaatttgccgaagcctcataaaccgtcacactgtcccacgtcgataactcgtgaaacaaccgatccctctccccggaaatcagctctcttgtatgctgaatatactcctcatccggaaacatcagccgtccggcaatctccgccagcgaattgatcgtccacggattctttcgcgtattgatcgccttgatcagatcctgatttcccgttaccgcatatcccagacgcagtcccggagccgcgaaaaacttcgaagtaccgcgaagaatgatcagattcgtataataattcgtcagcggaatactcgtcacttctttctcctccggcgcaaactccacatacgtctcatcgaccatcacgaaaattccatattgcagacaggcatcgaggatccggcgcatctggctgcaggtgattgcggtggaagtcggattgttcgggttacagagcaccagaagttccagctgatccgacagatgcttgcagaagtcttccacatccatatggaacccattttcttcttttaacggataatacagtgtcgtaccgccgccaagcgctatctcccgttcatactccgaatacgtcggtccaagcaccagcgcttttttcggatgcttcgtctggataaacagagaaatcaactcggtagaaccatttccgacgatcacattttccggctgtgtgcccgcatacgttgcgatgcaggtgcgaagagccgtgtattcccggtccggataggttgtgatcgcatccagattgtctgccagcgtggaacgcagctggtaagaaattcccagcggattgacattcgcactgaagctgacgatatcctcctttttgatatgataatatttttcgatggcttccaggtcactgccgtgaaaatgatctttgtgtttaatcataatatccctctttccttgcaacaaagttttgcgtagtgtataataaatataattatgagtatttttgcaggagattctgcaaaagaacatgaaacggataacaataatatcagtttcattataatggtaagaaaaaaatagtcaaggtcgataaaagaagaagcgcaggtggatactttgaaaagaagaatggaacagttactaaacggaagatttgaatatgaagtaccaaagctgactctttccgatgcacagatcaaccttacaaccaatgagggggaaaatgtccggggagaattgcatgtggcggcggaggataaccgcaggatcaaaggaatgaccatgtcatccaaccgccgggtactgctggcaaaagaaaaattttcgggcacaaccgtatgcatcccctacggactggatgtgaagggactttccgccggggatacggtggatggtgtgatcacgatcaacagcaatcttggagaatatcaggtgccggtacacgcggtgatcaccgatgacgggatccagacatcccgcggagccatcgacagtctggaagcatttatcaaactggcagagagcgattaccgggaggcattccgcctttataccagtgagagctttctgaaagtgctgcagggagaaaatccgagctatgaaagcctttaccgcggcatgtcacagaatccggttacctatcagcatatggaggaatttctgatcggaaccggaaaaaaagaaccggtgacgctgcgtctggagaaaaccgagcagacctgggatcatctggataccacagtcaaggattgtctgaatctgtataagagtacctggggctacacccacatggaagtggaagtgaccggggattttctggaagtggaaaagaaagtgatcaccaacgaggatttcatcggaagtgtttacggtctggaatacctgatccggaaagaaaaactgggaaatggaagaaaatacggtcagatccggatcaaaaccgtgtacggaacgtatgtatatgaagtgaaagcctccggcaatgtgtcctatgaactgagcacccggatgtatgagaaaaaaggacaggcggcattggccggtctgtatgaaaaatacatgctgggagagatcggacaggacgagtggaaagaggattccttaaaagaactggagagactcagaaacctcggatgctattatccgaaacagcagctgatggaagcctatatctatgagcagaccggagatctggcaaatgcaaaatcggtgctgtggccgctccgggaactgaaatttacgcaggaacagatggaagaggaagcctggtatctcgcgatggctgtgaaagcatccgtggcaacaccggatcaggagatgacagcgcagacccggatcgaaaatctctaccggatgaatccgggcagctattcgatcctgcgggtgctgatggatacttccgaggaataccggcatgcaccgggcagacagatgtatatgctcgaagaactgtttgatctcggatgcagaagcccatttctgtatctggcagcgtatgaaaaactggaaaaagaagccggatatctcaagaaactgtctccgtttatggtacaggtacttcactatgtggcacgccatggcagattaaatgaagaactgaccatgcggatcggacatctctccgaatacgtgaagaatttccagccggtgatctaccgtcttctggtaaaatgctacgaggcatacccggacaatgatatggtggatcatatctgcaaatacatcatgaagggtcagccgacaaagaatgaatatttccgctggtatcagctggcggtggaagcagacatccggatcacacggttatatgaatattatatcgaaaccatgccgcagggcttccagagtgttctgccacaggttatccgtatgtactttgtatacaacaatacattaagcagcagaaaacgtgcatccgtgtatgcaaatgtgatccgcaacaaaggagtagacagaacaacctatcagaattatcgcaaagcgatggaagcgttcgcacaggaagcactgatggaaggaaagatcagtgaggattacgcgacgatctatcaggaatgtatcggggagatcgccacaccggcactcggggaggcactggcaaaagtgatgttctcctatcgggtgtactgtgatgatccgaagatccgcagcgtgatcgtatgccacggagaactgaaagaagaacaaagttatccgtgtacggacggagcggcatatattcagctgtataccccggatgcgagaattctgtttgaagatgaaaaacgaagaagatatgcaacaacagtagattacaatctgcaaaaactgatggatgaagaatcctatctggagccatgcgtgacactggatgtgaccacaccgggatttttactggcagtatgccagaatgacggcaaaaaaccgatcaccctggaaacgctgggctgttatcagcacatcgtacagatgccggaattccaggagtcttatcgccatacgatatgcagaaagatcctgaaatattacgcggcacatgcgggagatgatacgctggatacctatctgaaaaagatggatctgatgacatttgcaagcgtggacaaagtgctgctgtgtgagatcctgatccagaaaggcatgtatgcgatggcactggagatcatcagccgttacggatacgaaggaatcggtgcggaaagcctgatgaagcttacgagctacctgatcctggattatgattttgtggaacaggaagaactggtctatctggcacagcatgtatttgaacagggactttacaatgaagtcatcctgctgtatctgagtgacaatctgctgggttctgtggaacagatggcacttttatgggagcggatgcgtggtttccagctggatacctatgcactggaagaagagatccttctgctttcgatgtttggccgtgtctatctgcggcagggtgctgcgatgcttgaacagtacatggcgcagaaaggaaaagaatcggtggcacttgcctatagttccttctgggcatacggatatttcctgggcaaaaaagagacagatccttatattttccggtgtctggaacagtgctgtgagagaaaactggaagtcgaccggatctgtcatctggcacttctgaaatattatgcaagtctggatacttatacagaaaaacaggaaaaactggcagatcagatcctcgaagagtgcaccgaaaacagtctgcgttttgcattttaccgcaaattcccggcaagactgaccaagccgtatcagatggatgacaaacagttcgtcgaggtacagtatccggcgggcgcaagggtgacgatccattaccgtctgatccgggacaacgacaccggtgagagttttaagagtgaaccgatgaaaaatatgtatcagggcatctttgtgaaagaattcctgttattttacggagaaacgctggagtattatctgacggtggaactgccggatgatacgagacagaccgataaaaaacttctgacgatggaagagtccttacaggagggaaatacgaagtaccagctgatcaatcagatgctggcaggtcagaaactcggacggagtgaacagacagagaaagcgatggaacagtacctgcagagagaacattttgcaagaaaaatgttcccggtactccatgcataagacacggatggaggcggaaaaatgaacgaagtcaggaatatattggtaggatttgattttggggagaaagtctcacagctgtgttattacgaccgccgtgagggagaaccggtttccctgccagtgaaggtgggaaccggacagtatactttcccgaatgcactcagtaagaagccgggagaggatgaatggcatttcggattggaagtggagtattttgtggagcagcaggatgagatcgctgtggacaatctgtatacactgtgtctcgaacaggagacggtggaagtggacggagccacatggaaggtcggagaacttctcggaaaattcatcggcaatgcgcttcgcatccttggcgttccggatctggtaaaaagcatcagcggactgatgatcaccacgccggtgctgacgcgtccgatggtggaaaacatccgggtggcatgccaggagatgggatttccaagaaaccgctgtttcctgcaggattatgaggaaagtttctattatcatacgttataccagaaaccggagatctggagccggaatgtaggactgtttatctttgatcaggatgcggtatcttatgcaaaactggagatgaaccggagcagccgtccggtgcgcgtcggcgtgagaagaggcgagcataccacgcttcatacggaagcgctgcagcgcgatgtggacttctgccagtttgtgatggaatctctggaaaatgaagtgtactcgagtatttatctggtgggtgacgggtttgaacgcgaatgggcggaaaaatccgtggcagaactctgtaagcaccagcgccgggtattttacggaaacaacctgttttccaagggagcctgctatgcggcaaaagaaaagacggaagagcggaatctgaaaggctatctgtatgtgggcaatgatctggtgcgggaaaatgtcggtatggagatgacggtgttcggaacaccggcgtatcacccgctgatcgtgtccggtgtcaactggtacgaggcgatgggagactgcgagattattctggacgatacccgggaactggaatttgtcgtgtctgatatggaaaatacaagaaaagtgcgttacagtatgtctctgccgggactcccggagcgtccggcgaaagcgacgagactgcatgtacatctggaatttaccgcagcggacgaatgcaggattgatgtgatagatatgggattcggtgatctgtatccgtcaagcaatctcacatggcatgagacgatgaagagtcggggggcagaagaatgagcggatatattttatgtcaggtaaaacgggcgaaactgccttactatattgaaaacatcagtacaaatatttattccattgaagaactgtgcttttatttttatcataacatctatctgctggacagcacgatcctgaacgaggaactgtgtttctggatccgggatcagctgggactgaaaaagctggcagacaatctgtataagcatctggatgacgatgatatgaaagtgggagattttattcttccggtgttcaaagagatcaattatctgtctctggaagagttccgcaaactgaatcagcagatccagcagcttgcaaaagaaccggaagtgctgcgccagaagcgaaaaggcgattatctgatggaacacggaaaatacgtgaatgccatcaaggtttatcagaaagcactccgccaggagacagaggacgaggcagcggtgacagatatccggaaaccggagacggttgcagcagaaaaggcagaaaccgtgcaggaggcggaaactacagaagcatcgacagaaacaaaaacagaggaagcggcagagacggagtctccggttgcgatcacgatcgatatggtggaagatccggaagagcgtgcggaaacggagaatgtcgaggaggcagagaaaccggaagaagatacatcggagacagatgctacttctttgcaggaagaaaaacaggaagaagtggcagcagatccggaacttcctcaccaggagatccttctaggaaaacagtttatcggggaaatctatcacaacatgggatgtgcctatgcgagactgtttcagatggaagaagcaatccggtgctttgagattgcctatggaaaactgcacacgatgggtgcggtgaagagccttctgtacgctgtttatatggagcatggcgtggatgctttcgtggaaaaggcaaaagagctggaagtcgacgaggaacggcaggaagagatctatgtcgaagtggaagaggctgtggaagacctctacgacactccggaaggtcaggaatataaaaagctgctggaagaaaaacagcagggaagagaagaggattatcagcagggaatgaaacagcttctggaacagctgaccgcagagtaccataagagtacgggatattgataaaaaatatcaataaaaaaataatgagaaataaaaataattgaatatcaggttaaaacgggaaaagcagagcaaaacggtgaataaaaccgatgcgctctgctttttcggcagttgcattgcatatcaataattggtccggtgaatcatttattgatggaaggtggatgttcagagaattatccgcaggcataaattctgtgcattgcgaagcagacatcgagaaggtcactccttctcaatgtccacagtacaaagacaaatttcaaaaaatgtcttgacattaatactttactatgatagagtgttaacatatgaaaaaccggagggtaattattatgaaaaagaaaacagtaagtatgatgttagcagcaacaatggcactgtccctgtttgcaggatgtggttccagtaaagatacagcgactgaagacacaagcaagaccgagagcacagacactgccgatgacagcagcgaggatgcatccgcagaaactacggatgagagcagcagaacaaccttcaccgtaggtttcgatgcagaatatccgccatacggttacatggatgatgacggcgagtacaccggatttgacctggaactggcgcaggcagtatgtgacaaagaaggctgggaactggtgaaaaaaccgatcaactgggattccaaagatatggaactgaattctggctccatcgactgcatttggaacggatttaccatgaacggaagagaagatgactacacattctccgtaccgtatgtagataacagccaggtaatcgtagttgcagaagattccggtattgaacagctgagtgatctggctggaaagaccgtcggtgtacaggcagcctccgcagcactggatctgttacagagtgaagacgaaggcggacagaaagaactggcagatactttcggatctctgaatgaattcgcagattacaacaccgcatttaccgaattacaggcaggcgcgctggatgcactggcaatcgatgtcggagttgcaaaatatcagttaaactccagaggagaaggattcaagatcctcgacgagacactgaacaccgaacaatatgcgatcggctttaaaaaaggcaaccaggaactgtgtgacatcgtaaatgcagacttgcaggaactggcaaacgaaggaaaagttgcagaactggcagaaaaatatgagatcgccgatatggtgactttaaaagcagaataagaagacggaaacgtcggataagaaaaaatgtaacccctcgggaggcgttaggctttccggggggcatgtttgctgtaaaggggcaaatgcaaagctatatttcagtatttataacacggaggataagcaatgagtattgaggtaatggtacgacaaatgatggcgggttttgggcagacctgtctgatcttttttctgaccctgattttttcccttccactgggaatgatcgtatattttggacgcgtatgccggtttaagccactaagctggctggtgaagatctatatttccatcatgcgtggaaccccgctgatgctgcagctgctgatctggtatttcggaccgttttatctgtggggcatgaatatcggcggttataagtttacagccatcattctgggatgttctctgaactatgcggcatattttgcggaaatctatcgttccggtatcgaatcgatcccgaccggacagtatgaggcagcacagctgctcggctacaccagagtacagaccttcttcaagatcgttctgccacaggtggtaaaaatcgttttgccatctgtcaccaacgaggtcatcacactggtcaaagatacctctctggtatattccgtatcttatatcgagatgtttgccgttgcaaaacagattgcagctgcacagactactgtagtaccgttctttatcgcaggtattttctactatgtatttaactatgtggtagcctgggtgatggaactgtttgagaagaaactgaactattatcgctaggagggtcgacatgaaactgttggaaatgaatcatatcaaaaaagaatttgacggactgggtgtcttaaaagatatctctctgtcggtggaagaaggagaaatcgtttctatcatcggtccttccggttccggcaaatccacgatgcttcgctgcgcgacgatgcttgaggagattgacggcggagagatcctgtacatgggaaaaaaagctgcctgggtagaaaacggcaaagtgatgcatccggataaaaaagagatgaaagagatccgttcctgtttcggactggttttccagaactttaatctgtttccgcattattccgtactgaaaaacatcacggatgcaccgatccatgtacagaaaagaaacaaagatgaagtatataaagaagccatggaactgctgaaaaaaatgggactggaagataaggcagatgcctatccgttccagttatccggcggacagtgccagcgtgtggctatcgcaagagctctggcactgaatccgaagatcctgttctttgatgagccgacttccgcactggatccggaactgaccggtgaagtactgaaagtcatcaaatctctggcggatctggatatcaccatggtgatcgtgacccatgagatggaattcgcaaaaaatatctctgaccgtgtgatctttatggataaaggtgtggtggcactggagggaacaccggaggaggtatttggtgcagaccatacaagaatgaaggaatttttaggaaaatttcatcagaactaagcttgcgtttccgggggcggtattatataattttactgttgtgaggcgtacagccgataaaatgtaagccgtccgtaaagaggcggcaagtacaagaaaaaggagattatatatgagtacagacagatatgtaagtccgttatctgagcgttatgcaagcaaagaaatgcagtatatcttttccccggatatgaagttccgtacctggagacgcctgtggatcgcactggcagagaccgagaaagaactggggctgccgatcacccaggaacagattgacgaattaaaagcgcacaaagacgatattaactatgatgtggcaaaagagagagaacgccaggtacgtcatgatgttatgtctcatgtatatgcatatggtgtacagtgcccgaaggcaaagggaatcatccatctgggtgcaacttcctgttatgtaggtgacaacaccgatattattgttatgaccgaagctctgaaactggtaaagaaaaaactggtgaatgtgattgcagagctggcaaaatttgcagaaaaatacaaagatctgccgacactggcatttacccatttccagccggcgcagccgacaaccgtaggtaagcgcgccaccctgtggatgcaggagtttatgctggatctggaagatctgaattatgtcttaagcactatgaaactgctgggttccaagggaacaaccggaacacaggcaagtttcctggaactgttcgacggagatcaggaaaccatcgataagatcgatccgatgatcgctgaaaagatgggattcaaacagtgctatccggtatccggccagacctattccagaaaagtagataccagagtggtcaatattctggcaggcatcgcagcgagcgcacataagttttccaacgatatccgtcttctgcagcatctgaaagaagtagaagaaccattcgagaagagccagatcggatcttccgccatggcttataagagaaatccgatgagaagtgagcgtatcgcttccctgtcccgtttcgtgatggtagatgcgatgaacccggcaattacttccgctacccagtggtttgagagaaccctggatgattctgccaataagagactgtccgttccggaaggattcctggccatcgacggtatcctggatctgtgcctgaatgtggtagacggtctggtggtatatccgaaggttatcgagaagagactgcgttccgaactgccattcatggctacggaaaacatcatgatggatgctgtaaaagcaggcggtgaccgtcaggaactgcatgagagaatccgtgaactgtccatggaagcaggaaagaccgtcaaagtagaaggaaaagacaacaaccttctggaactgatcgctgctgacccggcattcaacctgaccctggaagaactggaaaaaaccatggatcctgcaaaatacacaggacgcgcttccgtacaggtagacgccttcctgaaaaacgtcatcaacccgatgctggaagagaataaagacctgctgggtatgactgctgagatcaatgtataaaagactggaaataacaaaatataaaatataaaaaactccctcgattggaaaatacgatatcgtgtattccaatcgggggagtttttatttatgtgggcagagggaaaaggtagtttaatcgtcttctgccagcagatcccgctccgtcgtctctctgcggatcagcaccggtgtgatcatcttgtgtaccggttcgctgaccggtgtgtgtttgctgtttttatgctcttcaatctgctccaccagaagtttcaccgcttcagtagcgagcatatcgatctgctgagccacggtgctgatcgggaagatggcgtttcgggaggcgggggagtcgtcgaagccgacgatcaggtagtcttccgggagtttaccatattttcgtaccagcagattgaccaggatgctggcgtgggtatcgttggagacgaaaatgccctttttcctgccgggagagtccacctcgatctcggagaggatctctttcagatgctcctgggaagctgtctgatctttcatctcatggagaaagatgcggtgtggaatctgttgttccctgcaaaaatcttcaaacccttcgattcgaccgtatgccgggatacttttggcggtcggattgttgatgtggaaaagcacttcacagttgtgacgatagagcagactggtcgcctggatcgcacccatgtagttatcggtgttgatgctgctgatgtgagcatcctcccgctcgatcgctacgatcgggatatgcaggttggcaagttccatcgaagggatcgcatggcttaaaatgatcagcccctcgatcttgtaggcgagaagttcctgaatatactgccgctcggtgtcagcatctccgttacttaaaaacaccaggaatttatacccaaacgtctcataggtggaaagaatccggtcaagcatctcggaataatagtgaagaaacaggttcgggatgatcacaccgacgaattcggtctgtccgcttgccaggatccgcgccactttattttcctgataattcagcttttccagtgcgtctgcgatgattttctggttcttctcggtaagagaatccgggttattaaaataccgggaaatggttgttttggaaaaattcgtatattttgcaatgtccgcgaaggttacattctgttttcgtgccataatcgttgcctcatgcattttttttataggaacaacgagtcgaagccgtacaaacctccgacgattgccggaaaagatctcaggcatatcgtgcgcgtcagacccgttgtagttgaattgttgtaactattcagtaggtaatattccgcgaggtgttttggcatggatatgccaaaatcccgagacatacgagcaaaaatgccatcaccgaaggtgatttcaaatgcatttttgcttgtaactgtgaaggtactgaacagttacaaatcgtttcaatttcttaatccagtatagcaaaaaaatctcaaaaaaacaaggaaagagcgagtaaccggtaacactattcaaaaaaaacggaaatgaaaaatctgagaaaatattgacgaaaatacaggtgaatgatatgatgaaagaaaaagtaaccggttactttaagcagcgaaagaaaggaaacgataagaatgaaagatcttgtacatgtaaaagctccgggaaactggatcaacgatccgaacggttttatctattacaaaggcaaatatcacctgttttttcagcattttccgtatgcgccggaatggggaaccatgcactggggacatacggtcagtgaggatctggtgcactgggagtatcagggaatcgctctgtttccaaccaaagaatatgatcagaatggtgtgttttccggtactgcactggaagaagatggtaagctgaagatttattacagcgcggtaaaatatctgaaaccaaacccggaagatattcaccgggtactggacgatgccattcagacgagccaggcaatgatcgtatcggaagacgggttccattttaataactgggataaaaagaaggtgctgccgactgttcatgatgaagaggtcggagagccgaagatgagagatccgaaggtgtggaaagacggagacagctattatatgatgatgggaagttcgtatcatgacgccggaagagttctcttttatacgagtaaagacggagaaaactggacttacgcaaatcagtgccggccagaatcatacggatggacgatcgagtgtccggatctgttttctcagaatgatcagtgggttttcatcggctgtccgatgcgtctgacaccaggggagaagaaatatccggaccaggctgtatgggcgctggcggaatttgatccgaagacctgtgaactgaagctgccggatactcacagttatgtggattacggtctggatctgtatgcaccgcagacgacactggatgcggagggaagaagagtgatgatctcctggatgcgtatgccgatggcagtgacagacagtacggatcgcccggcatggaacggtatgatgagtagtgcccgcgtggtggaagaaaaagagggacatctgtatttccacatgcatccacaggtggacgcatacctcagcgcggaaactacagccgaagaggcagcagagagtggaaaagtcttccggatccggacggatctttctgagggagaaaccttaaatattggcgggtatgtgatcagccgcagcgaaggaaagatcgttggcgaccggtcagccgttcttgaaggatgtgacgaactgcgaactgttgatgcgactccggtgatcgagggtgcggcacagctggatattctggtgaacgatcatctgattgaaatctttgtcaacgatggtcagtatgtgctcagccatgtggtttacggaaaatcgaaaaagatttccggaaaatatgaaaaagttctggtgggaaaataagaaagatggtatacttattaaggaaatttataattgactttaatttataagtaataataagttttactaataagaaaagtgttgtataatcatttttgtaaagaaaatgatgataacccgtcaggaggtaaccaaatgattaaagctgttgttggagcaaactggggagatgaaggaaaaggtaagattaccgatatgctggctaaagaagcggacattatcgttcgtttccagggtggagccaatgccggacataccatcgtaaatgattacggcaagttcgcactgcatactctgccgtcaggtgtattttataatcataccacaagcgtgatcggaaacggtgttgcactgaatgtaccactggttttcaaagagatccaggatatcgtatccaaaggggtaccgacaccgaagatcctgatttccgaccgtgcacagatggtaatgtcttaccacattctgtttgatcagtacgaagaagaacgtctgggtggcaaatccttcggatccacaaaatcaggtatcgctcctttttattctgataaatttgcaaagatcggttttcaggtcagcgagttgtttgacgaggaagcgctgaaagaaaaagtaacaggcatctgcgagaaaaagaacgttatgctggagcatctgtatcacaaaccgcttctgaaaccggaagagatttttgaagagctgatgagctacaagaagatgctggagccatatgtatgcgacgtatctttgttcctgtggaacgcactgaaagaaggaaaagagatcctgttagagggtcagctgggatccttaaaagacccggatcacggtatttacccaatggtaacttcttcctctacactggcaggatacggtgcagtaggagcaggtgtaccgccatatgagatcaagaaaatcatcaccgtatgtaaagcatactccagcgcagtaggagcaggagcattcgtatccgagatcttcggagacgaggcagatgagctgagacgcagaggcggagacggcggcgagttcggtgcaacaaccggaagaccgagacgtatgggatggttcgatgcagtggcttccaaatacggatgccgtatgcagggaactaccgatgtagcgttcaccgtactggatgttctgggatatctggatgagattccggtatgtgtaggatacgacatcgacggcgaagtaactacagacttcccgaccaccacactgctggaaaaggcaaagccggtgtatgaaactctgccgggatggaaatgcgatatccgcggtatcaagaaatacgaagatctgccggaaaactgcagaaaatacatcgaattcgtagaagagaagattggtttcccgatcaccatgatttccaatggcccgggaagagatgatatcatctacagataagaaatgctataccgggattgctttattgctgtgcaattttgcaatcctcaaaaacaaatagaaaacggggagcttgcataagcaggctgagaggagactggcagcgtttcgacccataacctgatttggataatgccaacgtagggatgatttacagagaaaaacaggcacaccatccttttggtgtgtctgttttggcttgcgttgcatatcaataattgatccggtggatcaattttgatacgcgagtaatgagccagaatccatgcttgcatggaattatggcgaataccgcgaatgctcatgaaacatgcaaagcatgttttatgagctgatataagcggcggattgggggcaccacctttcgtcgctataaaaaagtaatggtgaatttttcatatgcaaaggagaaaaaatatgagaacagcattaacaatcgctggcagtgattccagcggaggcgccggcatccaggcagatatcaagacgatgatggccaatggcgtatatgccatgagtgcgatcacggctctgacagcccagaatacaaccggcgtaacagcaattatggaggcaacagacgaattcttaggagaggaactggataatatatttaccgatatctttccagatgcagtaaagatcggcatggtttcatccaccggtctgatcataaagattgcagaaaagttaaaagaatacaaagcaaaaaatatcgtggtagatcctgtgatggtggctaccagtggagcgagactgatcagtgaagacgcagttagtacgttaaaagaatatctgtttccactggctcagattctgacaccgaatatcccggaagcagaagtactttccgggatgtccatcacttcggaagaagagatgatccgggcggcaaaagtgatcggtgaccagtacggatgtgcggttttattaaaaggcggtcataaaatcaacgatgccaacgatctgttctaccatgacggatccagccgctggttttacggaaaacggatcaacaacccgaatacccacggaaccggctgtacgctgtccagtgccattgcttccaacctggcaaaaggatattccatggaagtatcggtagagcgggcgaaagcttatatctcaggtgctctggcagcgatgctggatctggggaaaggaagcggaccgatgaaccacgggttcgacattaccggagaatatgtaaaggaggcatcggatcatgagtgagaaaagaacttctttatttgaaaacggcctgatctggttcggtgccggggtatcaatcgcggagattttgaccggaacgtatctggcttcgctgggcatgaaaaagggattggcagcgattcttgtgggacatctgatcggatgcatcctgttgttccttgcaggtgtgatcggtggtaaagtaagaaaaagtgccatggaaaccgtaaagatcagttttggacaaaaaggcagcctgttttttgcccttctgaatgtgatccagctggtgggctggaccgcgatcatgatctatgacggtgcgctggccgccaatcaggccgccggtgtgggcaactgggtctggtgtctggtgatcggtgcgctgatcgttttatggatcgtgatcggtatcaccaaccttggaaagctgaatacggttgccatggcagcattattcatccttaccctgattctctgtaaagttattttcttcggagattatacagcagagaccgtggcagctgatggactgacctttggcgctgctgtggaactggcagtggcgatgccgttatcctggcttccgctgatcagtgattatacgagagaagcaaaacagccggtaaaggcaaccgcagtcagcgctatcgtctacggtgtgatcagctgctggatgtacctgatcggtatgggagcagccatctataccggcgagagcgatatcgcccagatcatggtaaaagcaggtcttggtatcgtgggactgctgatcatcatcttctccaccgttactacgaccttcctggacgcgtattccgcaggaatctccagtgagaccctcagccataagctgaacggaaaatatatcgccattgcggttactgtcgtaggtgccctggcagctatcgtatatccgatggataatattacaaacttcttatatctgatcggttccgtattcgccccgatgatcgcgatccagatcgcggatttcttcttattaaaggaagattacagcgaaaaagaaattcagatctccaatatggtactgtgggtaatcggcttcatcctgtaccggattctgatgagaatagacatcccggtaggcaatacactgccggatattgcgatcacggtggtactgtgtctgatctggggaaaaatcagtaaaaagaaatagaaaataaaaatacagatatagtaaagtgattgggatagccagaaaagtaagcggatatccagtcggaaaagtgtatctgaaaaacgaaagacgtgagtcatagaaataagacttacgtcttttttagacgtattacatatcatgaattggtctgcagcattgaaaacccagtccccggcggaagcgttctccttgcagcaatactttgtgggcgcttagggtaagctttaagatccgacacctacatagacttaggctcgagcgctctcgcgagagtcttagtcgaagttggtggctagcttaaagttaccctgcccacgttgctgcaaggagaacgcttccgccggggacgtcccctttttcaatacaacccaacgggaaaaggcgcatacctttggagagaggtatacgcccttgcgtaagaaaaatgtgatgtatgtaatcggagaagtgatacttcttccgcgattactgatttggtatatccatcggatagtgattgtcaaagcaggccttacacagcggcaggtcaccgaccatcgactggagatcttcgatcttcatatatcctaaggaatcagctccaattaactgtcggatctcttccgttgaatgggaagaggcgatcaacagctgattggacggtacatcggtaccgaaataacatgggtacaggaaaggcggtgagctgacgcgcacatgcacttcttttgcaccggcatgtttcagaaggtggatcagattggcgattgtagttccacgcacgatggagtcatcgaccagcacaatattttttcctttgacagcggattccagaacgcttaatttcagacgtacactggattcccgttccttctgagtaggcttgataaaggtacggcctacatagctgtttttatagaatgccagtccaaaaggaattccggattccgccgcgaatccctgtgcggcagtaattcctgagtcaggaacaccgacgaccaggtcagcatctgcgggataggctttggcaagcgctgcaccggcacgaagtcgggactcatatacggagatgccgtccagtttgctgtccagacgggcaaagtaaatgtattcaaaaatgcaatgagcctgccgggactgacataaggtaaggttagaggtgataccttcccgggtgatcgttacgatctcaccaggctggatatcacggaggaactgtgcaccgattgcagtcagtgcacaactttcagaggcgatgatataagaatcatctctcttaccaagacaaagaggtttcagtccaaggggatcacggacaccgatcagcttgcgggggcttgcgatgaccagaccgtaagcacctttgatcttttcggcggtcttcatgatcgcctcctcggccgatttggtacggactctttctctggcaatataataagcaataacctctgaatcagttgttgtatggaaaatggctccgttttgcgcaagttcattgcgaagctcttctgtatttaccagattgccgttatgagcgagagccagagttcccttaatataattcagaaccaggggctgagcgttactcaatgtagccgcccctgtggtggaataacggacatgcccgataccgagatttcctttcatatttgaaagaacatcttctttaaaaacttcactgacaagtcccatccctctttgtacattcatatttcccttgggaccgctggtgtcaaacacagcgattccgcaggattcctgtccacggtgctgcagggaagagagcccgtaatagatggaagaggctgcatcttccccgtggggattataaataccgaatacaccgcaggcttctttaatccgttcatcctggcacatagattccacctcactacagggagaacaaaagctgatcgtaagtaggatagctcaggatagaatccggaattaaagcttcaatatcactggcaacagtacggatctcttccatcttagccagtacctgatcatggaatgcttctgcacatttctgggtatcttccagagcgaaagaagtatcgatcagggttttcagttctgcaacatctgcagtcagagcagtgtaagcagtggacagtttttcaaccagtgcttcttccgaagcagtatcagcggcagccataaaggatttctttgccgctgcgtttttggaaacctcagcggcataggtgctgacagccggcagaaaatctttggtgatcatctctgccagagtacgagcctcgataccgatggtttttacatagttttccagtttgatttcataacgggaagccagttcttcttttgtaaatacatgatgtttggtgaacagttccacgtttttatcagctaacagctgtggcaggcagtccggagtagatggcagattgtataatccgcgtttttctgcttcagcaacccactcgtcggtataaccgttgccgttgaagatgacttttttatgtttgcggatggcacgtttgatcagttcatgtacggcctgttccatatcttccggtttggttccttccagttcggtgtagaactgagccagagcttctgcaactgcggtgttcagtaccacgttcgggtttgcaacagatgcagcagaaccaagcatacggaattcgaatttattacctgtgaaggcaaatggtgaagtacggttacggtctgtggtatctttcacgaagtgtggaagtacatgagcaccgatatccagctgtacttttttctgttttccgaagaacgtatcgttttcgatggattcgagaactgcggtcagttcatcgcccaagaagatggatacgattgctggcggagcctcgttacctcccagacggtgatcgttgccggcgctggttgcagatacacgcatcagatctgcatattcatcaacggctttgataacagccatcaggaataccaggaactggatgttctgtgccggtgtgcttccgggatttaacaggttgtcgccatcgctggttacgagagaccagttgttatgttttccgcttccgttgatgccttcgaatggtttttcatgtaacaggcataccagaccgtgtttgtcagcgacttttttcatgatttccatggtcagctggttgtggtcaacggctacgtttgcggtatcaaagatcggagccagctcatgctgtgcaggagcaacttcgttatgttttgtttttgccgggataccaagtttccacaactctacatccagatcatgcatataagcagcaacctttggtttcagggaaccaaagtaatgatcttccatttcctgtccttttggagcaggtgcaccaaacagagtacgtccgcagaataccaggtcttttctcttcttatacaggtctttgtctaccaggaaatattcctgttccggtccgatcgttgtggacacgctggtaacggtttcatttcccaggagtttcagcatctttactgcttctgtgttcagtgcttccatggaacgaagcagtggagttttcttatccagtgcctctccgctgtaagagcagaatgcagtcggaatatataaagtaccatctttaatgaaagccggtgaggtaggatcccatgctgtataacctcttgcttcgaaagtagcacgaagtccgccggatgggaaactggatgcatccggttcaccttttaccagttcttttccggaaaagtccatgataacttcgccgtcaccaaccggtgtgatgaagctgtcgtgtttctcagcggtgaaaccggtcattggctggaaccagtgtgtgtaatgggtagctccgttttctaccgcccattctttcatggctacggctacggaattggctacgtccagttccaggtgagttccgttttcgattgttttacgaagggctttgtacatgtccttcggcagtttgttacgcattaccttatcgttgaatacaaggcttccatataaagcaggaatttcttcatgtgtcatggtttgttctcctttctgattgcccagattgttttcagaatatcaaaagacaaaaaaggcgccctgaacctgtttccaagttcaaagcgcctttgctttatgccatgtagtatacacggaaattttcggttgtcaatccctgaattgaaaaaaattaaaaaaatttacggattctggagaaacaatcccgaaagacattgatgctgatcagatggtgatccgggtaggataccgtttctccacaaatgatacggaatggacacagatggatgttccgtatgcaccggaagacagcaggatctatgtcatgacagaggtgatcaccgaggaaaatcaggtactggatacgacaaaggtactgaactcggatcagcatctggaagagggaaccatgctgaatcttctgcggtatcaggtgatgtatcttggggaaaacagactgacaacactttttccgggctggagtgaggatggaaagctggtggactggtattatatagccaccgtcggccgtcacattctggaaccggaagatccggtggcactggatccggcgtacacggttcagctgcgacaggtgtggatgtcagatacgtttgatgtcggttggcagtataataacctgtgctacctgcaggcactgaccagcgtggaagagagtgcgttgcaaacagccggagagagcgagacgcgtctggaagtaccggaatatatccaggcggttatgatggacgatgatgccaatatttccgtggattatctggatatcccggatacggttctttacattgccggaaataatgacggactgaaagtaaagaagggttattcggtaggtgagaacaatccgtgctatgcgatggcggatgacggagttctgactaacaaaagcggaacggagtatctgaacattccgtatgaaaaagaggagataacggtaaaagaaggcgttaacaaagtctcagtcagcgagaaaaatgagatccagacccttaaaatcgatgcgtcctcgatggaggagatgccggagatctcgtatgaaaatctgaaaaactgtaagattctggtaaaagatgacctgctggaagaatttatgaaggaaaactgggacagcctgaaagatgatccgggaaactgtgttgctgcgatcagtgaaccgacccggatgtatcggatgaaatatggctgcatgatcgatcagaacggttccatgcggcgtctggttgatgcaacgggaaataaagtgcagctcgcatcggaagtaaccaacattgaggaaggtgcttttgatggcgtagagaatgttacgacactgctgatgccgaaaaacggagaaaatatcgggatcgaagaaaactgtttccaaaacagcgggatccggaagattctgtgctatacaaagttacagtaccgggtggtgcaggaacagctgaagggttccggggcatcagaggatgttgaagtggaacttctggcaacttccaaggaaggatattcctatgccgtgacggaagaggacggagaaaaagaagtcacgctgatttccgttccggacggtttgcagagttttgacggagtcatgacggatcaggaaggcaatccgattacaatcacggcagtggatgattatgcattcagcgaagccggggatctggaatgggtaagtttaccggagagtgttaaaaagatcggctatgaggcgttcggaaactgtacggcactgcagggtgtgatcatcgaatcacgggatgtgatcgagatcggaaatcaggcatttgacgggtgtaaagcactccgttttgtggcgtccaatgcgccacagggcgtgatggatgaggattacgatccgggactcacagatacttttggaaaccggacattttttacgccgacgaattcagaaggatattacggaaacatctggtttaccgaagaatcaggagtgtattcatttgaggtcgtggaagtgggcgaaacaggaaaggcactttacggaaccaatgcggccggagaaccgtggctgctgcttcgttccggaggacatctggatgcacaggtcagtctgccggataccacgttggagatctggagccaggcactggagtataccaccacacaaagcggacggtataccgtcaactgggaaaatctcggtcagctgtggatcgacagcggtgcattttacagttcgcagctgggaggtgatattacactgagcgacagctgctacctggcaagctatgcggtgtataactgtgatcagcttaccagtgtgacgatgggagataatatcggacagatcggtgagggcacgtttggcggctgtgacagtctgacaacggcacagtttggcgcgatgcaggacagcgtggcactgtacagcggtctgttcaatgactgtaatcagcttaccagcattacgatcaatgactacacagctccaagtctggtcgttttgggaacttccggtttccagtttaactttggctggacacaggaggaagaagaagccaatctgaagatccggattccggaaggcagtgaagtgaattatgtgaaaaaatggcggtatttttatgccggctatgtggaatccggggattatccggcatatctgaatatgtggtatgatatccgatatcagcatatagactggatgacctgggaattcccttcggatgaagaggtggatgaactggtggaggcagctcttttgtcggcagaaaacagaatccgcaggatgatcggaaccgaaacagtgagcgaaccggtagactattatccgtaccatctggacaatgaagggatgctgtcactggcgggaacaccgtcggatatcaccgttatgaatctgtggatgcagctggataactggttcctggattacattggaaccggagcctttaagcgtgcaaaaaatctgggtatggtactgatcccggatatgatttccggtatttttaccaatgcatttgacggcgtggaaagcgattccctgatgctgtattttatgtcggagacaccgccggcactgaaaggatggtctgaagagcacccgtttgtatttggcacgacgagtacgccgatctatatgatgctgccggatggaagcgaggagacttatatccagtcctggatcttcccgatggcaggttatgaggatcttgcggccatgcgtgagagtataaaagccaaactggcagaggcaggagaggatgattcggatcaggcagtggatatcgaggtggcaaaccgtttacttccgctggaaaaccagctgcgcgccatgatcggtatggaacagatcacggatccgaaggatctgagtgtgacgctcgacaatctgccggacagtgaagaggcggaaacagacgaggaactttccggatcggaagaggaaacgaaagagacggacggcgtacaggaagatcggaagaaagaagagacagaagaagatccggacacagaacagaagacggaggattcttcaaaggaagagaaacagaacccgacgggtggcagtgcggaaaaggacgctctgacatcggaggaaacagaaaataaaaaagaaaatcaggaaaatacagatactgccggaaatggtagcggagaggagacacaggaatgatagtagaacagtccaagcagatcattgcggaggtaaataaggcatttatcggaaaaaacgatattatcgaaaaaattctgatgacgatttatgccggaggacatgtgctgctggaggattgcccgggggttggaaaaaccaccctggcactggcattttcaaaggtactgggacttagctgcaagcgtattcagtttaccacggatacgctgccgtcagatattacagggtttacgatgtttaaccgggaaaccaacagttttgaataccgtgacggtgcggcaaactgtcagctgcttctggcagatgagatcaaccgtacctccccgaagacacagtcggcacttctggaagtgatggaggaacatacgatcactgtggacggaaagacacatcatctgccgtctccgtttatctgtattgccacacagaacccgctgggatttgctggtacgcagccgctgccggagtctcagctggaccgttttatggtgtgtctgtcaatcggctatccgacactggaacaccagatgaacattatcaatgcacagcgttatcagaatccgttacaggagctgcagccggcaacgacggcgcagaacgtgatcgaggtacagaattatctgacttccgtacagatgaccgaggatgtgctgcggtatgcaatcttactgtgtgaagcgacaagaaatcatccgctggtagagctgggaatctctccgcgaggtgtttccgctttggtaaagatggcaaaagccagcgcgatcatccggggaagaaactacgtgattccggaagatgtacagaatgtctacacagatgtgtgtgcacaccgtctggtacttcgtccgcaggcacaggctgacggaaaggatgccaggatgatccttcaggaaatcatggatgacatccgtccgaaggcagaaaggtagaaggctatgtggaaaaatcggctggcctatgggtgcttggcaggaatccttgcaatcttgttatttttctccggcaaatcgtttctgctggtggctctgctgctgtcactgctgttgatcccggtgtttggaatcctgatccggagagacggaaagcgcataaagatccgtctggaaaaagaaaaaccggtggcggctgccatatattcgaaaggtgcgctccgggttgctgaccgggtgcagatcgaactggaagtgaaaaatgagatgtttgaccggagcgaatgtctgcaatttctgctgccactgaaaggaaaggaacagacgtttttcctgccggtggaactgcagctgtgcgggcagacacgtttcgagtgcacccgtatgtgggtgatggatcttctgggtcttttccgcattccactgaaagcgggacagaccttttatacggtactgtatccgccgaagatgcgtgtacagatggagcggattgcgggaacggtaggatcttctcagacagatggatttcttcagaacagaaaaggaaatgatccaagcgagatgtttgaactgcgggaatatgcaccgggggatgacatccgtgctattcactggaaactgaccagcaagacggatgatctggtgatccgtcaggcgagtgatccctcacatcatacactgttgctgctcccggactacgggctggatcagctgaacagaccggatggagaggcagagatgaatacggtcatcgctgtgggcgtggaggctgcgagagagcttctgaaaaaaggaagaggcttctgccttgcgattcccaccagaaacggacttcagctctatgagatacagaatgaaaaagaattttccaggatacttccgcagtggctttccattccggtacaggcgatcgggggtacgggactggaatatttccagatgcagcatctggaacagtattttaaccggctggtgatcctgtcctgtggagattatgagaaaggggtacggggactggaacagaagattggtatcacggtgatccagtcattagcgaaaaaaggactctcctacaccagcctgaagcagaatggtatgctgatcgagatcccggcaggagaaaaacaggaagaaacctatcggattctatgttaaaggggaagaagagatgaagcagaagacaaaagaaatacagatacagaacatccccttgcaggaacaaaataaagaataccagctgatcctgtgggatatctgtctggcgctggtactgatgaccggaagtctgatctcttttgtggagagttggggacagaagaccggtatggggatcctgatcgcggtgacggcagggatcggtctgctgggaagtgtgctggcacaacagtacgggaaaaaaacttctataaaggggatactctacgggattccgtggctgctcctgctgatcgttaccgggtttcacggatacctgaccggattcctgtcctggatcaatgcgatcatcaccggatggaatctgtcacaggagggcggtgtagccctttttaacgtgcagaccacggaacagaatgtgcaggcattttccctggtgacggcacttgtcctgggagaggggattctggttctggtaaaaaagaaacagcggatcgtatgtatggtcatggtgacggtgtggatcgtcatacagcttgtcggagctacctataacccggttgcatgtggattcatgctggcaggactctgtggcatgtggatcgccggaagaaaaacctggattacgaaaagcatggtggtctgggcgctgggaatcgccgttttattatgtgcggcgggtatgatcagtgacagagccggtatggaaaccgtcatggatttccgggaacaggtagaagaaaaagtgcatgagatccgttatggaaaagatatcctgccggaaggagatctgtatcaggcaggcaaactgcatgcaagtacggaagtaatgctggaagtacagggtcagcaggaaaagaatctgtatctgcggggatttgtaggaggcagttatcagaacggacagtgggaagaaatgtctgatgccgcctacagcggaaaaaatgcaggaatgtttacctggttaaaggcgcggagttttgatccgctgacacaggttgcagcatacaatcagttaggggaagaacaggatgtaccggaggggaatcaggtacaggtaaaagtaaaaaatgcgtcccgctattatgtttatgcgccggtttcctatgtccggatgatcaacggcagtgtaaaagaagaaaaagacagtcgactggcaagcagaggactttttggaagccgttcgtatcgctgggaggagatctcaggaagcagaccgggcgaactgacggttgcggataactgggtagaagatccggatacggatcgtcgacaggaatatcaggaggcagaagcggtctaccgggaatttgtttatcatacctataccacgatagatagtgacatgcagcggctgatgcagcggattttctgggatgattacgagacggacagtgacggtatctacagtgcgttaaatcagatccggcaatgtctgagcagtgagacaacgtataccgagatgatgccgcagattccggagggagaagatccgatccgctggttcctgacagaaggaaaacagggaaatgatgtttactatgcggcagcagccacggaagcatttcgcgcctatggaattccggcacgttatgtggagggctactatttatccgcggatcagatccaaaaagaagaaagtggagccaacaccctgaccggtgcggacgcacatgcctgggtggaggtctattttgatggtgtgggctggctgccattggataccacaccggggtattattacgatgcggtatccttacagcagatgatcagtgcaccggatcaggtcaataagaatgcggtactggaagatccgtcatttgaagccaatcaggcgaccgatactacgggatcaagaaggaacggagatgcactcaaacgtgtggctgtccgcatgggagccgttatactggggggtgtcacgttgttgatcattcttgctttggtgctgctgggagtccttgagatcggaagaatctgggattacgaatcgatgcaccggaagtatgaacgggtggatcagaaggagaagattcatatgatgtccgagaagatggaaaaacttctggaatttctcggaatttcgatgagtcttggatggaagaccgacgaagtggacgaaaaaatccatgaaaaatatccgggtgtggaagccggttcgtatcttcgtgtctgcaggatcatggaaaaatccctctacggacagatggaactggaagcctatgagatgcgtaccatcgacagctttatggaaaagctgcaggagatcggaaaagaaacactcgaccgaaagggcagaatcctgctccgttatggctatgttgcacggataattggaaaaatccgtcgaaaaacagggcaaaaaagaaaaaacaaaaaaaacgacagaaaagaattgacaaaataaaaggaaagagacataatagtagcattaaaaaaacactgacaaaggcgtcagagatccgaaagggtttctgacgccttttttactttttagttttttcaaaagaggaggaaaatgtgatggcagtaaagtatgtgtttgtaacaggcggcgtggtatccggtctgggaaagggaattacggcagcttccctgggaagacttctgaaagccagaggttatcaggtgacgatgcagaagtttgatccgtatatcaacgtggacccgggtacgatgaatccgattcagcatggagaagtgttcgtaacagacgacggtaccgagacagacctggatctgggacactatgaacggttcattgatgagagcctggacaagaactcaaacgtaacgacaggaaaaatctactggtccgtgcttcagaaagaacgccacggagattacggcggaggaaccgtacaggtcattccacatattaccaatgagatcaaagatcatttttataaagcaaagtcagaggatgaaaaccgcattgcgatcatcgaggtgggtggtacggtaggtgatatcgagagccagccgtttttggaggccatccgtcagttccagcatgagatcggtcatgagaatgcggttctgatccatgtaaccctgattccgtatctgaaagcatccggagagatgaagacaaaaccaacccagcagagcgtcaaggaactgcagggaatgggactgtggccggatgtactggtatgccgaagtgaatatgagatctccgaggagatgaaagccaagatcgcactgttctgtaatgtgccggtcaatcatgtactgcagaacctcgatgtggagtatctgtatgaagcaccgcttgccatggagaaagaacatctggcacaggtggtatgtgaatcccttcagctgacttgcccggaaccggatctgaccgactggaaacagatggtagaagacctgagaaatccgatccacgaagtggaaatcgcaatggtcggaaaatacatccagctgcatgatgcctacctgagtgtggtagaagcgctgaaacacggcggaatcgcagcccgtgcaaacgtaaagatccgctgggtagattccgaagagatcacaccggaaaatgtagctgaaaaattaaaaggcgtggatggtatcctagtaccgggaggtttcggaacccgtggtacggaaggaaagatcgaagcgatccgctatgcaagagaagaaaagatcccgttccttggcatctgcctgggtatgcagatggcaattgtagaatttgccagagatgtgatcggatataaagatgccaacagcatcgagctggatccggaaaccacacatccggtcatcgcactgatgccggaacagaacggtgtggaaaacctgggcggaacccttcgccttggtgcttacccgtgtgtcctgaaagaaggaagcaaggcaagagaattatacggaactgaagaaatcagcgagagacaccgtcaccgctatgaagtaaataacgactatcgacaggaactggaagaaaatggaatggtactttccggactgtcaccggataaacgtatcgtagagatgcttgagatcccgggtcatccgttctttgtgggaacccagggacatccggaactcaaatccagaccaaaccgcgcacatccgctgttccgtggactgatccaggcagcagtagcgtatcaccagtgagaggagaaaatgtgatgaaagaaaatcagggtttatatcgacagcaatttgagcatgataactgtggtatcggagcagtcatcaacagcaaaggcatcaaaagccacaccacagtagaaaatgctctgaaaatcgtagaaaatctggagcatcgtgcaggaaaagatgcagagggaaagaccggagacggtgtaggtatcctgctgcagatctcccacaaattcttcaaaaaagaatgtgacaaactggggatcgcgatcggagaggagagagagtatggtatcgcccagctcttcttcccacaggatgaactgaaatgtaaccaggcaaagaagatgttcgagatcatcgtggaaaaagaaggtctggaacttctcggttaccgtgaagtcccggtttatccggatgttctcggtcataaagcgagagtctgtatgccgcacatcgtgcaggcgttcatcaaaaaacctgcccgtgtggaaaaaggactggaatttgaccggaaactgtacatcgcccgccgtgtctttgaacagagtaatgaaaatacgtatgtagtatccatgtccagccgtaccatcgtatacaaaggtatgttcctggtaggacagctgcgtaccttctttggcgatctgcaggacaaagactatgaatctgccatcgccatggtacactcccgtttcagtaccaacacgaacccgagctgggagagagcacatccgaaccgctttatcgtacacaacggtgagattaacaccatccgcggtaatgccgataagatgctggcgcgtgaggaaaccatggaatcctcccatctgaaaaatcagctgcacaagatccttccggttgtagataccagaggatccgactctgcaatgcttgacaacaccctggaattcctggtaatgagtggtatgccgcttccgctggctgttatgatcacgattccggaaccatggaccaacaataagacgctggatcaggatgagagagacttttatcagtattatgcaacgatgatggagccgtgggacggtcctgcatccatcgtattttccgacggtgatctggtcggtgcggttcttgaccgtaacggtctgcgtccatcccgttactatgtattaaagagcggtgatgtgattctggcttctgaggtcggtgttctggaagtaccggaagaagagatcgtgttaaaagagcgtctgcatccgggtaaaatgctgttagtagacactgtaaaaggaaaaatctatcaggatgaggaactgaaagaaatctatgcgacaaaacagccatacggtgaatggcttgacagcaacctggtagaattaaaagagctgaaaatcccgaacaaacgtgtggaagaatacggaaaagagcagagaaaacagctgcagaaagcattcggctacacctatgaagaatataaaaattccatccgtaccatggcattaaacggtggagaatcgatcgcagccatgggtgtggataccccgctggcagtactgtccgagaaacagagaccgttatttgactatttcaaacagttatttgcccaggtaaccaacccaccgatcgatgcgatccgtgaggagatcgtcaccagtaccacgatctatgtaggaaaaaaaggcaatctgttagaggaaaaaccggaaaactgccaggtattaaaaatcaacaatccgatcctgaccaataccgatatgctgaagatcaaacagatgcacaaaccgggattcaaggtagcggttgttccgatcacttactataagagtaccaaactggaacgtgcgattgaccgtctgtttgtggaagtggacaaagcgtacaaagacggtgcaaatatcctggttctttccgaccgtggtgtggatgaaaaccatgtgccgatcccgtccctgttagcggtatctgccgttcatcagcatctggtaaatacaaagaaacagacctctctggcactgattctggagtccggagaaccgagagaagtgcatcattttgcaaccctgttgggttatggtgcatgcgcagtcaacccgtatctggcacaggacagcatccaggaactgatcgaagagggactgcttgacaaagattattatgccgcagtggacgactacaatgcagccgttctgcacggtatcgtaaagattgcttccaagatgggtatttccaccatccagtcttaccagggcgcgaagattttcgaagccattggtatctcacaggaagtcattgataaatatttctccggaacggtcagccgtgtcggcggtatcaccatggaagatatcgcaaaacaggtggatgagagacattctcaggcatttgacccgctgggactggcaagtgatctgacactggacagccttggaaaacataaaagaagaagcggtggagaagaacaccgttataatccgcagaccattcatatgctgcagcagtccacatggaccggaagctatgacatgttcaaacagtataccgcgatggtagacgaggaacagagcggctacctgagaagcctgatggactttaactatccggaaaacggcggtgtgccgatcgatgaagtggaaagtgtcgacgagatcgtaaaacgattcaagaccggtgcaatgtcctacggttccatttcacaggaagcccatgagacactggcgatcgcgatgaatcatctgcatggcaaatccaacaccggtgaaggtggagagagtgatgacagactggattccgcaggaagtgacaatgacagatgttctgccatcaaacaggtggcatccggacgtttcggtgttaccagccgctatctggtaagcgcaaaagagatccagatcaagatggcacagggtgcaaaaccgggggaaggcggacatcttccggcgaaaaaagtatatccgtggatcgcaaagacaagacattccacaccgggtgtaagcctgatctccccgccgccgcatcatgatatttattcgatcgaagacctggcacagctgatctacgatctgaaaaatgcaaacaaatacgcaggcatctctgtaaaactggtttccgaagcgggtgtcggaacggtagcggcaggtgttgcaaaagccggtgcacaggttatcctgatctccggatacgacggaggtaccggagccgctccggaaagctccatccacaacgcaggtcttccatgggagatgggacttgcagagacacaccagaccttgttacagaacggtctgagaaatcgtgtcagaatcgaaactgacggtaaactgatgagcggccgtgacgttgccatcgcagcactgctcggtgcggaagaattcggttttgcaaccgctccgctggtaacgatgggatgcgtgatgatgagagtctgtaacctggatacctgcccggtcggcgtagctacccagaacccggaactgagaaaacgtttcaaaggaaaaccggaatacgtagaaaacttcatgcgctttatcgcacaggaactgcgcgaatatatggcaaaactgggtgttcgtacaatcgatgagatggtaggaaaaagcgacctgttaaaagtaaaagaagacgcaaaaacaccgatggcagcaaagatggatctgtcacagatcctgtacaacccatatgtgggagaaaaagagagtgtgaccttctctccggaaaaagtatatgatttccagctggagaagactctggatgagaaagtgctgttaaagaaactggagaaagccgtagaaaaaggaacgaaagcttctctggatctgaaagtcggcaacaccgaccgttccttcggtacgatcctcggagcagagatcacccgtcagcacaaagacggaatgccggaagatacgatcaccatcaactgtaccggtgccggcggacagagcttcggagcatttatcccgaaaggactgactctgcgtctgtgcggtgataccaacgattactacggaaaaggactttctggtggtaaactggttgtcttcccgccgaagaacagaggatacaaagcagaagaaaatatcatcgccggtaacgtagccctgtatggagccaccagcggtaaagtatttatcaatggtgtggcaggtgaacgtttcgcagtccgtaactccggtgcctacgcagttgtagaaggtgtgggagaacacggatgtgaatatatgaccggtggtcgcgtggtcgttctcggtaagaccggaaagaactttgcagcaggtatgagcggcggtatcgcttatgtactcgacgagaacagccatctgtaccggaacctgaacaaagatatgatctccattgaaaaagtggaaaataaatacgatatcaaagaactgaaagaactgatcgaggaacatgtggaagccacaggatccgagagaggtgcgctgattctggaacatttccaggagtatctgccaaaattcaaaaagatcatcccgaacgattataagaagatgatcgctctttctgcaaaactggaagagaaaggtatgagcacagagcaggcacagatggaagccttctatgaaagtttccagaccaaatcggaggagtaagaaaaatgggaaaagcgacaggatttttggaatatgaaagaaaaaacgcagcagtagaggaacctttgaaacgaatccgtcattttaacgaattccgtactccactgccgttagaggaacagcagaaacagggagcgcgctgtatggagtgcggcgttcctttctgccagaacggagccatgttagctggcatggcttccggctgcccgctgcacaatctggtaccggagacgaatgatctggtatacagtggcaactggaaacaggcatatgagagactctcgaagacacacagttttccggaatttaccagccgtgtctgccctgcactctgcgaggcagcctgtacctgtaatctgaacggaaaaccggtatctacaaaggaaaatgagcgcgcgatcatcgaacacgcatacgagatgggctgggtacagccacagatcccgaaagttcgcaccggaaagaaagtggcagttgtgggaagcggtccttccggactggcagctgcacagcagttgaaccgcagaggacacagcgtgaccgttttcgagcgtcatgaccggatcggcggtctgctccgctacggtatcccgaatatgaaactggataaaaagattctggatcgcagaattgaactgatgaaagcggaaggcgtggaatttaagaccggcgtggatgtgggaaaagacattaccgcacaagaactgaaaaaacagtttgaccgtgtgatcctggcatgtggtgcttccaatccgcgtgatatcacggtaccgggaagagagagcggcaatatttacttcgcagtggaatatctgtcctctgtgaccaagagtctgctggattccggatttgcggatggaaaagctatttcagcaaaaggaaaacatgtactggtcatcggtggcggtgataccggtaacgactgcgtgggaacggcgatccgtctgggtgcgaaatccgtcactcagctggagatgatgccgaaaccatcggaagagagacttccatccaacccatggccacagtggccgcgggtactgaaaaccgattacggccaggaagaagccatcgcagtcttcggacacgatccgcgaatctataaaacaacggtaaaagaattccagaaagacaaaaacggcaacgtaaagaaagccgtcatcgtcagcctggagccgaaaaaagatgaaaagagcggacgcatgatgatggttccgatcgaggaaagcgagaaagtcattgacgcacagctggtactgatcgcagccggtttcctgggaagccagaaatacgtcaccgacgctttcaagaccgacctgaacccgagaaccaatgtcctgactaaaccggacgagtacgaaaccagcgtcccgggcgtcttcaccgccggcgacatgcaccgcggtcagtccctggtagtctgggcaatccgggaaggaagagaggcagcaagagcagtggataagtctttgatgggttatacaaacctctaagcagcttgctgcggagcaagccgtaggcatataccgataaaatttcgacagaagtattgacaagagaaagtccgattgctataatacggaacataaaaggcaagggcgtcttatccggaggggaactctggataaggtcgccctttttggtttgtaaaaaatcatcctgaggagcggcaagaagccaaaagcctgagaaacggtaacaaagtcgtaagaaaaaggagaacaacatatatggagaattatagtaaatcggagattctgcaaatggtggaagaagaggacgtcgaattcatccgcctgcagtttacagatatgtttggtgtattaaagaatgtggcgatcccgagcagcagactgatcaaagccatggagaaccgctgtaccattgataccgcatctctggatggatttaccggggaagaagaaaatgacctgtatctgaaaccggatctgagtactttttcgattctgccgtggagaccccagcagggaaaagtagcacgtttcctctgtgatgtgtgcagagaggacggaacagagatcgaggacagtccgagatcgatcctgaaaaaagtagtaaaaaaagcacaggaaaaaggatacacgctgcgggtgaatccagaatgtgaatttttcctgttccacaccgatgataacggaatgccgacaacgctgacgcatgaaaaagccggttatcttgatacctcaccgatcgatcttggagaaaatacgagaagagatatcattcttacattagaagagatgggatatgagatcgattcctcccatcatgagatttccccggcacagcatgagatcgactttacttatgaaaatgcaacggagaccgcagacaagattatgaccttcaagatggcagtccgcacgatcgcaaaacgctatggtttgcatgcaacctttatgccgaagccgcgggcggaagtcaacggttccgggatgcacctgaatatgcgtctgatgaaagacggaaaaaatgtatttaaaggaaaggacggaacattaagtgcggagggcgaagcatttcttgccggcatcctgcatcacatccagggcatgaccgcagtgatgaatcctctggtcaattcctacaaacgactggttccgggatttgaagcaccatcggaggtcacctggtcgagaacacagagaaatgcactggtacatgtgagaaaagagcgcggcggagaagtcaatctggaacttcgtagtccggattccgcatccaatccgtatctggtatttgccctgtgtctggcagccggtatggaaggaattgaaaatggcatgaaaactccggaagaactgaccaaagacatccggaagctgaatgaagaagaaaaaaatcttctcggcattcagatgctgccggaaaatctcggcgaagcgatccaggcgatgggacaggatccgctggttttcgaggttctcggagaaacatatcggaaagggtatatgaaagccaaacggaaagaatggaaagattatctggcacaggtttccgaatgggaactgaaccgatatctgtatcgcgtatagataagggaggcagctgatgagtgtggtggtaatcgtcttaccaaaactggaagacgcaaagaaaatccgtaagatcctgatgggacatggatttcctcaggtatttgcttacgctaccgcttccgctgctctttcggagatcagggaacatgagtcgggaatggtgatcagcgggtatcatctgaaagatatgtattatacggaactcgcggacagccttccccctcacttcgaactggtacttctgggatctgccagtaccgtcagtgcggcagacaccggaatcttatctcttaccacaccgttaaaggtctacgatctggtcaataccgcagagatggtactgcaccagatggaacggatggcaaagaaagccagaaaaccgaaacggcgcagtgaacgggacgaaaattatatcaaaaatgcgaaagcacttctgatggaacgtaaccatctgacggaagaggaggcccatcggtatattcagaagagcagtatggacaatggaaccaacatggtagagaccgcacagatgatcctgaccttactgtttgaagaaggctgacgggaaattgcatgaaaaggagaatgtgatatggaattcattacaggattaaaacaacaggaagaagcagaattagaagatctgctcaaagcagaagaaggaaccacgatcatcctggaaggcgcggtacacagcgtccgcgacatgggtgagatcgcatttgtaattttaagaaaaaaagaaggtctgattcagaccgtatgggaagaaggaaagacagatctggaactctccgagatccgcgaaggtgattacatccatgtgaccggtcaggtcaaagatgaagaacgcgcaccgcacgggaaagaagtacggctgtcaacgatcagccacctgtctcatgtgtcctgtccattgccacttcccattgacaaatggaaattaaacacttctctggaagcaaaattagaccgtcgttctctctctttaagaaatatccgggaacgcgcaagattccgtattcaggaaggaatcgttcgaggcttccgtgatttcctctacgaacagggatttaccgagatccacacaccaaagatcggtgcgaagagtgccgagggtggcgcgaatatgttccggctttcttattttcatcgaccggctgttctgcagcagagcccgcagttatataaacagatgatggtcggtgtcttcgaccgtgtctttgaaaccggtccggtgtttcgtgcagaaaaacataacaccagaagacatctgaacgagtacaccagtctggactttgagatgggatatatccacagtttccttgatatctgtgcgatggaaaccggcttcctgcagtatacgatgaacctgctggaaaaagagtacagcaaagagttgaaacttctgaacatcacactgccggatgtgaaaaagatcccttatgtccgctttgatgaagcgaaacgtctggtttccgaaaaatacaacagaaagatcagaaaccccttcgacctggaaccggaagaagaggaactgatcggaaaatattttaaagaagaatacaatgcggattttgtatttgtcacacactatccgagtaaaaaacgtccgttctatgcgatggatgatccggaagatacccgttataccttaagttttgaccttctgtatcatggccttgagatcaccaccggcggacagcgtatccacgatctgaacatgctggaagaaaagatccaggcaaaaggcatgacagaggaaggactggaacagtatctggatgcgttccgattcggtatgccgccacacggtggactgggtatcggtctggaacgactgacgatgcagttactgagagaagataatgtaagagaagcctgcttgttcccgagagatatgagcagactggagccgtaggacggcagaaaggagtcagggaatgagcgagagaaaaatagatgaagcaaccatggataacgtagagatcctggcaaaactggcactgacgccacaagagagacaaaaagccatggatgagatggaaaaaatcctgacctatgtggaaaaattaaatgaactggataccgatcaggcagagccgctggtacacatcttaccggatgtgaatgtctttagggaagatgaagtgaccaacggggacggcagaaaagattctctggcaaatgccccgaaggcaaaagaagatcagtatatcgtaccaaagaccgtatagcaggaggaagaagcaatggaagaaatcttacagatgtctgcgctggagcttgcaaagcagatccggcacggctccgtcagtgtaaaagaagcagtggaagcctgcaaaaaacagatgcaaaagtcagagtcccaggtacatgcctatgtttccatggatgaaaagattctggcgcatcggatcaaagaagtagaagaaggaatcaaaaacggcagatacaccggtccgttagccggtgtaccaatcgctgtgaaagataatatctgtaccaaaggacagaaaaccacctgttcctcaaaaatgctggaaaattttgtgccgacttatgatgcacaggcagtaaaacagttagaggatgccggtatggtgatccttggaaaaacgaacatggatgaattcgccatgggaagtacgacagagacttccgcattcggcgttaccagaaacccgtggaacccggaacatgtaccgggcggatcttccggcggttcctgtgcggctgtggcagcgggagaagcggtgatggcactcggttccgataccggtggttccatccgtcagccggcagcctactgtggtgtgaccggactgaaaccgacctacggaagagtatcccgttatggtctgatcgcttacgcatcctctctggatcagatcggaccgatcggtaaaaatgtaaaagactgtgcagccctctttgagatcatcgcaggacatgacagcaaagacagcaccagcgccgatgttccggtggaatcttacgagagcctggtatccgggggcttaagcggtatgcgcatcggtattccgaaagaatacctggcggaaggctgcgacgaagaagtgaaaaaagcactggcagatgccgttcatgtgttaagcaaaaacggtgctgtagtagaatttttctccctcggaatggtagattatgtcattccggcatactatatcatcgcctgtgcggaagcaagttccaacctggagcgtttcgacggtgtaaaatacggttaccgtaccccggatgcgacagaattgcatgagatgtacaaaaagagccgtgcggaaggcttcggtgaggaagtaaaacgaagaatcctgctgggatcgttcgtactgagcgccggctactatgatgcctattatatgaaggcactgcgtgccaaaggtctgatcaagaaagaatttgacaaggcattccagaaatacgactgtatcctggctccggcttctccgaccactgcgccgaagatcggcaccagtttaagtgatccgctgcagatgtacctgagcgatatctacaccgtagctgtgaatctggcgggtcttccggccgtcagccttccgtgcggtatggacagcaagggactgccgatcggtatgcagctgattggtgactgcttccaggaaaagaagatactccgggcagcagccgcttacgaacagctgcggggagaattttccaaagcctgggcaaaggaggaaaaataaatggcaaaacagtatgaaaccgtgatcggtctggaagttcacgtagaacttgccacggcaacgaaaatcttttgcggatgctccacaaagtttggtgcagcaccgaatacccatacctgcccggtttgtaccggtatgccaggatccctcccggtattgaataaaaaggtagtggaatatgcactggcacttggcaaggcagcaaactgtgagatcaaccagtactgccggttcgaccggaagaactatttctacccggacaacccgcaaaactaccagatttcccagttatacctgccgatctgccacgacggacatctcgagatcacgacagaaaacggcaagaaaaccatccggatccacgagatgcatatggaagaggatgccggaaagctgatccatgatgaatgggaagactgctctctggtagactataaccgaagtggtgtcccgctgatcgagatcgtatccgagccggatatgcgtaccgcagaagaagttatcgcctatctggaaaaactgcgtatgatctgtcagtatcttggtatttccgactgtaaactgcaggaaggttccatgcgtgccgacgtcaacctctccgtaagagaagtcggaagtgaccatatgggaacccgtaccgagatgaagaacctgaactctttcaaagcgatcacacacgcgatcgagggcgagagagaacgtcagatcgaactgctggaagaaggaaaagaagtcattcaggaaacccgccgctgggacgacaacaaagaatcttcccatgcgatgcgttccaaggaagatgcaaaagactaccgttacttcccggacccggatctgcagccgatgcagattcctaccgaatggatggaacagatccgaagccgccagccggaattccaggaagagcgcgcagccagatatgaagaacagtacggtcttccggcatatgatgcttctattctgacacagacgaaacatatggcagatatgtttgaacagaccgccgatctgtgcggcaacccgaaaaaaacagccaactggctgatgggagagggactgcgcctgctgaaagaaaaaggaatggaagccgaagatatggacttcaccccgaaacacctggcagatctgatccaggcggttgaggaaggaaaaatcaatcaggcaaatgcgaaaaaagtatttgcaaagatcctggaagacgatgtggagccgatcgcttacatggagaaagaaggacttctgatggtatccgacagcggagctatcgaggcagctgtcgatcaggtacttgcggagaatccgaagactgtggaagagttccacagcggaaaagaaaaagtcctcggtttcctggttggtcaggttatgaaaaaaatgcgcggcaaagcagacccgggaatggtcaacgaactgcttcgtaagaaattataaagaacagggaaacaaaataaaaaatatacaacgatgcgtaaggaaaggaacaaaaatcatgccaaagttaaatgaaaactatctgcaattaaaagacagctatctcttttcagagatcgcacaccgtaccgccgcttacagcgaaaaacacccggacaaaccggtgatccgtctgggaatcggcgatgtgacccgcccgctgtgtgaatgtgccatcaaagcacttcacgagagcgtagacgagatgggacaggcagccaccttcaaaggctacggtccagaacaggggtatgcaaaaacaagagatgccatcgcagcttactataaaagaaacggcatcgatgtagacgcagatgccatcttcatctccgacggagcgaaaagcgacaccggaaacatcaccgaactgttcgggcacgacaacgtgatcctgatcccggatccggtttacccggtatatgtggattccaacaccatgtgtggaaataaagtaacctatatcagcggcaatgcagacaatgatttccttcctatgccggatcacagccagcatgtagacgtcatctacatctgctccccgaacaacccgaccggcgcatgctacaacaaagaacaactgaaagagtgggtagactacgcactggaaaatgaagccgtgatcctgtacgattccgcctatgaagctttcatctccgatccagaactgccaagaagcatctacgcgatcgaaggagcaagaaaatgcgcgatcgagttctgctctctgtccaaaaccgccggcttcaccggaacccgctgcggctacaccgtagttccgaaagaactggtatttacctcctccgacggaagagaaatgtctctgaacgccatgtggaaccgccgtcagagcaccaaatacaacggaacctcctacatcgtacagaacgcggcagcagccatcttctccgaagaaggaatcaaagaatgccaggaaaacctgaactactacaaaaataacgccaaagtcatcgcagacaccctgaccgaactgcagatcccgttctacggcggcatccactccccatacatctggttcgagtgcccgaacggcatggactcctggacctgcttcgactatttactcgaaaacatccaggtagtaggaactccaggcgccggcttcggcgaaaacggcaaaaactacttccgcctgacctccttcggaacctacgagtccaccgtagaagccatgaaccgcttcaaaaaactcttcgcgaaataaacccgaagaatatagtgg

SEQ ID NO: 2535 - DNA, 6864 bp, Unknown
  gut microbiota DNA sequence
ctgcaatctgcacgccccactttgcggcatattttaccttcattcggttgacgtagcccgctacgccgccctcattcaggcaacatctcccacaaactgtgacgcacatcttgcagaaaggctttttcaaacacgctctagcatccagattgacaggcatgagcattgaaaaatataaaaccatgtgtggaaggagtttttagtgatatatttaagcagtttcaggttaagtaatgaacaagtaaaaaatcctaacatatatccttatcatgtgtttcgaggaaaagacatagagccttttgtattttctccgatcacggtgctgtacggcaataatggatcggggaaatcgacgatattaaatatcatggcaaacaagctcatggtaaagggcagagaatatgctaccagtaattctttcggaattgtagattattgtggtaaattttcggcagaatgttgtttcagttacggagaggatgagtttggcaataccatcagaaaactgcctgaaaacagcagatttatcaagagcgaagacatcttatatgagatcaagaaaattcagcagaagcagattctggcggatggaatggaatatgattatatgaaaaacggacattcccgtaaagaggcagaagagtattttcagacacgggagggaagacgtcagctggaatatattacatttgcgcaggaaaaatattcgaatggagaaacagcaatgcaattctttgaagactacctgttgccggatgctttgtatctattggacgaaccggaggtgtcattgtcgcctgcgaatcaggtattgctggcagaagaaattaataaaatggcgagattcctctcctgccagtttgttattgccacacattcaccgtttatgcttggaacgctggatgcaaagatttataatatagacacagatgattaccgatgttgtgaatggtacgagctggaaaatgtgcggtatttttatgagtttttcaagaaacatgagaaagagtttgaggagtagcaaaatggtaaaataaattgtaagagatattttctttttaggacagccctcggagccggcaacgcaggcggatctttcggttggaagagatctgctggataccttgcaggcgaatcgggaggcctgtgtgggcatggcggcaaatatgatcggtgtgaagaaaaatattattatcgtgaacatgggcttgatcgatgtggtgatgtttaatccggtgatcatttccagacggggaagatatgagacggaggggatgccaatgtatgttacatattcggatctgatccagataggtatcttcattgtcactctcataggattgtgctatacaatctttgggagaaaaaaatagccgtccactactgcaatagtgaacggctggtaaataaaacagttctttaagctatccagggtaagttatattaccgtcggtgttcattttattctggatatccgtgtggtattctgggcatacccgctgacctggagcatcagttccggcattttcctgtatctgtttttgtggggaaaatgggtgtatgggtttgaaaaaagaaaaaaataggatattaaaaagttttcggtaaaaaccggagggcataattcagggagtcgttcagatgtgttttcatcatctggacggctttttcaatatcgccatctttgtaagcctgaaaaatagccagatgttcctcatcgatccgagtctggatcacggtttcccggcagtactggttggaaaaaatagaaatcccgcttcgcagccgttcggcggattctgcaagtctggagttgttgcagtagcggtaaaaaacgagatggaattcgtcggaataccggttccaggtttgcacatcagcggctttggcagcagcacattccttttccagaatctctgtgacctctgcctgtaatttttcctgatccggagaggcagaagcataacggatcgccagcccgtcaagatcccccataaaagtatagatttcccggagatcatcggcagtaaagctgatcacccggatgcctacattagaataataagaaaccagctgatcctgggtcagccgggtcagagcttcccggatcggggtagaacttacctgaaagcgttcctggagaaccttcagggtgagcttttctccacatggtatcttttgtgtcaaaatatcatttctcaaaatctgataaatctgttctgataaagttgatttatttaatcccatcaataaaaatctcctgttatttctgtgtctatgatagcagccggatcttcccggaagctcgcacgtagatattatgtgaaatattttaacatagtacataacggtcaatcaagagtctgtattcaaacaagatctagctgtattccggatttttatgtacgaatatgttgcagctatttgcttgttctgttctgagcatcgagtcctaaatcatgtagagttgttgtaaataacagaaatctatatgagaaatgttattcttttgtggtttttgccttaaaaatacgtttctctcgttgacattaacgcgttgaagtgttatagtctgatttaacatatgacattttgcaaaatgcaaaataagataaaggtgaatggttgatcagaagatacgaaagatgatgatacaggtatcacagagtcagcaaagaagggatgaaaggaaggacgatagaagatgacagaatataactggccttatccggatgagttcggacagacggaaacagtagattccgatattctggttttaggtggaggacttgcaggatgttttgcggcgatcgcggcagcaagaaaagggaaaaaagtagtactggtagagaaaggggcaaccaagagaagcggagcggcaggaacaggatttgaccactgggagtcagcctgtaccaatccgtgttctcaggtgacaccggaagaaattgccaatgcttatgtggatgagcaggatcattacagcaacggtatcgcacattatattgagtgcagagaagggtatgaccgtatgctggatctggaaagtttcggtggcaagattcgtgatacggaagatgagtttaagggtgcggaattccgggatgatgagacgaagctgatgtttgcttatgattataagaaccgttttacgttgcgtgtctggggttctacgttcaaaccggcgctttatgaagaactgaaacgtctcggtgtcacgatttatgacaggacagaagcaaccgcacttcttacaaccatagaaaatggaaagaaacggggcatcggtgccatcggtatgaacgtacacaccggaaaactgttggtattccgggcaaaagctactttgctgacgatgtccagaccggcccgcgtgtggttatttaacccggatcttaccggactttgcgagttccgtccgatgcagtcgatcggaagcggacatgcgatgggatggagagccggtatggaatttaccatgatggaaaaatcggtgaaaggtgaattctccgcagccggacgaagcttccctccttacggaacaggaaacaatcataatacctggtatgcagcaacgatggtggatgccagaggcgtggaaattccgtatctggatcgtgacggcaatgtgctgaagactgtatctgagcgttattatccggtaaagggtcagaagtttttcttaaaaggcggcgtgatcgatgaaccgaagtacgagtaccgcggaccggagacgatgccttttgacgaactgatcaagagaggatacaaactgccgttttatgcggatctgagcagaatgccggagatggagcggaaagtcatctggggtatgatggtcggagaggaaggaaagaccaagattccgatccttcaatattatacagaacgtggatttgatccggagaaacatatgctgcaaagttatggcaatggctggcagtcagcggctttcctggaccaggaaagacagctgttcggtgcgccgggcggaatcatgcatgactgggatctgaagaccaatattgacggtatctatgcggccggcgatcagctgtttgcatccgactgtgccggatttgcatgttccacaggatactatgcgggaagaaaagcggcagattacagtgatacgatcgaagaactggctgagatcgaccaggcagaagtggatgcggagagagaacgtctgtatgcaccgatgaaccgtacagaaggcgtcacctggaaagaactgaatatggcgatctccaaggcgatgcagaattattgcggtggcgtgaagaatgatgatcttctgatccagggaatcgatctgctgaagtcttacagagaagagatcgttccgcagctgtactgtaacaacccgcatgaactgatgcgtacccatgaggtgctggacattctggatgtttccgagatgatccttcaggcctgtctgatgcgaaaatccagttccaaacagctgtgtttctatcgaagcgattatccgcagatggatccgaaagaagaccactgcttcatcacgatccgccaggaaaatggcgttccggtacggggaaccgttccgggagattatttcggtgatttgaaaacagagtatgagaagagaaaccaggattatatcggaggtgaggcaagatgagtaagatgaaagttgaagtgattccgtgcagtgccacaccactgatctacgatgaagaaaaatgtatcggctgcaacgcctgtgcagagatctgccagtgcgatattattctgccaaatccggaaaaagggaaacctccgatcgtgatgtttccgggagaatgttattactgtggagcctgcgtgatggtatgtccgaaaaaaggcgcactccgtctgcagcatccggtgatgaaccgtgcaaaattcgtcccggtaaagccggaaccagaaaattagaaggggattgaaaatgttctttgcaaaatgagccatgcagatcaatcgatgatccgatggattgactttgcgttttgaaacagaattttaaaagagaaagatcaaaagaacggcccggaatgctggcaggaatccaacagaggatcagattccgggcagaaccaggaggaaaaacgtggaaacaaatacaaaaaagaagatcggtcttctgggctgtatcggaacgggaatcggtgcgatcatcggttccggaattttcggttcactgcccacagtgatcaatgatattggaaccggaattgtactggcactgctggcgacgattgtatacactttagccaagacgattccaaatgtttatctgtcgtcggtagcaccggcatccggaagcttttttatcgcaccgacgaagctgatccatccggcggttggtgtatttatggcggcacagaatctgttacagccggtactgatctctgtgtttgcggtgttgtttggcgattattttgtggcgctgttcccgacgctggaaggatataaaacgctgattagcattgtgattctgctgatctatacgggaatcgcatggcagggcaatcatacctttgcgtttgtcaataatatcatggtagtagtattgatggtggctatgggctgttatatttttgtcggtatgccaagcattgatacctccagactgacactgggcgaaatcttcaatccgggcgtgaaactgaccagctttgcggcagcagtcggtgtgctggcatcttctctgtccggtggaagcgcggtttcccagatcgcagatgatgtaaagaatccgaaccggaacattccactggcattactcctgtccccaacgattgttgcatttatctatatcggtatgggtattgttaccatcggctgcatgccggcaggagaactgaccacactttcagaggtgggaaaaatattcctgccttccggtcttctgacattttttatcgtaggaggtccgctgttcggtgttctgacttcaatggttccggttattatgttaacctgcgcccagattcaggcggcggcagataatgatctgtttccggcttttgtcggaaagaaaaataagaatggagtatcaccggtgattctttgcttcgttatgctcttttctatctgctgtgtggcgaccggatccagttttggagtgttaatgactgtattttctttcgtcaatgcactgtcggatatcgctctttgtctggtaccgttcttcctgaaaaagaaatatccgcatgcctgcaatcattctaccttcaagatggccatcggtctggtatatgcactgtcagcctttgcgtttgtagtcgcagcctatctggcatatgcgatgatcagtacgctgggaatgaccgtatggctgatgatcctgggtgcaattgtactgtttgtgatctatattctgatccgtatctcttatctgaagaaacacggccgggatctgatcgcagaactgaaacagccatatgagccatgggaagcccgtgagcgcgagtgcaaagcgatggatgaaggaaaatgatatactattgattatagatgatataaaaagtgcgtaagcttggtgagaacaatccggggcttacgcactttttatgtattgctttttgagatgtattgggaaagcaatgaaaaaaatattccaatatgggactattaaaggtattttgcaggtgttaaaaactgcttcaaatttacattccaaaatgtatgtaaaatattataatgaaatacaggcgaaaagtaaatgagaaaaataaatgcaaaattaaattaatccattgaaacagtttttaaaaagtgttatagtgggatcagaaggagggattgatatgacagagctaaaattagagtttctgttagaagaaccggaaatcccggcagaggtggatcgtt

SEQ ID NO: 2536 - DNA, 12523 bp, Unknown
  gut microbiota DNA sequence
tggatattgatgacaacggtatcatccaggactgcaaattcaaaactttcggctgtggtgcagctgttgcaaccagcagtatggccacagaactggtaaaaggaaaaaccatccaggaagctctggaagtaaccaacaaagccgttatggaagcgttggacggactgccgcctgtaaaagttcactgttctctgctggctgaggaagccatccacgcagcactgtgggattacgctgaaaaacacaatatcaagatcgaaggtttaagcaaaccgaagtctgatatcagcgaaggcgagaccgaagaggaagaatattaatgaaaaaaaaggtagttgtagggctgtccggaggagttgactcctctgtggcagcctggctgttaaaagaacagggttacgatgtgatcggagtaaccatgcagatatggcaggacgagccggagctgatccaggaagaaaacgggggatgctgcggcctttctgccgttgacgatgcgagaagagtggcacagattcttgatattccttattatgttatgaatttcaagaaagaattcaaagcaaatgtcatggattattttgtggacgagtatctgcacggccgcacaccgaatccgtgtatcgcctgcaaccgctatgtaaaatgggagtccctgctgcaaagaagtcttgccatcggtgcagattatattgccaccggacattatgcaagaatcgagcagctgccaaacggcagatatgcgatccgcaattccgtgactgcggcaaaagatcagacgtatgcgttgtataatctgacacaggaacagttaaaacggacactgatgccggtaggtgactattccaaagaccagatccgtgccatggcagaaaagatcggacttccgactgcacacaaaaaggattctcaggagatctgctttgtggatgataacgattatgcgggatttatcgacgaatacggtcagggaaaagtgccggagggcaattttgtggacaaagacggtaaagtgctcggacgccacaagggaatcacccgctacacgatcggacagagaaaaggactgaatatcgcccttggaaaaccggtatttgtacagaaaatttgtccggaaaccaatgaagtggttcttggaagcaacgaagatctgtttacgaccaccgtgcgggcgaaccgcctgaactttatggcggtggaagatattccggaagagatcgaagcacttggtaagatccgttataatcacagaggggatacctgtaaagtgaaacggatcggagaggatctgttagaatgtcattttgatactccggtgcgtgcagtaactccgggacaggctctcgtattatatcagggcgaacatgtgttaggaggaggaaccatcgtatgatcagagaaacagaagccggtccgtacgctggcagaataaccgcagactgtcacattcacaccgaattttcggcggacagtgagacaaagatcaccgatcaggtaggacgtgccatagaactggggctggatcatatctgttttaccgatcatatggatatggattatccggaaggcgagtttgatctggatacggatgcctatgtaaaacgcgtgctggaagtacaggaagagtacaaagaccggatccgcatctgtctcggtgtggaactgggcatgcaggaacatctgaaagaacgccaggatgcttatcttgcgaagtatccgtttgattttgttatcggttccatgcacctgatccacggagaagacccttatttcggaaaaatatacgaaaaactgggagatgaagaggcataccgtgaatatttctgggcgactctggaaaacttaaagagagcaccgaaaatccatacgctgggacatctggattatgcggtgcgctatggaaaagaaaaagacaaatattattcatatgaaagattttcggaagaaatcgatgcaattctgcaatatctgattgatcatcagatcgcactggaagtcaacaccgcaggacttcggatgctcggatttaccaacccgcatccggatgtgatccgcagataccgggaactgggcggaaaattgatcacgatcggttccgacggtcatgtgccggagtatctgggatacggatttgacaggcttcccgcattgctttctgactgcggattcgattcttatgcagtcttcagacagggaaaacctgaattcagaaaagttttgggtaaaatttgaaattatgcttgaatttttcaagtaaattaggtagaataattacaggttgatgtttctttaacaatcttatagaaacctcacaaattttatttactttttaggaggaatgaaaatcatggcagtaaaagtagcaattaatggttttggacgtatcggtcgtctggcattcagacagatgtttggagcagagggatttgaaatcgttgcaatcaacgacctgacttccccaaaaatgttagcacacttactgaaatatgattccacacagggaaaatatgctctggctgacacagtaaaagctggtgaagattctatcactgttgatggaaaagaaatcaaaatctacgcaaaagctaatgcagctgaacttccttggggagaaatcggtgtagatgtagttctggagtgtactggattctatacatccaaagacaaagctcaggctcatatcgatgctggtgctaaacatgttatcatttccgctccggctggaaacgatctgaaaacaatcgtttacaacgtaaaccatgaaactctgacagcagatgatcatatcatctctgcagcttcctgtacaacaaactgcctggctcctatggcaaaagctctgaatgacctggcaccgatcaaatccggtatcatgtgcacaattcacgcttacacaggagatcagatgactctggacggaccgcagagaaaaggcgatctgagaagatcccgtgcagctgcagttaacatcgttccaaacagcacaggtgctgcaaaagctatcggtctggttatcccggaactgaacggcaaactgatcggttctgcacagcgtgttccaactcctacaggatccacaactatcctgacagcagttgttgaaggtaacgtaacagttgatcagatcaacgcagctatgaaagcagcttctaacgagtccttcggatacaacgaagacgaaatcgtatccagcgatatcgttggtatgagattcggttctctgtttgattctactcagacaatggttctgccactggaaaacggtacaacagaagtacaggttgtttcatggtatgacaatgagaattcttacacaagccagatggtaagaacaatcaaacacttcggaaaactgctgaatgcataatccataggctcattgggggtccggtctctttggaccgggctccttttttatacgcgggttgggagcaaaagtctgtccctgtatgagatcctggcgaatccgcgtgatacagctgtagctgtaaaggcacaagtgtgcgaataattaaaaggaggcatatgccaatgcttaataaaaaatctgttgatgatatcaacgtaaaaggcaaaagagttctggttcgttgcgatttcaacgtacctctgcaggatggaaagatcacagacgagaaccgtctggtagcagcacttcctactatcaaaaaactgattgctgatggtggaaaagtaattctgtgttctcatcttggcaaaccgaagggagagccgaaaccagaattatctctggcaccggttgcagtaagactgagcgaactgctgggacaggaagtaaaatttgcagctgatccggaagttgtcggaccaaacgcaaaagcagctgtagcagctatgaatgacggcgaagtaatccttctggagaacacccgttaccgtgcagaagaaaccaaaaacggagacgaattctccaaagaactggcttccctgtgtgatgttttcgtaaacgatgcattcggaaccgctcacagagctcactgctctaacgtaggtgttacaaaatatgtagatactgctgttgtgggatatctgatgcagaaagagatcgatttccttggcaatgcagtaaacaacccggaaagaccattcgttgctatcctgggtggagcaaaagtttccagcaagatttccgtaatcaacaacctgctggataaagtagatactctgatcatcggcggtggtatggcttatactttcgcaaaagcagaaggtggtaccatcggtgtatccctgtgtgaagatgactatctgcagtatgctctggatatgaagaaaaaagcagcagaaaaaggtgtaaaactgcttctgcctgtagataacagaatcggtgatgaattctctaacgactgcaatatgaaagttgttccatgtggacagattccggatggctgggaaggtctggatatcggaccggaaacagaaaaactgtttgcagacgctgtaaaagatgctaagactgtagtatggaacggaccgatgggatgcttcgagatgccgaacttcgcacacggtaccgcagcagtagcaaaagctctggctgagacagacgctacaaccatcatcggtggtggtgattccgcagcagctgttaatatcctgggatttggtgacaagatgactcacatctctaccggtggtggagcttccctggaattcctggaaggaaaagaactgccaggtgtagcagcagcaaacgataaataagaatcagatcctggaaaggatacaagaaaagaggaaacgtaacatggctagaaaaaaaattattgccggtaactggaaaatgaacatgactccaagtgaggctgtaaaacttgtagaaactctgaaaccactggtaaagaatgacgaagtagacgtagtattctgcgtacctgctatcgacatcgttcctgtagtagaagctgcaaaaggaactaacatccaggttggtgctgagaacatgtatttcgaagaaaaaggtgcttacaccggagaaatctccccgaacatgctggtagatgcaggcgtaaaatacgttgttctgggacattccgagagaagaggatacttcggagaaacagatgaagatatcaacaaaaaaatgcacaaagcattcgaacatggactgacacctatcatgtgctgtggtgagtctctggaacagagagagcagggtgtaaccatggacttcatccgtcagcaggttaagattggcttccagggtctgacagcagatcaggcaaagaaagctgttatcgcttacgaaccaatctgggcaatcggaaccggaaaaacagctactactgagcaggctcaggaagtatgcggtaagatccgtgagtgcatcgctgaagtatacgatgatgctacagcagcagagatccgtatccagtacggtggatccgtaaactccaaaacagcagcagacctgtttgcccaggcagacatcgatggcggactggttggaggcgcttccctcaaagaagaattcggacagatcgtaaactacaaataaatccttacatttgtaaaaagtaaataaagaaacgtgtcaaaacgccgcgaaacgcaagaagatctggtggtattcagcagatccaatgcgcttcgtggcgttttataatttcatcatgatcacttttaaaaagtgatagttttacaagatatcaatatattctccggcgagggctttgttcatacttctgacagcacagaatttgccgcacatgctgcaagtatcgctgtggtcatcttccggcattctgctggcgcggatggatttggcagtttccggatctaaagcacaggcatactgggcatcccagtcgagcacacgacgtgcatctgccattttatcatctatctcacgggcgccggggattcctttggcaatatcagctgcatgagctgcgattttggaggcaatgattccttgcttggtatcttctacatttggaagagccagatgttcggctggtgttacataacaaaggaatgcagcaccgttcatggcagcaacggcgccaccgatggctgcggtgatatggtcatatccgggagcaatatcggtgacaagtggtccgagtacatagaaaggagctcccatacagatgctctgctggactttcatattggcagctacctgatccagaggcacatgtcccggaccttccaccataacctgtacattatgatcccatgcacgttttgtcagttctccgagacgaaccagttcttcaatctggcatacatcggttgcatctgccagacatcccggccggcaggcatcacctaaagaaatggttacatcatattcctcacagatatcaagaatttcatcataatattcatagaatggattttcctctccggtcatgctcatccaggcaaaaaccagacttcctccacggctgacgatattcatttttcgtttgtgctttttgatctgctcgatggtttttcgtgtgattccgcagtggagagtgacaaagtccacaccgtcctccgcatgcatccggatcacatctataaagtcttttgcggtcagagttgcaagatcacgctgataatgaataacgctgtcatagacagggaccgtaccgatcataaccggacattcactggtcagtttacggcggaaaggctgggtatttccatggctggaaagatccatgatggcttcggcaccgagttccacagcgctcattactttcttcatttcgatatcatagtctttacagtcacgggaaacaccgagattgacattgatttttgtgcggagcatacttccaacaccttccgcacttaaacaggtgtgatttttattggcgcagattgctactttaccttctgcaacaagcgtcatcagtttactgacatccatatgttccttttcggctacaaggctgatttcgggtgtgatgattcccttgcgtgccgcatccatctgagtggtgtaatttctcatgttgttttgcctccattcttttcacatacataataaaaaagtatctgtttttgacgtcagcaaaacacagacgtatccatgcagaacaaaaatccatacgtccagacaatatataggagtagttgctgacgcctgcatcagaaagcaggttccgggtttctgatgctgaacaaaatcataagattttgtcttttttacagcggtacaaggtggtgtccccgatgtatcgcttttgacagccggatatattgcgagaaggaacagcttggcggcttcttgtggaggactttttactatgcagtaaaaaaggacccttacctgagtaaggatcctgtgatctgtctgatggaaaaaagaaacagtgtgtgtatgtctacctcttttatccggtatatctttcctacgttggcattatccaaatcaggttttcgggtcgaaacggaatcacgtctcctctcagccggttttcaccagctccccgtcagcaatataaaggttatctggtacatcgaaaacgatgcacttaatgttattatgtatcagaacaggtgaaaatgcaagagagaattcggagaaatatcagtgtatccggaacttcacacttcacaagttcactttagtgtggtaaaatgagcgaaaagtgatgttgccctgagaaaagaaagtcaggaaactttcttgggcggaaaaggagaaatatatggcagacagagtcattaaagcagccctgcttggtttaggtaccgtaggcggtggtgtttataaagtgttgaaaatgcaggaagaggaaatgatcccgaaattgggtgcaaaagtggaattgaagaaaattctggttcgtaatattgaaaaagcatccaaaaagattgacgatccgtccctgcttacgaataactggaaagagatcgtggaggatccggagatcgagatcgttattgagctgatcggtggtatggaaccggcaagaacatatattctggaagccctggaagcaggaaaaaatgtggtaactgctaacaaagatctgatcgcagctgacggacatattctgctggataccgcagcaaagaataagaaagatttcttacacgaagcggcagtagccggtggtatcccgatcattcgtccgatcaagcagtgtctggcaggaaatcatatctcagaagtgatgggtatcatgaacggaactaccaactttatcctgactaagatgagccagaatggcatggaattcgccgatgccctgaaactggcacaggaactgggatatgcggaaagtgatccgaccgccgatgtagaaggactggatgcgggaagaaaggttgcaatccttgccagcgctgcttttaattcacgggttacctttgatgacgtatatacggaaggaatcaccaaaatcacagcgacggatatccagtatgccaaagagatgggctgcgtgatcaaactccttggtgtggcaagaaatacaccggaaggtatcgaagcaagagtgcatccgatgttgatcgatgtcaatcatccactggcatctgttaatgatgcatacaacgcagtttttgtacagggggatgccgtacaggatgccatgttctatggccgtggtgccggagaactgccgacagccagtgcagttgtgggcgacgtctttgatattgtaagaaatattttgaatgattgctgtggacgaatcggatgtacctgttataagaatcttccgatcaagcacatgaacgagatcagcagtaagttcttcattcgcatgtttgtggaagaccgtccgggtgtactggccaatattgccagtgtatttggcaacagtggtgtcagtctggcgcaggttatccagagaagaaagaatgaccagtatgcagagatcgtagtgatcacagatgatgtgaaagagaagaatctgaaagatgcgctggcagtggcaaagggcatgtctaccgtgaaagaaatctccggaatgattcgtgtggcataaaaagaaaacaactgtgttgagtcacagaaagtgcacacagcacttgaaagtcctctcatatcaagttataatgtaactattcgttcaaatgtaacgaaagagacatgaaaacaggacaaaatatcatgcaaaatgctgataaaacacctgaatcacttgatatgggaggactttttacatggaacaatcaagagcctgggtgcaggtattaagagaaaatatcggagaagtactggtaggaaaggaggagactatcgatctggtgctgaccacactggcagcaggcggacatgtactgctggaagacgtgccgggaaccggaaagaccatgctggcaaaatcgctggcaaaatccttagatgccgagtttggaagaattcagtttaccccggatcttctgccgtctgatatcaccggcctgaattattataaccagaaagcaggagaattccagttccggccgggtcctgtatttgccaatatcattctggcggatgagatcaaccgtgccacgccgagaacgcaggccagtctgctggagtgtatggaagaacgtcaggtgacggtggatggtatgacgagaaagctggaagagccatttttcgttattgcaacgcagaatccactggaaactaccggaaccttcccgttgccggaagcacagctggatcgtttctttatgaagttatcgatggggctgccggataagaaagaagaagtgggaattttaaagcggtttattctggatcagccctatgagacactgcaggcagtgtgtaaaaaagaacagatccttgcggcaagagaagaagtgaagaaggttcatgtgcatgagcttctgctagattatatggcagaactggtgcaggccaccagaaaggacaaagagattctttccggtgtgagtccgagaggaacaatggccctgctgcgggcttctcaggcatatgcatggattcagggcagagactatgtggtaccggaggatatcaagaaagttgccggtcctgtgatggcgcacagactggtattatccaggggatttggcggagctgttaccggaaagatcaagatagaagagatcctgtcgaaagtcagtgttcctacagaagaatgggagagataacagatggttattatagtgatcgtaattggcgctttggtgatgaactatgcgctggtgaaaatctacgggcatctgtggggaaagaacctggatgcccgggtagaatttcagaaagagccgtctctggaaggccgggatgccatgctgacggaaaccatctataaccgaaaatggttatttcttccggtcctgcaggttggatttcagatgcatcgaaatctatggtttgcagatggggaaaataccagtgtttcggatcagtgttataaaagagatatcttttctgtaggcggatatcagaaaatcacgagaaccattccgtttcactgttccaagcgtgggtattatgagctgtctcaggtagaattggtaaccagaagtccgttgatgaacaaaaaattctataagacgctggagtcaccggaccatttttatgtctatccgcgtatggtagatgatacaaagctggagattccgttccagaagatcatgggaagtgtgttgtcacacaagaacctctatgaagatccctttgaattccggggaatccgggaatatcagcctacagatcccatgcataagatcaactggaaggtatcagccagaacagatcagtggatggtcaatctgtacgattccacatcggcccaggaagtgatgatcttgctggacgtggaagatgagaccatctggaaattcgatgagattcatgaggaaggaatccgcctggcggctgctctggcttcccggcttttgcagcaggggatcccggtgggaatccgtactaatgggcgggatctgaaaagtgacgaatgtttcagtatgaacggaggaacaggtccgcagcaggtgcgctctctgtatgagggtctgacaagactggatattacaaaaaaggcagaacatatggaagtgatcctggatcgtctgcgggaggaaaaagagaatggaaaccggacgtatgtgatgatctccaagaatcagagagaaagttgttatgagggatttgacagccttttgcaggacggtggaacgggagcatggatcgcaacgttatatgatgatatggagtggaaattaccggaaaaccggaaggtgactatgatccggtgggaggtggcgaaatgaaaaagttaaaaatgacgaaaagagaagctgccattactttcctggaactgtgtcacggttacctggttttatttgccatctatgcctgtgcggtggtaacttccggccacggaaatgaaccatttatccaggtgggactgttactgtttccggtgaatgcgattttgtttgcggctgtaagatgggccggacatttctggcagtatggtttgatcgctgcgctggcagttgtgggttctgttatggcggcaggaagcggggtgcgcggaatctggatggggattctgggagttctggctgctatttcttatttttatgccagagcggccagaaacacctgctggctggaagcgccggtatatccgtggatcgggatcgatgtgattttgtattttcttggcggtcattttgcatccgatatggcagtacggatcgcaccgatactggcggctgtatattttctgatctgcaatttccatacgaatctggaagaagtggatacctttttgaaaaatcatgcaacaatggagcgtctgccggtgcgacggctggccagaatcaatcagggtatgatgtggatcgtatcgggactgacggcagctgcgatgatcgtcgcgccctatcttggcttagatcagctgatacggcagctgggaaatgctttgaagacggtgattcgctggctgttgcttctgattcccaattcccctgtggaagaggagaccatggcgaccgaacaggcgcaacaggcgatgccggctgtcggcaatcaggcaccttggtttctggaactgttctataagctgctggatctcattggctggatgatcggtatcggactggtgcttgcgtgtgtatttctggtgatacgggcattataccggctgtacctgcggtttaatgaaaaaacggaagaaaacggggataccatcgaacgcctgatgcctgctccggcggcagaaaagaagaaggggctggaacataaaaagaaagagcatctgttctgggatcgttccacagatggaaggattcggaaacattatcgaaaaaaagtgctggaaaaactgaaagaatcgccggatgaagcctggactcccacacagactgccagagaaatggaactggagccgggagaggcagaaacctttgcacggatttatgagaaggcaagatacggaaaagatgattgcagcagggaagagatggagaggatgcttaagattcggtagaagcttggggcagatggattggatttcgaggcagtgcggcggaaatttgatgtatagagcgttaattgagaagaaaaataatc

SEQ ID NO: 2537 - DNA, 21556 bp, Unknown
  gut microbiota DNA sequence
gccctcccgcttctggctttcgttggattttgcttaaaacagactgtccgcagcgcggcaaaacggttttctccatttggatcaattttcaccatctcggatgaatatccgggcagtggcggtgggttgtggcagcgcgcatttctacgtagcagccacagatgcggcacatgccggagagcaggtggtcgcaggctttgcactgggacaggcgggtttcgtattcctgatccggggttttgtcgtcggggttcaagttagcgatgtattcgtacatggttttgtaggtatctgcttcgctcatttcacggagcagacattttttgcagattcttgtgaatgtgtccattgttttttctttctctttttttatatcgtgtcattttaccggaaaagggcagcctgtataacaggccaccctttgggtatcgcagggattgctccgagattttcacgcggactttatttcagtgcaatgtgcagtacactgcaggccggaatggtgaatctgattccagcgtgtactttttctacgccctcgaaggactggacggttacgttttccggatcttcgaaagtattttttgcgtgcatttcctgggttacgatctgggctttgatggattctacttttttgccgaggatcgttgtctcgatcgggtaggcgtgttccagatccaggttggtcatggtgatgttcattacaccgtccgcatcgatggataccgactcggacaggtttggtaccatgttttcttcttccagtccgacgatttctgtctccagggtgctgtccaggaggtctgcatcctgatggtatttgtacatatcaaatacatgataggtcggggtcttgatcattttgctgccttcggtcaggattacggcctgcaagacgttgatcatctgggcgatatttgccatttttacacgatcactgtgtttattaaagatattcaggttgatacctgctaccagggcatcgcgcatggtattctgctgatacaggaagcccgggttggttcccggttctacttcaaaccaggttccccattcatcgacgatcattccaacttcttttttcgggtcgtatttgtccatgatggctccatgacgggtgatcagttcgtccatgtaccaggtctttttcatggtctggtaccattttttctcatcaaattcggtagcgcttcctttgtttaaccatccgcccggatgggtgtagtagtgcagagacagcccgtccatgaatccgtgctgacccggttcgttccggcggaaagtggtcttcatcacttcttctgtccattcatagtcgtccacattggctccgcaggcgatcttttggattggtttgtttccggcatagttccgcacatatgtctggtatctgcggtacatatttccatagaaatccggattcatgttgccgccgcagccccagttttcattgcccacgccgaaataatctaccgtccacgcctctttgtgtccgtttttggttctcaggtctgccatcggggatacaccctcaaaggtcatgtattctacccattcggacatttcctgtacagttccgcttcccatgttgccgttgatgtatgtttcacagcccagctgacggcacaattcaaagaattcgtgtgttccgaagctgttgtcttctacgacaccgccccagtgggtgttgacgattttctttcttccttctttcggtccgataccgtctttccagtggtattcgtcagcgaagcatccgcccggccagcgaagtaccgggatacggatctgttttaaggcttccaccacatcggtacgcattccattgacattcgggatttcagaattttctcccacatagagtccttcatagatacatcttcccagatgctcggaaaaatgtccctgcagttctttattgatatgggaaagtttccggtctgcattgattactaattttgccatgttgttcctccatatttttatgtataaagtatattttcaaatatccgtttacaaatactctgtttcttccaccttctggtacacaaataccgggaatcctttttcgtcatacgtcactttcatgattctcgcatggcggttcgggtcgtacagtggatctccgatgatctcgtcatacgggcgggcatgatagacacaaagatccgtcacaccatcttctgcctttacaaagcagttgtgccccggtccgtaaatccccttttcttcgtcggttttcagtaccgaatgccgcagtttcgtccatgcatgcggatccagcagatctgcattttcatcgctatacatcattcccatacagtagcatgctcccgtcgcgcttgcggaaaaagtcagaaaaatctttccgtcatgttttaagatcgccggtccttcatttacccagaaatccacccgctcccagtcataatccggtgttgtcaacaatacctgatccgtgcagagtttgttggctgctgccatttttccgatatacagattggaaatctggcgaccgacacccgttttttccgcccagatataataccattctccccggtgttcaaacaccgtcgcgtccagagaaaaggcatggaacgaaaattcatcgctgtctgccgcctgcatcatgccaagttcttcccattcatctttcatcggattctgccccttgcaatgcaggacatacggacggatgttccagatgtcatctttatccccggctgcatagtagatataccatccgccaaacagatagtgaatctccggtgcccagatatggatgctctgcggtccgctttcatgtctcacccagagggttttctcctccgcatgtaccagaccacccagatcgttcgcagcacgcagaataatccggtcataagccggtacggatgcggtaaaatagcaggttccgtccgtgtggcggtacacaaacggatccgcccgctgcgcgatccattcatcgttgtatggcgtgtggatataattgtctttattcatttttatcctctttttctgttaaaatagttttctttttactaattataagaaataatagacttgttgataatatggcaacaagtccaaatttgccatatgctttttgtatactctgccaaaacttaaaaatcctcagttcggacaggtgcttcttacaccaaccggaaactgaggatcttaagatttgaaccgcttctacgacttacgcgtttttgctgctcagatattcgttaatatttgccagaacaacgtctgcatccagaccatgcaccatgcatgcttcttccagagattctccgatagaagacgggcatcctacacagtgcataccagcctgcatcaggatcagcgcgattccgccatccagttccagcatttcgcccatagtggtttctttcgtaaccttcatgattgggtcctccttcatactgttttcgcgactgtttccaatcacacttactgatacattctatcatacttctctcagaacttccagttttctcggtagatttttctcacagttttccacaggctccagtggattcatccgtgatatccacggaactccgtccccggtggaggaaaactttgtggaaagtctcctattacatttgccggtagcaggtaatttacaacagatactcggacaattggctctgatgcaccggatttgtcagaaaaataacacttacgaaacgcaaaagactacgttataataatcaacgctgttaaaaaacaagtgagatttgaaagagaaaaaggagtaacaaatatgccgcagaataagagagaaagtttaatttacaccgtcctgatgtgcttttgcatggtgctctggatgagtatgtataatgtcaccctgcatatgggtggtttttccatggaagtgttaagagaaggctggctgggcttcccgatcgcctatgtatttgccatgtgctgtgactggttcctggtatccggtctggcgaaaaagttcgcatttacctatctggtaaaaccggaagacagtgtactgaaaaaagtcatctgtgtatcctgttccatggtagtaccgatggtactcatcatgtccatgtacggtgctgtggaaggatgtgtgcgctccggtgcatggtcccagttgctgatgatctggctgaccaacatccccaagaactttatcatggctcttcctttccagctgatcgtagccggaccgctggttcgtttcatcttccgttctgcattcccggaaggcaaggtactggcgtgacacagcacaaaatcctggaaagtggtgttaagagataccactttcccggattttttatttacgcgagcaatgcaccaaagtccatgcttgtattagaccttggcgactgccgcgataactcgagaaacttgcaaagcgtgtttctcatagttttttctgctctctcgtctactctgtaattttcccgtagcacttcggtctcctgtcgcggaacagtccccattccagacgttttgctgccagatcatccagatcaaaggtctctgtcagtatctcttcctgatcccgggaagctgtctgcagcagttctccggtttcatctgtgataaaggaagagccgtaaaaaatcagtgcagactcctgcccgccattttccgcacagggttttacttcctctttgccgatccggttggccgcgatcaccggcatcagattcatcgctgcatgtccctgcatacaacgacgccagtgcggcatactgtcacatgcaagaattggttcggaaccgatcgccgtaggataaaagagcagttctgctccttctaaagccatacaccgtgccgtttccgggaaccactgatcccagcagattcccacaccgatctttccatatctggtgtcaaatactcggaaaccggtgtctcccggtgtaaaatagaatttttcctgataataatgatcatccgggatatgtgttttccggtatacaccgagaatttctccgtccgcatcgatgcaggccaccgaattgtagagattattgacctctttctcataaaagctgatcggtaaaaccactttcagttccttcgccagcttctgtccccagcataccgcttcattttcttccacaggcttcgcataactgtaaaaatcatatcttctctgctgacagaaatattctctctcaaaaagttccgagagcaaaatgatctgtgcaccggcggcggctgcctgacgtaccattttttctgctttttttaggttttcctgcggatgattggtacattgcatctgtactgctgccaccgtcacctgtctttttcccatgttctctttcctcctgtcaccccggtacttttgtccttttcatgggacttttaccagcttttctcaccgattctgttcgtttcgtctttttcctgccggaatctgctgcgtaatacagtggatatttcctccccctgtcaggatgtctctggcatataccgggataatcttacgatccggacaaagtttttccagaatctgtgctgctctccggtcgctttcttcattttccccgccaaatgccggcagtaccacagcaccgttggaaaaatagaagtttacataagaagcggccagacgttctccctcttcccgcacatcctctccgtcttcaaatacatatccttccagttcctccccggtcacgcagaccgggtgatccgggatcggaagtttatgcacggtgatttttcttccctttgcatctgtctctccttccagatattccagacacgccatggataacggatactgaggatctttcctgttgtctgtccaggcaagaatcacctcacccggttttaagaatgcacagacattgtccacatgctcgttggtctcatccatatagattccccggggcagccacagcactttttcggcccccagataggctttcagtttttctgtaatctcctctttggtaagatccggatttctgcccttactgagcagacaggattcggtcaccatcacggttccctctccatcgctgtggacagaaccgccttccagcacaaacggccttgcgtcataccaggtgtatccctctttctcgcaaaagaagggagcaaaacaattgtctttttcccatgaagcgtacagtccgtcttcggttccgccccaggcgttaaactcccagttgattccccttacttcctgtccatccgtcacaaaggttggtcccacatctctggcccaggcatcgtcggtctctgccgtaaaaacccttatcggatacaatgcttcatctgtctgcagacgctgtgccagcttttccgcctctgaaaatgtcttcccacttgccgcaagataaacttcttcactttttgcaattgcccggattacgtctgcaaatgctttttttgcctcccgtgcaccatttcgccaggatcccggccgttccggccaaatcagaatacagccccggtgcggctcatattctcctggcatacggtacccgtcctgcaccggcagaatctttcttatttctacatgatttattgtcttttttccgctgtccatgtcttcctgtctcctgtttttctcctggtgtttctgcaaatatcaaatactctctgaagaatctgatgatctctcaggatattctgtgtgttatgacagtctctctttaaaatcctcatacccgaaggtctttatcatctccaccgttccatcttccttcaacaaagcgattcccggaagcggcataccgttaaaggtattatttttcaccatagaataaatcgccatatcttcaaagaccagacgatctccgatcgctaccggatgttcaaaactgtaatccccaatcacatccccggcaagacaggtcatgctggataaccggtacgtatatgttttttctcccggttcgtacccaccccgcagaggcggacgatagggcatttccagtacatccggcatatgacaggccgcggacgcatccaaaatcaggatctccattccatttttcacgatatcctgcacttctgtcaccagatatccggcatttaaagctatagcctctccgggttccagatatacttctacctgataggttgcccgaatataggcgatcaactgttttaactgtttcagctgataacccggtcttgtgatatggtggcctcctcccagattcagccatttcatctttttcagatacttaccaaacttttcttcaaaagcccgaaatgtaatcaccagatcatcggcatcctgctcacagagcgtatgaaaatgaagcccttccacaccttccagcagatcttcccgaaactctgccttcgtcacaccaagccgtgatcccggtccgcatggatcataaatctcatgaccttcctgtgtggaacattccggattcacccggattcccacgctgaccggttttccatcttcccggatctgtgcgctttgtttacataactctttatatttttcatactgccggaaggaattgaacacgatatgatcacagattttcaccagttctttcatatcggcttccttatacgccggtgcaaacacatgattttcttttcccatctcttccctgccaaggcgggcttcataaagcccgctggccgtggttccgctgataaaggttccaatcatcgggtacagagaaaacatggaaaacgccttctgtgccagtaacacatgacagcccgtgtccttctccagtttctgaagaatcctgagattttcttttaactttttctcatctgccacgtaacagggagttggcagatctttccacatcattctacgatctgtggatcttcatccacaacccacggcaggccatactgattcagcatatccataaacggatccggatcaaattcttcgatattgaagacaccgtctttatcccatactttatccacaaccagcgccgcaccgatcattgcaggaacacctgtcgtataagagattgcctgggaaccaacttctttgtagcattcctgatggtcacacacattataaatataaatcgtcttttcttttccgtctttctttccggtgaagatacagccgatattcgtctttcctacagtacgcggaccaagagatgccggatccgggagcagtgctttcagaaactggatcggaacgatttctcttccttcataattgattggagaagtggaaagcattcctacattttccagacatttcatatgtgtcaggtaactctgtccgaatgtcatgaagaaacggattctttttacaccaggtacattcttcgccagtgattcaatctcctcatggtgaagcagatacatatctttttctcctacctgcgggaaattatattctctcttgatctccatcggttctgtctctacccagtggccgttctcccagtaagaaccattggcagatacttcacgaaggttgatctccggattgaagttagttgcaaatggatatccgtggtctccgccattgcagtccaggatatcaatggtgtcgatctggtcaaaataatgtttcattgcatatgcggtaaatacgctggttacgcccggatcaaatccgcttcccaagagagctgtaatccccgcttctttgaatctttcacgatacgcccactgccaggaataatcaaaatatgcagtaaatccagcctctttgcatcgtttttcatagatggctctccactccggatcatccgtatcttccggttcgtaattcgcggtatcgatataatccaccttacactccaggcaggcctccatgatcgtcagatcctgatagggcagtgccacattcagaaccgcatccggctgatacgaccggatcagtgctaccagttcttctaccttatccgcatccacctgtgccgttgtgatcttcgtatctgtggtaccttccagtttttcctttaacgcatcacattttgcttttgttctgctggcgatgcagatctctgaaaacgtcttgctgttctgacagcacttatgaatcgctactcctgctacgcctccgcatccgataatcagtaatcttcccattcttttttcctcctgttttctatttttcttacttttcttcttcttccagcatatcttccacatacttcggaagcataaaggctcccttatgaagattggtggtataataccaggtcttaattttccgttctttccatcgttttacattcagatcatccaggggatgatattttttggaagcaaatccaaacagccagtatccggaagagcaggttggtatatgtgcctgatacactctgctgacgggaaagctgtgactggccttcctgtgcatgacccggcaggattcttcgtcctcatcataaaacggactgccatgctgataaaccatgatcccgtcttcctttagcgcccggtaacagtttccgtagaattctttggtaaataatcctgcattatgtcccagtggatcgattgcgtcattaatgatcagatcgtacatattttgtttgcttcgcagaaatcgcaatccgtcttcataatagaccgttacccgtggatctgacagtccgcaggcattatccggaaagtattctttacagacttccacaaacacccgatccggttccaccacatcaatggtctcaatctctttgtaatgtcccagttctcttgccacgccgccgtctcctccaccgatcaccaggacatgcttcacattgggatgaacagccatcggaatatgtacgaccatttcatcgtagataaattcatccttctctgaaaatacaatgcttccgtctgcacttaaaaaacggccaaattcatccgaatcaaatacatcgatccgctgaaattccgtctgcagcccgaacagctgcttttgtacctttacagaaacttttactttttctgtatggtaatccgaaaaccataattccattcttttctcccctcccttatcttcttaccgcaccggtcggagcttccatcacatacagatattccaccgccggatcctgcgttccctgcatggaacagcccttttctttcgcatatataatgtagtcaataatttcttttgtgatcatctctcccggggccagaatcggaatccccggtggataacacatggcaaattcaccacagatcatcccttctgtctcccggatcggcactgcctttttctccgcataaaatgccgtctgcggagataccataacggtcgggttaatatattcggtattcggcatctgctccggatctctggcgtacagcctctggatatccgaaagagcccctaccaggcgttcaatatcctgaatccggtcaccaatggaaatatacgccagaatattggcaatgtctcccagttcaatctggatatcatattcatcccgcaaaagatcatacacttcgatacccgcaagaccgatatctctggtatagacagacagtttagtcacatcaaaatcgtatacactgctcccattgatcatgtcttttccatacgcatagaatccaccgatggcattgatctcttcccttgcatactctgccatccggctcacttttgcaaaggattcttttcccctgagagccagatttcttctggaaatatccagactggacatcagaaggtaagatgcactggtggtctgggtcagattgataatctgactcacatattcccagttcacattttttcccgtcagcaacagggaactctgggtcaagcttcccccggacttatgcatggaaaccgatgccatatccgctcctgcgtccatggcacagaccggaaggttctcaccaaaatacagatgggttccgtgggcttcatccaccagaaccagcatattgtgtgcatgagcaatctttacaatggatcgaagatccgaacagattccataatacgtaggattgttcaccagcaccgctaccgcatccggattcgcaacaatcgctttttccacttcggacacttccattcccagggaaattccgagacggttatccacctccgggtttacataaaccggtatcgctccacacaataccagggcattgatcacactcttgtgtacatttcttggaaggatgatcttatcccccgccttgcagcaggaaagtaccattccctgtaccgaagaggtagttcctcctaccatgaaaaacgcatggtccgcacggaatgcttccgccgccagctcctctgcctctttgatcaccgataccggatggcagagattgtccagcggtttcatagaattcacatccagactgacacatttttcccccagaagttccaccagctccggattcccccgccctctcttatgcccgggcacatcgaagggaacgacccttcgtttcttcagtttttccagcgcctcatagaccggcgcatgcatctgttttttcttatccatatcttctccctgttgtcttttccccgtccacagatcaaatattgtttatatgtgactgtgaaagtactgacccgttatatttatataacgagataaaatacgctccgcgaattttactcgttatcgcgacagtcgccaagatcgcatgcaagcatggactttgcctcgttgttcgcgtaaatcaaaattgatccaccggaccaattattgataggtaatgcaacaaaaaaggacaggtgaaatcacctgtccgcattgtcattctatagttctactttgtattttctctacatccgcaaaaactatgttctcagagtttgtcgttggcatctttgccagcaaatatttgctattccgtaactgtatccgcccacagccacaagctaactactctttattgaccatttcacaagtgatacctcaaccgggtttcttcgctttcttccggttggaaacttataaaatttagcttttaactaaatcaataatgcggtctctcaccgctctcggcagctgccccgcctgtccgtatgggcttaaccaatatgcttggtgggctaataataaatatttgcatgaaaacatggtttgcttcatgtagttttgagtatatcacagcattttatgtaatgcaagtaaaagctggggaaagtcattcaaagtactttcccgggtgtcccattcttatcatctgaatcgacatttctatctctgccaagagcatgatcaaactcatcaagaacatccgtcatcaggccttcatccatccgacttctacactctgcaatcaatacagccggaattccataaaatgcttctgcaatactgcctgtaatagcgccaagtgtgtcagtatctccaccaagtgatactgcattccgtatggcatcctcaaaatcttgggattccagaaatgcaataatcgcctccggtactgttctctgacaagtctcatccatatgatatcccggtctgatttcatcaagtgttctattaagattataatgaaactccccctcaatatattctttaatctcttctttcgagaatccattcctagccatgtatattgcactggctgttgcctctgcacccttaatgccttccggatgattatgtgtcacgtttgctgtcgctcttgctacctctcttgttctttccatcgaatcataaagccatcccgccgctgacactctcatggcagaaccatttccataacttccgtatggctttggattgctttctctaagccaatgcctgaatcttccaccataacctgcatatggatatctttttcccctatcttgcatgttagttactaccgcctcttcaatttcctttactgtagcttcctttccgactgcaagaagagcttctccaaccgctattgtcataacagaatcatctgtaaagtcacagtctttactaaacagatcgaattcctttgttttatctcctctgtcaaattcaaatggacttcctataatatctcctaaaattgctccgtacatatatgcctccaatctccggaatgctccggcagctctttttctttgttacaatatgagtataattgaaagacatctttatatggtcgctatccgggcgacactttttagggcaaaaacaaacgccgatactataagtaccgacgtaacatatgtaccggtaacagcaatatcacctcttgcaatttttccgatgcctgcttttcagcaaaaagctgttcttttcctgtcgccctcttgattaccgaacagcaaaaacaggcttggctggatttgctatcttagccactatgctttactcaaaatatccgtttagataatttgccgtatcttcgttcactgcaaaaatcatatctaaatcatctaaaccgtaaatcttaatgcccatgtaagaaccatcatatagtgtgatagtggtaacatcataaagtgttccatctttatcggtctgtcccagtttgatcgttttctcgtaactgtgaagttactgaacagttacattttctcttgtattagtttcccaataattactatctttatttccggtgaattctactaatgccaacattcaacagctacttttataacaccatctttcttattctcgaaaagatcataagcctcatcaatcttacttagaggataggtatgcgtgataagtggttctgtattaatctttccatcagcaatcagttgcaatgtctcatcgcagtcgcatccatctactccaccggttttgaagataagatttttcccatacatatctggaagcggtaatctctgtgctttatcatacagtgcaacgattgttacaattgcattcggtcttgcgcactcccatgcaaggcgaaacgttgattcagctccggcaacttcaagaacaacatctgctccaccatgatcacttgttttttttacaaattcctcacattcttccggagaaacagtaagtacatccggataatgcttattaataaattggatacgttcttcgtctttctcacacatgataatatgttttggactcttcagcataacgcaaagcaatgtgcagattcctgtgggacctgcaccgatgatcagtaccgtgtcatcttctgtaatttcagaaatacgagttgcccagtagccggtagccagtacatctccaacaaataatgcctgtctctctgtaacttcgtccggaatcttgtttaatccttgatctgcgaacggtacgcgcacatattcagcctgaccgccatcgatacggcagccaagagcccaaccgccattttggtccgtacagttattgacataaccttttttgcagaaataacattcaccacagaatgtctccacattgactgttactctgtctcccggtttgacatgagtaacagcgcctccaacttcttcaacaattccaaccatctcgtgaccaacagtaattcctaaaactgcacgtggaacacttccatgcttgatatgtaaatcactggaacagatactctcaagcgttacctttacaatagcatccctttcatgcataattaccggtttcggtttttctcttaattcgaattttccttttgatacatatgtataagtctgcattgtttttcccccaccattttcaaatagtataaagcatttttgctcgtaactgctcagtaccttcaccgttacaagcaaaaatacatttaaaatctcctccgctcaagaaaagaatcgtatatcaatcacagcctttttatattataggtttccatcttacgagttacaagcgaaaatagataggaaaagaaagttccttgcttataacgactctcaccgattgtcaaccttctccgggaacatatcatgattactcatgcggttccaggcaaccttttcccaatccgtacccggctttccgtaattacaatacggatcaatggacaatcctcctctcggaagaaattttccccagacttctatatatttcggttcaagaagcttgaccagatctttcatgattatattgatcacatcttcgtgaaagtctccatgatttctaaaggaaaacaaatataatttcaaggatttactctccacaagacgttcatccggaacataagaaattgtgatcgttgcaaagtccggctgtccggtaatcggacacaggcttgtaaattcagggcagttaaacttgacaaaataatcattttcaggatgtttattctgaaatgcctctaatacagatggattgtaatccatactgtactctgtttgctgatttcccaataatgttaaattttctttttctctcatcgttttctcctctatctcaatgccggatcttccatatggtttgcctgaaatgccgctgcacggtcaatgcatgttccgcattttccgcaaggcttctcgcctccttcgtagcaggaccaggttaactcgtaaggaactcccagttctaatccaatccttactacttcagctttggatacattaacaaaaggtgcttctattttaagctgatgtccggaaccttcccatattgcttcattcatagcctgattgaataccggcgagcagtccggatacgcaaagcctgcagaatcatctgcatgagctccataataaattacttcgcagtccttactcaatgcgatacttgccgcagaagaaagaaataatccgtttcggaacggtacatatgtgcttactggcttatcgccattggtttttgaaatctgttctgcgtaactttcctccgggatgtcttccgtagactgttgaagcagtgaacagttactatattgaaatatcttcctcaaatccaggaacaaatgctccacaccataatattgggcaactgctattgcagctttaatttctttatcatgtttttgtccgtaggaaaccgaaagggcaatcacctggtctttcccatacttttggattgccagtcccaatgccgttgttgagtcgattcctccgctaaaaagaactaatgctttcatctctatcacctcactatttatactccccgttcatctggatcccagatcactttatgcatctgtatctgcaaccgtacaccattcaaccgatgcttcaacatgaattctactatttgcaccggttctattgagccaaaaacagggctaagataaacatgacatctgttggtcagatcataagtccgaatcaattccagtgctttcagcaaatcttcctgactgccggatacaaattttacagtatcattcttttcaagcagttccatattctctgttatcatatgttcttcgcacccgcttgatggtaacttatagtccattgtaaataccggacgttcttcacaaaatgcagccagatcgactgctccatttgtctcaatctcaacctgcagtcctgcttttaaaagaaaatggattaaatctctgatatctttttgcatcaacggttctccgcctgtaagtgtcacattgtgaattcctgttccaagaacataatttagtatttcttccggagtttcttctttatatgggcactcaggttcattcgcccacatagtatcacaataactacatcgcaggttgcaccctttaaaacggataaaaactgcaagttctcctgcacgcgtgccttccccattaatactggtaaacttttctactactttcatctactcttcctcatagactgcacaattattaggtgtctcatatacttccacataatgaactccataccctaaatctgttaattttttgtagaaataatatgcgaaattttctgctgtaggacgaaatgaaacttcctccaaatgaaaatcttcattctgaagtgcagctacggtctctgctttcagagatcccgtctcgtagatcagactatggtcaaagtaatcacaaagtaccttcaggtcttttttcagattaccaaaatccactaccattcctcgtgtctgtccttcttgttctaactcctgactcttgatttttgcaacaacattccaacgatgtccgtggatgtttctacattttccctcgtatttccaaagaaaatgtgctgcatcaaaactggcttttgtttgtaaataatacatatttcaactctcctgtatgtgaaatgtatgtacctgttaagagctatgcattctaaatagagcagtttttatatatcagaaaatccatatctaatatacaaaaagctctgcgtacttcttcgcacgcagagcctgaaatcctcatgattagccccggttttatttttcgacaggaaggtacaaatgaactgtcggctgttttcacagcatgaaaattataccacagaaagtcagattgtcaaattgatttataatattatgatactgactgcccgatccatgcttcttaagagcactgtcctaaaaaagatccccatgccgaaacatgaattcccttttatccaagtatccctatcccccggatatattatctatatttacatataatatctacacaaaattttatggattattttcgggttattttcactcctctatgcctttcagacattgattttaccggttcgacgcaggcgatgatatatttcaggtattttcgttccgcattcggatcgatgacattcacaatactgaggctgtaaagatccgaactaagctgcagtgcctgctctttcagataatttcggatcttctggtaagcgatccggatatctccgtctttctcccggcagaccatcacaaccgtgcggatgccaggaatctcacggatgccaggaccggctgcctgtgcatccgcaaagctgaaaacttcccgatacacatactgtcccttctgaaaatcctctcgtccgatcgccgctcccatcggaaaggcctgtacccccggatgatcgcaggctttcagatgtctgtgaatatctgtggatatctcactgaaagaagtcgccggatctgagagtacttttgtcacctttaatcgaaaaatctccggctgctcatacagttccggctttcctgtatcattcttccggatctgttccagcagttttcttgtatttccgataattccgatccgccgctccagctctctttgctgcttcagaagcaccgcgtactgccggtcaacaaaaccgtcaaagcgcacttcttccccgccaagcagatattcttttatatcctccaccgaacatcccagtccacgaaaggtactgataaaataaaaggagctgatctgcgcatagctgtaatagtgatacccgtttttctcacttttcttcggcaccaggatcccctgtctttcataatagcgcagcgtgtctctcgtcgtctgacacatcctggcaaatactcccgcgctgatgcaatattcctctcccgccatgtttttcctcctgtttttttcgatatttctatgttgtaatccggttccggatttgtattgttacagttttcttctttttttgtatactccccgttcctgctgttattcgttatcttttgtaacatttgcattcttgacatgggggttacacccagctttattctatcacaggataaaaatgcacaacaccctgatttcaggggattttataataatggagttgaaatatcatgcatacattaaagaaactttactgtcgttgttttcagatcagttttcgcgctgccctgccgctgatgccgtaccgggaaccgaagctgatcgatggattttccggtgtttcgaaagttttgcggaaacataacattaccaggcttcttcttgtcacggatccgggtgtgtattctcttggactgactacaccgctggaacagattttgaaaaaagccgggatcacctgtatcgtctacaaagatacggtggccaatcctacttctgccaacgtggaagatgccaaaaacctgtatctgaaaaaacattgtcaggcgcttctcgctttcggcggcggctcttccatggactgtgccaaaggagtcggtgccagactcgcccgcccgaacaaatcactggccaagatggaaggcatccttcatgtcatgcacaagctgcccctgctgatcgccgttcccaccactgccggaaccggaagcgagacaacccttgccgccgtcatcaccgatgccgatacccatcataaatacgcgatcaacgatttcagcctgatcccgcactacgccgttctggaaccggaagttaccgtcggtctgccgccacagcttaccgctacaaccggcatggatgccctgacacatgcgatcgaagcatatatcggccgctccaccacgaagcagacccgaaaagccgcgatcgaagcgatccagctgatcttccagtatctcccggtcgcctataaaaacggcaaaaaccggacggcaagaaaagaaatgctccgcgcctcttatctggccggtactgcatttaccaaaagttatgtcggatatgtacacgccgtagcacacagtctgggcggtcagtacggcatcccgcatggactggcaaactccgttcttcttccgatcgttctcgaagcgtacggaaacgccgcgcacaaaaaactggctcacctcgcccggatcactaaactttcttcttcccaggacgataccaccgcagccaatgcttttatcgcacatatccgaaaaatgaacgcttccatgaacataccgacgaccctcgccggtatccgtgacgaagatatcccgaaactggctcgctatgccgataaagaagcgaatccgctttatccagttccgattctttgggatgacaaacagcttgctttgatgtatcatctggtacaggagaaaaaagaaaaggagaataacagccatgcagaaacaggacatcgagactatactggcatctcagcgtaagttcttcgccaccggaaagactctgccgatctcctggcgtctcgaacagctgaaaaaattaagagcttctatgcttcgccacgaagaggatctgtacggagcattgaaaaaagatctgggaaaaagccggatggaaagttatatgtgtgagatcggactgaccctttctgaactgacctggatggaaaagcatatccacaggctgacccgtgaaaaacgggttccaaccccactggcacagttcgccgcaagaagttttcagtccccgacaccgtacggcacggttctgatcatgagtccatggaattatccggtactcctgacactggaacctctgattgacgcactggccgccggcaataccgtcatcgtcaaaccaagtgcctacgcaccagctacaagtgctgtgatggaaatgattataagagagacttaccctccggaatatgtctgtatgatcactggcggccgtcaggaaaaccaggccctgcttacacagcgttttgataaaatcttttttaccggcggcaaaaccgtaggccgtgaagtgctccgccacgccgcagagtatctgactccggttaccctcgaactcggcggaaaaagcccgtgtatcgtggattccaccgcaaagattccattagctgccagacgtatcgtctttggaaaatacttaaattgcgggcagacctgtgtagccccggattatatcctctgtgatgtttccatcaaagatgccttgcttgcagcaattcagaaagaaattaccagacagtttggagatcgtccgttggacaatctggattacggaaaaattatcaaccaaaaacattttgaacggatccttggtctgatcgcaaaagaaaaaataatctgtggtggcgaatcagatccttctactcttcgcatcgcaccaaccgtcctcaccgatgtttcctgggacgatccggtcatgggggaagagatcttcggaccgattcttccggtgctgacatattcctctctggatgaggcgatccgcaccgtagaatctcacccccatccactggcattatatttcttcagcgaagacaaaaaagcgcagaaaaaagtactggatctgtgtcacttcggcggcggctgcatcaacgacaccatcatccatcttgctaccagcgccatgccatttggcggtgtcggtgagagcggaatggggggataccacggcgtggaaggcttcaaaaccttcagtcacacccgcagcattgtcgacaagaaaacctggatggatcttccgatccggtatcaggggtatgtaggatggaaagagaaattgttgcggatgtttctgcgataggttagattacgtatatcaaactatcatcgacaatactttcgtactgttggaacaaaatacaaaagaatacaaaaagtggtgtgttcattgtttgacatgacaatgagcacaccactttttatttacgcgaacagcgagccaaagtccatactcgcatgagaccttggcgactgtcgcgataacgagtaaaattcgcgaagcgtattttatctcgtttaggcgatcaacgagttaaagtccgtgcttacacgattaccgagtcagcgttcaccctgcacaagactttgatgactctgataatactgtgtacaatacaaaaaaacctgcaggatacattctcttgtatcttacaggtctcatctatctcgttcctcccggagccttcccacacccttttctggcataaaaaagctcccccagttggactcgaaccaac

SEQ ID NO: 2538 - DNA, 3334 bp, Unknown
  gut microbiota DNA sequence
cgtcattgttggaaaaagaaaagaaagcatcttccaaaagtcaatgcgaatataaagagatcaatactgcagaattgcaaaaacagagccgaaaattgacttcagaaaagatgaagctctatgatgattacaaagatggtcgtatggatcgtgatttgtataagtagagagctgaaaagataagtggacagctggatgaaatcaaacgaaaaacagaagatgcggagaatagcaaaaagcttcttgaacaaaatgaactttctgataaaataaaactaaaagatttcttggaaattcagaagttcgatgcagagaagctgcgtgagattatcaaggtgatccgtgttcatagtcaggatgaaattgaaatcgaatggaattttgacgatattttttcagaacagagataacttgagcaggacaagaatgacttatcagaagataataaaggtgctagagcgtgtctgaaaaaggcttttcgtgagctgcgagtctcagtttgtgggagattttatccgaatgagggcggcgtagcgggctacggcaaccgaatgagggtaaaatctcccgcaaagtggggcttgcagattgcggaaatgattttcagacacgctctaggactacctgatgggagcgtcagatagtcttcggcagaaaaaaataaatttttttgtcctatacttgacacatccacatgtatgccgacatacctattgctccaatatggcaaaatcgggaatgaatcctaagacgttacagtacctcatggggcattcggatatatcggtcacaatgaatgtgtacacacatatcggatgcgatgatgccgaggaagaattaaagcggatggaagaatttaggaaagcgcaggcggaggttgaacagaagaaagagaaatcaatgtcgcagaaaatgttcaaagtagtttaatatggaaaagggatgacgctctggtttaggctagggcgttatttttgtggaaaaaacgattatataagattataatataattagggtttgctcggttatataattaaggagggattcaagtgtttttttcagaatattatggaattgattcttctgtagtggagcattatggtgctgttgatatatcttttgtttgtgacattccattgttcattgatccaatgttgatattcaatagcgaaaaagaggaatataaaaagctacatgaagaaataataaagtattttcatttcttatatcaaaaagcatgtgacggcttatcaaataaagagttgaaagcgtggtttgaattcaatgaggttcctaataattggttagggtattctatgtcaggaaataagggagctgcattgggaaaacaatatgcaagatttttgtataaaaacataaggtttgcaacaaatacaaataatattactaaatcgaatcatattgaaaagattatgctcttgtatgaaggaagtggtaaggataaaattagtgatttgacagtaaacttaataaagggctttttatgcagttacacagaagaatttgcaagaaaatatcttgataaaaagtacataaaaaagtttcatgttgaaaaagcatactttaattatgaaacagaaagctttgtgagtaaagagtacgaactaccatatataactagtgaaaaaggtaagaaggaatatgtattattaactcctaaagatatcttgagagaggatgaaccagcgattaatcgaaaagattttcttgacagttatgatgatgtaagaagcatgatagataatgattcattaagagcatacgttaataattatattgccaaagcaattcttgaatatgaagataatcaaaaaagaaataagagaaatgtcaacgagcgtagtgttaaaaaaatagagaaagatgcatttaaggaattagcaaaagaatatcctgaattatatgattattatataaagtatgtagagaataatccagaacaagtaagcaaacttgcacatgaggaatgtacagaagaattggaaaaattctacagtaactcaaagatacttatagcaaaagtaattgatgaaggttatgttattcaagaagatatcgaagcaagagaagaagcaaaaaatagattgaaattttttaagcacattatagaagaatgtgatggatatttagctttatattacaatggaaaacagattgcaaaagaaaaagatcttcaaagattatttaggtttgtatggtatggaacttcgtataaggtagatgcagaacctaataatggaagagggcaggctgattttattgtatcaaagggaatgaataatcaaaatattattgagtttaaattggctagtaatagtagtttaggacatgtatttacgcaaataaaaatatatgaggcggctaattgtacggatggaagtttggttgttatcttttattttacagaagaagaaaaaagatttgcagaaaaagtcattgaagattcagggtataaatcggctattgatgaatcgatttttttgatagattgtagaaaagataataagaaatctgcgtcaattgcttgaaatattctataagtaagaaaaatatttttactactaagtaataataacaacttgctaaatcttgccttgaattgctaacttcccacatttcagagcaaaatcatgattactacgaggtttctgaatgccttctaaagatgaggcaatctagtgcaaaaaggaggaacacataatgactcaatatagtgaaaaatcttataaaatggcgtcagataataccaagtataatgctgccggaaaagcagtaatattagaaaatgatgagtggcgtgatgagaaagaatgggatgaagtatttgggctgatgcagaatgaacagaaaaacccttagtagtaagaagttcccttttacgaccaattttactactaacaggtagtaataacttgctcattcttgctctgatttgccacaatctgtaatttcagagtaaactacacgaaacccggaaacccttgcaaaacagggcattccggggcaaaacaaggagaaacaaaacaatgataaaaatactatttgtgtgccacggcactctttgaagaactccttaaaaagtcagtaaaatcaatacttggaaggtatttgtgtggaagaaataacccgaaaataacccatagatttttgtgtgagtgttacaagataaataattataatttagggatgtgacatgatgagaatgaaagctgtaagaattctaatagtggaatcttacagctttttttataaataaatttgaaagtaaaatctttacaatttggtatagcgtgttttaaatgtaaaaaagcag

SEQ ID NO: 2539 - DNA, 774 bp, Unknown
  gut microbiota DNA sequence
gatcgtatagtagctttccggcacaaactggtggatctcattttctctcgcctggatcatcgcaagcgtaggagtctgtacccggccgcaggacaactgtgcgttatatttgcaggtcagtgctctggtcgcgttgatgccgactagccagtccgcttctgcgcgggacactgctgcccggtataacggatcgtactctttgctgtttttcagctgagcaaatccatcccggatcgccttgtctgtcacggaagacacccacagtctccggcacggtttctggtttctcgcttcttttaagatccagcgcgccaccagttctccctctcttccggcatccgtcgcaatcacgatctctttgacatcctgccgctgtacctgttttttcaccgtctggaactgtttttccgtctgtcggatcacttcggtttccagttttttcggcacgatcggaagttcttccatcttccattctttatattttttatcgtatccttccgggtcttttaaggtgaccagatgtcccagtccccaggtaacgatataatcctttccttccaggaatccgtttccctgtggcgtacagtgaagcacccggccgatgtcccttcccacagaaggtttttctgccaatactaaggttttcatttttatcctcatttctgtctgttctgacatgattcttattctcttacactctggcatactatcgccattgccgctcccgatgaacaaactgcgtttgttcccgctcgctgacgctcattatatcat

SEQ ID NO: 2540 - DNA, 2148 bp, Unknown
  gut microbiota DNA sequence
tctggcgtttgcttctaccaaatgttaaaaaaatactttttgaaatattcgcacaattcgtgtatgataatattataattttaaaaaaggaggatttccaatgatttgtattaagaatggaacacttcacacagcagtaacaagggagacctttgtcgctgacattctgatcgataacggaaagattgtaacgatcggaaagcatatctcttctgaaaatgctgaagtaatcgatgcaaccgggcttcacgtgtatcccggcttcatagacgcacactgccacactggtcttgatggctatggaatcggctacgagggacaggactataatgaactgaatgacccggtcactccacaagtgcaggctatcgatggactcaacccatttgatccctgtatgaatatggctgcaaaagccggtgttacctgctttgcaaccggtcctggcagttccaattcaattggcggaacctttgcagctatcaagcctgtcggtactcgtattgacaatatgatcgtaaaatttcccattgccatgaaatgtgccttcggagaaaatccgaagcgttgctatcagaaccagggaatctccagccgtatgacaactgcttctaaaattcgtgaagcattacacacagcaaagctttataaggcaaagaaagaagcagccggtgacgatatttccaaacttccatcttacgaccagaaatcagaggctctgattccggtattgaatcgccagattccgttaaaggctcacgcacatcaggcaaacgatatttttactgcgatccgcattgctaaagagtttggtgtcggactgactctggaacatgtaacagagggacatatgatcgcaaacgagcttgcaaaagagaagtttcctcttgctgttggtcctacctttggtcatgccacaaaatttgagcttcagaataagacctgggagacccccggaattcttgcaaaagcaggctgtcatgtttccattatcacagatgcaccggtaattcctctccatcatctccctctctgcgcaggatttgcaatcaaagccggaatggatgaattcgatgctcttcgtgctgtaacaatcaaccctgctgaacatatcggtatcgcagaccgcgttggctcccttgaagagggaaaagatgctgatatcgttatcgtagacggcaacccatttgatgtgactggtgtgatcagacatgtgctgattgacggtaagaaagtggaatgatacttcctgcactttccagaaaatcactttatctaccggaaaagaatatttttccggttcactgctgcacacaatgggcttcctataaccattacatgctattccggggtattttccgaaaaatattttagcgaaattaatgcgccaaactcacggatacgctccgttttttcccctgtttcatccctatttttgatgccaattcctgacgccaatttttccactctgaaccggtttgaaacggttgaaaacgacattttttctctccaccagacagcaaaaaaccccggaaatcaaagatttccagggttttttaaatatgggtctgaggggaatcgaatatacgttcaatcccctgaaacccctatgtttccttgctttttaaatatcattcgtcaaaatttcactgctctgcttagtgaacaaagttcacagatttacccttctcgacgagataatgtacaactataaaatgtttttctttagtcgactgatatgtaagaagaacactgactacaaaatcagtgtccttctttcttcctttacatatatttcataatagtcggcaataatacattcatatctattggttttgcaacatgatcattcatgccacttgccaaagccatcttcttatcttcttcaaacgcatttgctgtcattgcaacaattggaatctgcgatttgttaccgtctttcagttctcgaattctcctggatgcttcatatccgttcataatcggcatctgaatatccatcagaatcagactgtagtaattttgctttgctttgttaaacatatcaatacatgcaacgccgttctccgctctttctatcatgattccctcttccgtcaaaagttccgttgcaatttctgcgttcaagtcattatcttctaccagaag

SEQ ID NO: 2541 - DNA, 3491 bp, Unknown
  gut microbiota DNA sequence
ataagcaatccgtctgcttcgatttcaatcgtatgtgaattgtcaaggtgcataggactgttcccattatccgggatcagtcctgccggagaagactccggttctatagcaatctggactacatcctgtttctgggatgtaaggtcaagagcgctggcttttccaactggattcggtatctgacaggctttttttcggagacgggtaactgcattgtaaaaacagctgggagatatcccatgctcattacaccatgcagcatctgtcaggccactttgtctgcattcagttaccagctccatccattcgtccagggaacgccctgaagcacgtttattactcataatgaaacctccaaatgtagtaaatttctatctcctatcaagcggagtgtagtaaaaatctatttactatcattatgagtccaaaaatgtagacagtaaagctacccaagatttaagcgcttaccaaagaaagtttaccactgaccgatatgtggtatataaatggtcgggttgtaagtttaccgctgaccgatatgcggtatataaatggttgggttgtaagtttagtccttcgccgaaaggcgagggactttttccatatttcgacagaaaggatggaacaaatgaaggaaacagacctcattattattgctttgaagatacaaatacaggaatttattggatgataccgctatcaagtagagtggaaaagtatagaaggattgttgagaaaaggaaaaatctggtagaagttgtgacattttacatattgtaaaatcggatgatagcagagaaagtgtctttttaatacaagatatgtttccgattacagagaaatacatagaacgtgagtatacgatcgctggaaatcatttgatgctgaccagtgaacatacggcaaaggtaatcgaacaaaaagcaagaaaagtgttgggaatgttaaagagtggtgtgaagtttatgcctacgcaaccggatgtgctatcaatattggagaaattaaagcagaaaggatagtttttgctggctctattttggctctaataatttgatacgagaaaatatcagataaaattcagagaatatgaatacaaaacgacataaatgtgtactgaaaagtacctagattatcccattcacccccgaatttgagtagcttgaatgtatcacagggcaaaggcttttatccagttttagggcaaaagtatcatcctgcgagaaaatgaaaataagttagaataaagaatagcatgaaaagctgtaaaaatctacgttagaattttacagctttttgtgtataataaaaattacagaaacaatttaaaatcaaaggaaggagctgaaaaaatatggcaaatattttaccagtatctgatttgagaaattataatgaagtcctgaaaaactgtcataaaggagaaccggtatatctgaccaagaatggcagaggacgtttcgttgtcatggatattgaagactatgagcgtgatcgtgcagagaaaaagcttctgatgaagctgcaggaagccgaagaagcagtgaaagacggagaaggctggctggatctggatgaattaaaagcacttgtgggggaatgagatgttaaaactgcggatcaatccgattgttgcaaagaatttgaaaaacatccgggattatattgccgaagacaaagaggaatatactgcgaagacaataaaagagatttatggtaaatttgaaaatcttcagatctttccgggaatgggatccgatctttttaaacgagtcagctttcggacagattataaatatgcgatatgggaagattatgtgattatctacaagatcggtaaggaatatgtagaggtttatcgtgtagttaaccgatatcaggatatcacgagaatctttgagtgataacagagatgtgataacaaattgataacaccgttcagtacagcctatggattcacgacagttgaacacatataaaaccaaatagaaccataatactaaaaagtatagtggtgagattttatttgcgagtttgaatagtagcagcgagtcttggaatccgctaaacaagcggcttccgagactttttcttttgctactaaccgcaattactctatttcacattgttttgttattagatagcttttctttgcggcatcgggattacttttcctgatgtcgttttttgggcataggaccatatggaagtcctgcattggcatatgctgtatccggagtaactgaatcgcctgctatattaccatcataggaaattcctgttttccaaacggatcaagcaggatgccttattttgtgctatcagtgcagaaaatatggagcattttatatttcttctggagaagctgggatttgaagtaaaacagggcaaacatatcgctgtaaaggttccggggatgaagcggtttaaaagattggataccatttcagaggatttgtgcagggagagtctggaagctatgtttcgatatggggacgcaagtcttgcagctcttgtaaatcgagctgtttcattactgccggcaagaaaagctgttttttcaccgtaccagagaaagtactatgcaaggatgtatcgtttgcgtctcgctgagaaaaaacggttcacttataaatctgcttatctgtatgagcagatacgaaaaatgcatgagcttcaggaagagtatctggtggtggtcaggtatgatgtgaaatcatatggagatttgtttcgcttgaagctacgactacaacaggtggatgaggaactgtgcaaggcgcagcaggaaatgtacagggatagggctttgcagaaaagaacttgcaagacggcggaagatttggaattctttgaagcatccgaggatgattatcgggaacgtttggagcagattaagcttcaaaagaaggataaccgaaagaagctgaaagcggtggaacggtgccttgagagagatggaagtctgggagaggctgaattggagtatcggatacctgttggagatatggtggatatggaagaggttgagaaagacgaagtgccggggaatccatatcgggtgcaggaggatgtggaagtagagaatactgttttggatgatgctgtggaggcagatgtaattacggaaccgaagtttgaatcagttgtagatgatgagcttgaaacagaggtagaaacgtttgcagagactgctgttacaggtcttaaaactgttggaaaaactgctgttacaaatgctgaaagtgttgtaaaaacagatattgatgtgatggctgagagtattgaatctggcatgcagaatgatgatattcggcagatatattatcggaggcgtttgactgtggagatatggagtattttgccgggattaagttgtttaacaaggtaattgacagacttggagttgatatggatcagcagaagcggtatgaagtgtttgaccatatttatgaggctggcatgcgctgattgtcaaggtagttgtcagt

SEQ ID NO: 2542 - DNA, 615 bp, Unknown
  gut microbiota DNA sequence
gatttcttagccaggaagtctttgttcttaacgatgtctttgcaggtatcgcattcgcatccttccagagcagcaaccagtttgtctgttgcagcaccgttggtagcgcctacgctgaaggtatcgatccattctttacaagctgcttttacttcatcagaagctttttcgctttccataactgcttctacttttgttttcagaccgtcacggattgctttctgagctaacagcataccataaccgaactctgcgttatcttcgaacagagagttggaccatgcaggaccctgtccttttgcatttacagtatatggtgtggatggtgaggagttaccccagatagaagaacatcctgttgcgttagcgatgtacattctgtcaccaaacagctgtgtgatcagttttgcgtaaggtgtctctccacaaccagcacatgctccggagaactccagcagaggctgtttgaactgagatccttttactgtattttctttgaattttgcgattacatcttctttctccggcagagttactgcataatcgaagaatttctgagattccacatttgcttccatgttttccatagccagtgcttttgcacctttcttgcct

SEQ ID NO: 2543 - DNA, 7453 bp, Unknown
  gut microbiota DNA sequence
ggattttcaatcggagtacgggctcaggaagcggatgatgaattctattcctttacatttgaatgcccgaaggatcgtgtgatcttcgagaaatctccgaactggccgtggccacagatgaacaatatgggactggaacgcctgattcgtctggttcctggaaagaaatatcatgtacagattatcgtggatgatacgattgctacactgtatgtggacggagttgccctgaatacccgcatgtatacaaacccgggggaaggaatctgcctgggagttacagatggaagtgcggtatttgagaatcagagtattgcatatctgtaaaagggaatcgggccgccgtactgtttttggtgcggcggccctgattttatcttgttcttttcagaacacttcgcgggatattacctgccggacagttacaatattttaaaagagaaacgatgtactggtgattcgagggtaagtataattcacaaaatggggtctgaaaaaacaggctccattttgcaattgtttactagtgaaaagaaaaaagtatgttataataaaaagaatactgtaaaaaaagaaatgcaataaggagatggaaatccatgaaagtatctatgtgtaaaaccatgcggacttatgagtggaaaaacctgccgaaagatcttctggcggggcttgtgatcatggcggtgtcgatcccgatatcgatgggatacgcgcagatcgcgggacttccggcggtgtacggactgtatggctcggtatttccaatcttactgtttgcgctgttttccacttcaccgcagtttattttcggggtggatgcggctccggcggcactggtgggatcggcactggtaagtctggggatcgagggcggatcgcgggaagcgcttgctgcggttccggtgctgaccttttttgtggcagtctggctgctggtcttctatctgtgccgggcaggaaaactggtgaattatatctcggctccggtgatgggcggatttatcagtggtatctgtaccacgatcattctgatgcaggtgccgaaattatttggcggcaaagcaggcgtcggcgaacttccggaactgctggaacatatctgggagagccggacggtctttcatctgccatcgctgcttctgggcgtcggtgcactggtgatccttctggtatccaaaaagatcattcccaaatttccgatggcagtgcttctgatggcgctgggagcaattggcacggtggtatttcagctggaagatctggggattcagacactcgtggcagtgaaaccgggacttccgacatggagtattccggattttggatcggttccgttaaaagaagctgtgacggtcagcctttcggtggcagttgtcatcatggcagaaacattactcgcggagaacagctttgcacagaagaaccgttaccggatcaatgacaatcaggagattcttgcatttgccatgggaaatcttgtcgcatcgtttaccggatgctgcccgatcaacggatcggtgtcaagaacggcgatgggggagcagtatcaggcgaaaactcagctgaccggtatcgtggctgggctgtcgatgatcgtactgttgctttgcggaaccggatttatcggatatctaccaattccggtgctgacggcgatcgtgatttccgcgttactgggggcgacggaatttgatctggcggcacggttatggaaggtgagccgcacggaatgcctgacctttgctggcgcatttttcggcgttctgattcttggaacgatcaacggggtattgatcggaatcattctttcgttctcggagatgatcattcgaacatccaagccgtcgagatgttttctcggtattcagccggggcaccggcatttccgggatctgaaggaaggcgatcagatccatgcgatcgaaggcgtgctgatctaccggttcagcagtaatctgttctttgccaatgtgcaggtgctgcaaagagatatcgaggacaatctgcgggaggatacgaaagcggtgatcctggatgcgagcggaatcggaagcatggatatcacagctgcagaccggttgaagctgttatacgagtcactgaaagagaaaaatatccgtttttatatcacagaacatatcgcaggtctgaatgaacagatgcggcagctgggacttggatttttgattcaggagggatgtgtgcgaagaacgacacatatcgcactgagagatatgggaatcacccgtccgtatccgctggaaggcggtgtggacaatgaacagcgcagtgcatcgagaaaacgtgccgacaaccgggtacaggaatttgtctgggcattcgggggtcaggcggaagaagagatcgagcggcagatcggttatcagatcgagcagttaaagaaaaccggcgatgtggaatatctgcttcacggccgctggtcccatatggaagatctggatcaggatgaatggctggagcatctggaagaacatctcaaagagatcgtcaatatttccggaaaagacgagcagacgctggcgatccgtctggagacacaccggcaggaagtgcatgataggatcgcgagggaacatccggaactggcggaacgtttccgggagagacgtcatctgcttgacgaacatctgaaagaaaaacgaccggaagtctatgaactcgtgattcacctaagagaaaagattagagacgaacatacagtagaggacagtgaaaaatgacagaggaaaacaataccatgacgatggagcaggcacagcaggagatgaaagaataccggaaggtgtttgacgttgtgcggctgatcggtgaagaaagtatccgaaaaatgaacgaaggacgggaaagcgagataccttccggggcagtggcatgttatacgttctggaaaaaaagtgagcgctgcaaaaactgtatcactgcacgggtctttcgggagaaggggcagcggaccaaactggaatttcgaggagaacagatttaccaggtgactgcacggtatgtcgagattgacggaaaaccgtatgtgatggaactggttaaggagatggaagaagaattccttctggatggcgaagggtgcgaaaaactggtccgtaaactggatggatacaaccgggaactgtatatggatgtgctgaccggttcctacaaccggaggtattatgaggagcggttgaaagaaaaaacaggatcagccggggtcgctgtgatcgatctggacgattttaaattgtggaacgatacctacggacacggtgcgggcgatgtggcgttacagacagttggcaagtccatccgcaaatccatacggaagacagatagcctggtacgctatggaggtgatgaatttatcctatttatgccggaggtcacagaagacgtttttctcaaaaaactggaatatatccagaagcagatccgtgatgcggatatccccggattttcccggatgcggctgtcggtgagcatcggcggtgtgacggtgcgggacgaagtgatggagcatgcggtacggaaagcggatcgtctgatgtatcaggcgaaacttcagaaaaatatggtggtgacggaacgaaaatccatcgatgcggacggaatcgtccgtctggaagaggaaaataagcgggcgaaacaactgattatgatcgtggatgattcggagatgaatcgcgatattctggcttcaatcctggaggaggattttcagatcatcgaggcggaaaacggagaagtatgcctgaatctgctgaaaaaatacggtgttgagatttcactgattcttctggatattgtgatgccgggaatgaacggttttcaggtactgcacgatatgaacaaaaatcactggatcgaggatgtgccggtgatcatgatctcgagtgaagattccgaagagagcatccggcgtgcttatgagatgggcgtgtcggactatatcagtcgtccgtttgatgcgaaagtcgtttaccagagagtatttaacacgatcaaactgtatgcaaaacagaggcggctgatcacactggttacagatcaggtctatgagaaagaaaaaaataaccggatcatggtaagtattttgagccagatcgtggaatttcgaaacggagaaagcggactgcatgtggaacacatcaacaagctgaccggtatgcttctggaacggctggtgcagaaaacggacaaataccatctgacctgggaggatcagtatctgatcacggtagcctccgcccttcatgatatcggaaagatcggaatcaatgaagaaattctgaacaaacagggaaaaatgacgccggaggaatttgaactgatgaagatgcatacgatgataggggcgtccatgctggaacggctggagatctataaagaagaacgtctggtacagagcgcgtatgagatctgccgctggcatcacgagcggtacgacggaggcggctacccggacggtctgaaaggggaagaaattccgattgcagcgcaggtggtttcaatcgtggatgtatacgatgccctgaccagccaaagagtttacaaagaggcatattcgcatgaaaaggcgatgcagatgatcctgacaggggaatgtggtgcatttcagccgctgttactcgaatgtctctgcgacattcaggaggaggcgcagcgggtgacagaggcgaaaagtgaaaaagatggaaaaatatcgggatttgaactgaccagtctggaagagacactgaaaaacagtcatctgatcggcggattaaaatcagaaaagaatcactgacagggtagaaaaaccgatcactatgtgataagataaatgcaatgtgttaaagtgaaaaagtgctaaaggaggagtaacgttatgtatattacatgtctggatgtagaaggggtactggttcctgaaatctgggtggcatttgccgaggaaagtgggatcccggagttgaagaaaacgaccagagacgagccggattatgataaactgatgaaatggagactgggagtgctgaaagaacacggactgggactcaaagagatccaggagacgatcgaaaagatccagccgcttccgggagcaaaagaattcttagatgaactgagaagcttcagccaggtgatcctgatcagcgatacctttgcagaatttgccagcccgctgatggaaaaactgggacgcccgacgttgttctgcaacagtctggaagtcgctgaaaacggagagatcaccggatataagatgcgtgtggaacagacaaaactgaccaccgtaaaagccttacagtccatcggatatgatacgatcgccagtggagattcctataatgacctggggatgatccaggcgagcaaggcgggattcctgttccgaagcaccgataagatcaaagcagattacccgcagatctcggcatatgagacgtatgacgaactgcttggcgcgatccggaaagcaatggcggactaaaaatgcttttgataaaagaaagcatggaaatcatagaagagaagtatggttctgtgcaaaaaaaacatattgacatagtatgtaattaataatatgatagtaatatccggttcagttgcagaagagactgaaaaaacgagacaacagacagctgagcaggatatccttatgaccgggagtatgactgcccggttataattttatgcaatcataaagattccgagagtacattatcagaacagggagaatgatatgttaaatcagttttcaagaacacagctgctgctgggtgaagaggcgatggaaaagctgaaaaactcaagagtggctgtttttggtgtcggcggtgtcggcggatatgtctgtgaggcactggtgcgaagcggtgtcggagcttttgatctgatcgatgacgacaaggtatgtctgaccaacctgaaccgtcagatcatcgctacgagaaaaaccgtaggaaaatataaagtagatgtgatgaaagaaaggatgctggagattaatccgaacgtggatgtgcgtatccataaatgtttctttcttccggaaaatgcggatgaattcccatttgaggaatacgattatgtcgtggatgcggtagataccgtgaccgcaaaaatcgagctggttatgaaatgtaaggaaaagaatgtgccgatcatgagcagcatgggcgccggcaataaattggatgccagccagttcaaagtagccgacatttacaagacaaaggtatgtcctctggcgaaagtaatgcgtcgggagctgaaaaagagaagggtaagaaaattaaaggtggtatattccgaagaactgccgaagcgtccgatcgaggatatgtccatcagctgcagaacacactgtatctgcccgccgggagccgcacacaagtgtacggagcgaagagatattcccggcagtgtggcttacgtgccgtcagtagccggactgatcattgccggagaggttgtaaaagatctgaccactgtaaagaaaacgaaatagattaagaaaggaaacgaaacagcatatggaagaaatgattacaagagaacagatggaaaaactgaaaaagctgcaggattatctgagaagtctggaatctgttgcagtagctttctccagtggtgtggactccacatttttattaaaagtggcaaaagatacactgggagataaggtgatggcggtgactgcccagtcctgttctttcccgaagagagagttaaaagaagcgattgcgttctgtgaaaaagaaggaatcaaacatgtgatctgcgaatccgaagaactgagtatcgaaggatttgcccagaacccgaagaaccgctgctatctgtgtaaaaaagaactgtttgaaaaaattcagaagatcgcagacgacaatggcatgaaagccatcgtggaaggctccaacctggatgacaatggagattaccgtccgggactgcaggcggtagcggaacttggaatcaaaagcccgttacgccactgtgatctgagcaaagcggatatccgtgcgctgtctcattatctgcacctgccgacctgggagaaacagtcctttgcctgtctgtcttcccgttttgtatacggagagaccatcactgaagaaaaactcggtatggtagataaagcggagcagctgcttctgaacatgggatttcatcaggtacgcgtccgtatccatggcatgatggcacgtatcgagatcgagccttccgagtttggaaaactgatggaagacgaaaatagagagaaaattgcgaaatcactgaaagaatacggatttacttatgtaacgctggatctgatgggctatcgtaccggaagtatgaacgagacattataagtatatagtatgcgtattaatatgataccagggtcaaaaggtctgaaatctgacgcaagcttgcttgcaggaagatttctgaacttgggacccgccaaaaa

SEQ ID NO: 2544 - DNA, 2589 bp, Unknown
  gut microbiota DNA sequence
tgcatctacatctgcggcaaagtgttcaaatggctgaaaaaacagggcggtctggaagcaatgaaagagcgcaacgaaaagaaagccaagatcctgtatgattatctggatgaaagcaaactgttcaagggaacggtagaaaaggcatcccgttctctgatgaacgttcctttcgtaaccggagatcctgatctggatgcaaaattcgtaaaagaagcaaaagaagcaggtctggagaatctgaaaggacacagaaccgttggcggtatgcgtgcaagtatttacaacgcaatgccgatcgaaggcgtggaaaaattagtagagttcatgaaaaaattcgagaaggagaatctgtaagatgtttcagtatcaatgcctgaatccaatctccaaggtgggactggatggatttacaaatgattacataaaaacagaagaaatagaaaaagccgatgcgatcctggtaagaagtgcttcgatgcatgagatgaaattaccggaaaacattcaggcaattgcccgtgccggagcaggtgtcaacaacattccgttaaaagactgtgcagaacaaggtatcgtcgtattcaacacaccgggagccaatgcaaacggtgtcaaagaaatggtgatcgccggtatgctccttgcttcccgtgatatcgtaggcggtgtagaatgggtaaaacaggaaaaagataacgaaaatgtcggaaaactggcagagaaacagaaaaaacagtttgccggctgcgagatcaaaggaaagaaactcggtgtcatcggtctgggagccatcggagccatggtagccaataccgctatttatcttggcatggaagtatacggatacgatccatatatatccgtagacactgcatggaagctttccagagagatcaaacatattgctaacgtagaagatattttcaaagagtgtgattacatcaccttgcatgtgccgcttcttgacagcacaaagggcatgatcagcaaagacagtatcgccatgatgaaagacggtgtggttctgttaaatttctccagagaccttctggtggatgaaactgctctggtagaagcactggaagcaggaaaagtgaaaaaatatgttacagattttgcaaatccgaccgttgcaggtgcaaaaaatacactggtaacaccgcatctgggcgcatccacagcagaatccgaggacaactgtgcatgcatggcagtcaaagaactgagagattatctggaaaatggtaatatccataattccgtgaactatccgaactgtgatatgggcatctgtagtgcagccggaagaatcgccatcaaccacagaaacgtagttaatatgatcagccagttcgcaaccgttctcggtggcgcaggcatgaacatctccgatatgacaaacaagagtaaaggggattacgcatacaccctgatcgacctggaaaccccggcaacgcaggagatcatcgataaattagacgagatcgagggcgttctgaaagtcagaatcgtaaaataaatagaaaataatatagagaggagagtcgttacatccgagaggctggacgactctctttttgtgtaatatagtattctatttacttcttcttacgattgtaattcgagtatgaaaatggtatgatagatataatatatgagaaaaaaagcaggaggtaggggtttatgtctgataaattatatgaattgatggactggccggagattgaagcggtggtatattccgaagaatacgcaccgagagaaatcctcggaccacatgtgaccggtgatggggtgctggtacagtgcttttttccgggagcggacaaagtaacggtgaagacaacaaaagacggcaaagaatacctgatgagcaaagaagacgatgcgggatattttgccgtattactgaacggaagaaaaattccggagtatacttatttggtggaaaaagagggagagcagacagaatgttatgatgcgtatgcatttccctgtcagattacactggaggaagaacagaagtttatcaatggcatctgctatgatatttacgaaaaactgggtgcgcatccgatgactgtcaacggtgtggacggcgtgtattttgcagtctgggcaccgaatgcatcacgtgtcagcgtggttggcgattttaaccactgggacggcagagtgtaccagatgcagcggctttccgtatcgggaatctatgagctgtttatcccgcagattccggtaggctccctgtacaaatacgaactgaaattaaaggatggtctgatctatctgaaagccgatccgtatgcaaaccaggcggaacttcgtccggcaacggcatcgatcgtggcagacctgaacggatatacctggaaagaccagacctggatgaaagaccggaaaaagatccagaccgaggatgcaccgatgtttgtctatgagatgcatctgggatcctggaagaaaccggaagacggaagagaattttacaattaccgggaactggcaccaatgatcgtggcatatgtcaaagagatggggtatacccatgtagaactgatgccgattatggaacatccgtttgat

SEQ ID NO: 2545 - DNA, 3876 bp, Unknown
  gut microbiota DNA sequence
ataattacttataaatcacaattatttactgttcttgggaacgggatgacgtcacggatgttacccattcctgtcagatacatcacacaacgctcaaatccaagaccgaatccggcatgtcttgtgctgccgtattttctcagatccatgtagaatccatagtcttctttgttcagacccagctcgtccatacgcgctgccagtttgtcgtagtcgtcctctctctggcttccgccgatgatctcaccgataccaggtaccagacaatcaaccgctgccacggtcttgccgtcatcgttcagtttcatatagaacgctttgatatccttcggatagtccgtaacaaataccggacgtttgtacacctgctcagtcagataacgctcatgctcggtctgcagatcgcatccccaggacactttgtattcgaatttgtcgttgttcttcgtcagaatatcaatggcttctgtgtaagttacacgggcaaattcagaatttaccacgttgttcagacggtctaacagtcctttgtcgatgaaggagttgaagaagttcatctcttccggtgcgttttccagaacgtaatggatgatgtatttcagcatggattctgccaggatcatatcatcgtccagatctgcaaaagcaatctccggctcgatcatccagaactctgctgcatgacgggtcgtgttggagttctctgcacggaaggtcggtccgaatgtatagatgttacggaatgcctgtgcataagtctcgccgttcagctgtccgcttacggtcaggttggtcggtttattgaagaagtctttggaaaaatctacttttccgtcttctgtcttcggaatgttgttcagatccatggtggttacctggaacatctcaccggcaccttcacagtcgcttcctgtgatcagtggagtgtgcacatagacaaatcctctctcttggaagaatttgtggatcgcataagcgatcagggaacgtacacggaacacggcctggaaagtgttggttctcggacgcagatgggaaactgtacgcaggtattccatgctgtggcgttttttctgcagcggataatccggtgcggaagcgccctctacgctgatctcggctgcctggatctcaaatggctgttttgcctgtggggttgccaccagagttccctttacgatgatggctgcacctacgttcagtttggagatctctgcaaagttctccatggaatcgtggtataccacctgtaaggtttcaaaaaatgttccatcgtgcagaacaataaatccaaatgttttggagtcacgtacgcttcgtacccatcctcctacggtaatctctttatccaggaatgcttcccggtttttgtatatctctctgacagttgtaagctgcataacaaaagtcctccctctctgacatttttcaggaccgcttgcccgtacctgcaaactgcccatattgcatttattgtatcatttttcatgaagctattcaagtttcttattcgtgcgtttccgctattcgcttttacttgccgctcccagattgtccatatatccgacaaatacatttccggcactctcaaacaggcttgtgctgtcctgcataccgaagtagccctgttcctgcgttgccggatagtacaggatcgtattcttgctgttgtaacctatgatgaccacatttaccgtatctgataccttggcgatcaccggattgcccttgctgacctgatacagtacgctgtccagggaacagccggtaagattcatcacggtataatcatctccgagagactgctgcagagtatcctcatcaatggttccgctcagtaccacggatggcacttcgtccagatttgcctgataactgtcctgacggtttccgcgctcccatacatactgctgctgccggttcagtaccacgcccatctgcgcatctgcccggttgatcgcatcgctgactctgctccaggtgctgtccagcataccttttgcatagacataataaatattggaatccggtcttgtaagttccatcgaaagtacattgtacgtttcctgattttccagatttgatgccagatacagcacatttttgctggtcacgctcttttcaaagtccagaccgatctgtgtggctttccgctccgtcgtgatcagacgcagcgttacctgttcttcccggatctgtaagttgttcatgatatgatcactgctgatcgccacatacgcgccgttttcccactgtacccgttccagttccagcagaccttcctccagcttcacatcactgacccatactttatcctcatgatgttccttgaccacttccccgccaaactgttcgatccggacggtagtcatggcaaatgtcgtattgcccgcgttatccgtcacaatatcgctgtcgttggcgattccgtacaccagatcctcattcataaatccaagtgccttgatcttctgcccggactgcgcctggatcgtataagactctccctgttccagactcatcaccgtgatctgtgtacctgcattttcgtcttcctgatccatccaggcgatacttgcctgtgatttggataccacataccggtccttgatcaggttttctttcacaatctgaaaatctttctgtttaatgtcgatccgatacagatcatcctccaggatcacatacagcatgtcatctctggtcacataagagagaagtttcatatcttctttcaggtattcataagaactcttcatcggaataaacagttcttcttccacctggttcagttctgctccgtaatggtaaaccgcgattccgacttcaccctcatgcacatctcggttcatgtaaccgtacacaacaaaatcaatatccccggattcttccacgcggacaatcttgatcccgtgttcctgcaagttctcccgctcatccagatcaccgtcccggaagctgaagatctgtgtcgctttgttggcactgcggttataactccacagttcgccctcctgaacaaacgccacaatgtccgaactcttattggactgatactgcacatccttgtccgcaacacccagattgattcccttgctggtcagttccgtatgctttccgtcatacaactcctgtgtatttcgttcaaagtccagcagcatcacgcgcgactgcgcataccgcatccggtaaaagtctgttacattataataatcggtcgtctcgtcctccggcgtatctgacagcacatacgtcagataaatactgcaggtggtctcattcatatccttgatgaccggcactgcctctttttccagtttcatatccagcgtcccccaggtgatccggtcaaaactggaatgaatattcagattttcataggtgctgttcgtctgtgtctcatccggttccagataagctgccagcgtggacgcattctcggaatccagacaggtctgataaaaattatccgcaaattccagataatccgaaatattggttcctgcccgctgcaacagacgggtgtaataataatacgtttccccgttatccagtgtcacatcaaaccgaagcgtgtattcctgattcatcaaaatcggtgtttccagctgaaaatccgcccggatctccccgtctgtctttttcagtttgctgatcttacttgtctccacaacttccgttccgtctgccgtcgatacccggtaactcaccgtctttaccgatgcgttcttcggattcatcaccatcgtcagacttctgtccgtcggaagcggtgtcaggctgtcacgcatatactgctcttccatctcatttgcatatccgtacatcggatttacctttgtatcagatactgccatatacagaatcggaagactc

SEQ ID NO: 2546 - DNA, 26078 bp, Unknown
  gut microbiota DNA sequence
tgggtagctccgaatttttcagcagtgcagatcaccttttccagtgtctttctgtgctctgcgtactggatcgggttacaataatatccgagtgtagtgatcttagaatctgttcctgcaaggagtttgtctgtggtcagtgccagtttgtcaagatctgttccttccagtgacatatggaaattaagggaaaatgtttcgaagccttttcccacaaatcctttcaaccattcttctgccacgggtcccggcacgcaggttccgattttaatctgtttcatacttttttcctcctgttctgttacatgcactctcaaagaacatgtacaactggtttcaatttttatgttataactgttctgcttatgatttctatctatagttattcagtatcttcttagttacacctggtcctgaaattcgatcacctggtttgtctccgctgaccggaagattgcttccatcagtttcatcacgcgcatcacctggaacagtttgatctcaggttctgctccgtcccggatcactgcaactacatttctgtggaagtctgcaatatctccggatacctttggcaagtcttctttcacaatggtatcttcccgtctcggtgccatggtctttgtcagaccggctgctgtcttaaccggtactaccgtctcttccgtcctaccggtcttacggatgatctcaccgtttaactgccagtcccggatcactgcggtaccgtcttctcccagtacataccatctcggcagggagatataattgttggtgccgacttccaccaggacttccgttccaccttcaaatgtcaggatagcagtgaagccatcgtccacttcctggttagtgacattggtaagtgaggcgtatacggtctcgatctttctgtcaccgtacatatataagatctgatccagcagatgtacgccccagtccaggaccattccgccaccatggatcttttcttttctccagtcgcccgggatacctcttgaaccatgaacacggctctcgatccggaagacatgtcccagtttctgctcctctaccagctttttgatgatcaggaaatcatcatcccaccgtctgttctggtgtacagtaagtaattttcctgtctctttggctgcattttccatctccagcagatctgtggaagataatgtcaccggtttttccgatattacattcttccctgcatgcatggcacggatggcgataggcttgtggcagtcattcggagtagcgatcagaaccacatcgatatccggatctgccagcatagcttcttctgtttcatatacaaaaaagcccttctccttcgcttcttctctcttttcttccttgatgtcatagatgccaccgattacagcttccggaacattagaaaggatctccgtatgccatctgcccattccgccatatccgatcaatccgtaaattactttgttttccctcattttgaacctccatcgtaaaaacagcggctgatgaacaccatcagccgctatcgcttttacttacttaattcttcgttgatttctttaagaatctggtcaccgccctgactcttccagttctcaacaaaagtatcgaattcgctgatatctgcttttcccataacgatttttgagaatgtttcttcttccattttcttcagattggcccattttgtttccatggtttctgtctgaccgttatatgcattgtaaacaggtacatatttgtcatttacagaaggagcatctccaaccaggatggacacaagtctcggaaggttgtttttggcaatgtcactgtccagattccatttgtccaggctaaagtcatcgtaaggctcttttttcagttttgtaactgcttccatatcactctttaacagtttgtgtgttgagaagtcaacatcatccatggtgatttctcctgcaagatatttggtcagaacatcataagacacttcaatttcatctgcattgtcataggtgttgtacagaggatagaaatccgcagtacccatctctgtggtagaaacaccttcgtctacccatttctgctcatttttgatcaggtaattgacaatcttaaatgcagcttccggattcttgcatgctttgcttgctactacatattgtgttgtaggctctgccatatgagcgtaatagtttccatcctcagataatggtgtaaagtatgcctgccagtctgccgcacctgccagggtagcatctactacggtataaccacaccaccatggtccaaagaagattccaaccttgccagccagaagaggttctttactgtcacttcttacaagcatttccgggtcgatcagtttatttgtatacagttctgagattttttccagtgcatctctggtttccggctggatagaaccatactctacagttccgtcctcaccctgcagccagtactgcggatatgactggaagctgctgaacagcggatccagaccatactgatttcctccgattgcattcatatgatcggaattactcggtccgagaataccaatcgtatcatcctctccgtttccatccgggtcctgagtaacaaacgcttctgctacctttaccagctcatcccatgttctcggagcctccagtccaagtttgtccagccagtcctgacggatccacatttcattgattccacctgctgttatggccggagccggaatcgccatcagttctccatcttcattggtgatacatttcttcagttcttcaccgccggatttcacataacttttcagtgcatctgaagcataatcatcaaaatacttatccagtggctggatcatatcgtatttcagaagtgctctgtactgtgttgcatttacgttcatcagctccggaacggtattacttccgatacacagattcattttttcttcaaagtctgtggatgatgcaacccagtcatatacaacctcgatgttaagatcttctttcagaaaatctatgtatggattatcgtcataagccattccatccggaagcttggcattcgggttcagagaaccaccaagatgaaccgttacggtttccgggtatttggacagcggcagatcttctttggctgttccttctgcctcacttactgcctctttctgtgtgctctcttctgattttccgcatcctgccagtgaggtaacggctaatgccattgcgctggcaaatgcgatcaactgtttctttttcattctttttttcctccttttatccttttactgatcccagtgtgataccctctacaaaatatctttgcaggaacggataaacgatcagtacaggtatcatagctataaatatttttgcagaatccaatgaaaggttatttaatttcattgcctgcgcgatctgatccacgttcatcgtggaataatccagagttactaccatctgctggatgtaggtctgcagtgggtaactggtctgtcttgtacttaaaaccattccctggaagaattcattccagtacataaccatggtgaacagcgcaacggttgcaaccataggctttgccagcggcacgtagatagatatcaggtttctccatggtccgccgccatcgacaaaacatgcttcttccagttctaccggaagatttttgaaaaagtttactgcaaggattacattgaatacctgaagtcccgttcccaataccagtccaaaaatgttatccatcagattataatttttcatggtgatataccacggaaccgtacctccgttgaataacatgcagaatacgaagatccacataaagatatctctcttcgggaactgttttttcgttctggataacggaaatgccgccataaggatacataccatactgattcctgttcccagtaaaacccttttaatagataccagaaaggaaccaaagaatgcggtctctcccatgatcttcttataggagagcaagttgaagccaaccggccagagagcaacctgtcccgcattgactgcttctctgctgctcagggatacacagagaacgtaccatacaggtacaatacagatcaaagtaactgcaatgagaagcactacatttaaaatatcaaaaatctttgatccgagacttttattctcaatcatagttacaacctcctaaaacagtttataaccggtaaatttatctgccagccagtaaccaaccgtaatcaacacaagactgatcacagatttgaacaatccaacagctgttgccagtgaatactggagattttgcagaccggctctgtatacccatgtgtcaataatatctcctgttgagtaaaccagcgggttatacaggttataaatctggtcgaatcccgcattcaggatatttccaagagacaggatagccagaagtgctactgttgttttgataccaggtaaagttacatgccagattcttttgaatcgtccgcagccgtctactgccgcagcttcatacaacgatccgtccacgcccaggatcgccgcaagataaacgactgtgttatagccgaatcctttccagatatccgtaccgattaccagaggctggaaaagctttgcttcgccaaagaagttgaccgcatcgcctccgaacaatcctatgatctgattcaccggtcctgtatacccgaaaatattcagcacgatcttcgcgagaataacccatgacagaaaatacggtaaatatacgattgtctggatcggacgtttcatttttttcactgccagttcatttaacagcaaagcaaagaccagcgggataataatatttccgataatcttgccaacggcaatgacaactgtgttacgtaaaacctgtgtaatgtcactcatctgaaacatatactcaaaattagccaggccaacaaattttgaatggagaatgccctgtccaggattgtaatcctgaaaagccatgacaattccgaacattggaacaatgctgaaaaagaacagccacagtaatgcagggatcagcataatgtaatagtgtttcacaaatcttttgatgtacatgagtaaacctcccttcctttatggatagtttatcctgtaatcatattttccactagacgatattgtttcagattccacagtcttttttttaattcaaaaaaaatgtccgaattaaatcgaacatttttttaatcttcctgcatattctgttggcgtacatccgtattcctttgaaaatacctttgtgaaataataaaaattgtcatatcccagatccgatgcgatctgggtgatgttttctgttccttttgccatcttccgggcagccgcctgcatttttctgctgatcacatagttatgaaaggtatcacctgttatctccttaaatctcgtgctgaaataacttctgctcattccgatctgtgttgctacctcttctgacttcagattttcttctatatgctcgtctgtatacaggatcactcttgcaaacatataaatatcctttgttttatcagtctgcagacacgtctgatacagattctccttccagttttttacccattccagcatctcatccacagaagataaggatggaaattcaagttcttctcctgtgagtttctggaagctgtggaaactttttataaaaaccctttcagcagtccgcagctccacgccccgggttatctcgcacagtctgttgaactcacagtcattaaagatccatctggtattcgtccacgctttttccagccttttctggagtccggaatcctccttccggggttcttttttcgactgattttccttatactttctttctacaagttccagaatctggtcacactcatccccatcaaagcttattttggatatgtaatccagggctcccagtctcagggcactctgtgcataacggaaatcttcatacatagaaaagactacgaatttcacctccggatattcctttttacacattttcatcagttcaattccatcaatctccggcatgtctatatccgtgaatacaatatccacttcattatccttcagaaattccagcgctttacggccattctggacatcccccacaacttcaaatccatatttgccccaatccattatagaaatcaaaccttttcttgccagtttatcatcatctacaaccaataccttcatttctccataccctctttttccgtcccagatcctgtgaatttgattttattccgaagttcttcctgaatcggaatcaaaattgtaattttggttccatagccttttttgcaattaacaaacaggttcgtctctccttcataaaaagattccagcattgcttttacatatcgcagaccgattcctctgtttccatgctgcatttttttcacatcataatcaaatggttcattgatctgattgatctcctcctgggtcaggccattaccactgtccaatatggtaatgatcgccagtcccctgatattatcctcaaagacctgtattgtaatcttttcatcgtctccaagtccataccgtatcgcattttccaccagtggctgcaacagcatccgtaccgtcggctgttccagataacgcccctcttccacattcatttctattacaaaatcatatcgcatctgttccagtgcaatataatctttcacaatatcgatttctgttcgaagtgttgtctgcattccttcttttccaagattatacgacagcagtctttttaagcgctgtacaaattccgtaatattatcctgtttgctcattcttgccatccactgaacggaatttaacgtattgagcagaaaatgtggattgatctggtacaggagcttctcatattccgttcgctgaatacttttttctttttccacaacatcatctatcaggttcctgatctgttccttcatctgttccacttcgtgcatcaggtcatcgaattccttgatctcatactcctgttccgcctcttgtaaagatccatttcccacctgaatcgtctgtttttgaaactgattgaggggtttgcatatcaaccggtaaaggtaaaaaaccgaactggaaaaaataccaaaagctgccaggatgataaccactaacttcagtctccacatattcatttctttctgataggtattctccggcagtgcaatggcattgacatatccgatggaactgcgatacgccatgattttgtatccttcctgatttatcgcagcatatccttctttttccggtaattccgacaaaagcttctgtcccttgacgatcaccggattattgctgtactgtacaataccattttcatccagttccatataggtatatggccatttttctttatttagtcgatctgaaacactcatatccggctccatttctgcataaatatccagtacccgtttgtttccaaaggaaactctccgcatcacggatagtaccggcgtctccttgattcccagataggatgtatgcatagcctgaatgatgttctcggcacctactactactttagaaattgtctggtatgacggatccagaacccttacgttaaaattcccaatcagttccttttgctctttcggatcgtaatatgcgatgccaaggagctttgtgttcacatatccaagttttatcagttcttctctgagagatttctgctcaaaatatcgatcatagttgtcttccgcactcagatatctttctgtcacatttccgataagtccgttggggctcatctgattgacaataccgatcatgtcataataatcactgtctatctcccgcgtgatctgctccagatatatctgcatactctcctggatactgttattctggatcattcggatcgtcatatacgacacgatcactaccgcaagaatacatgacattgcacagagcagaagaatgcttagcatctttcttttaagtgtctgtttccctcgttttcttcttttcatatcagattctcccactcctgttctatcgccttccatatcgccgtaaggctgcggaacagttacctttttatcctatttaaagaatatagaacttttttccgaaagtcaactgtttacaaactatcattctcatcgaaaaatcaaagaacagcaaaaagtccatggagatagtttccttttagaattgagcaactacatgtaattctaaaaaacatctccatggacattttcaattaagattatgacaatttatgtaactgttcagtaccttcacagttaatggctactgaatagttaccaatttatttacctattcaggtgcttcctcaagttcttcaaaggaaggaatcgacggctgcgcacccttacgtgttactacaatattagaaaccctgctggccagttctactgcttcgtccagagaatctcctcgcgataaagcaactgccaaacctgccacatagctgtctccggcagctgtggtatctaccacatggactgtcttatcagcatacagccttttttccgtatgatcttctttcaaaagataagagccttcgcctcctaatgtaacaactatgttctttacacccttttgttgcaatagcttagcatttgtacacagattttcctcatcactgcattcctgcaacagaatggcaagttctgtttcatttggcttgatcacatccacacaggcgaacaattcatcaggcagatcagatactgcaggtgccggatccagtattaccgtttttcctctttttcgagcttccttcaccgcatacattacggtttccagaggaatttcaagctgtactactataatatcacttgcttccagcaaatccatattttccatgatatacgatttgtctacatgtgcatttgcgcccggaattaccagtatgctgttgtcgccttcaggtattacgccaataacagcaattcctgtagacacgccactcaatttgcgtatacgagaaacatcaactccaacactctccagattttcacacaatctttcgccatatgtatcctgtcctaccatcccgagcatcgccacgtttccgtgcattttcccaatggcataagactgattggcacctttcccaccaggcacaagttcaaaattttcagctaaaatagtttcgcctaccgtcggtatgtgcgatacgtcggcaacgaaatccatattcaggctgccaatcacgagtatttttttcatgttgcttcttactcccttccagttattgcaatatcacgatacaaacagtgacttcctttctcaacagatatacctgcacaaccggtcagcagtggcaaatcggaatctgtaaacttcagatactctttatcatttactgatacgctgattgttgagccatcagccgttaacgaaatcttatactcctcatccactttccactcaaagtctgtctcacacagtgtaatgtaaccgtagtaatttttccgtaaaaccaacttattgttcttggagaaaccggctgcataactacgcatagcaccctgcactcgaatgttcacaaaatgctccgtactggttacaggttttaagacggctgttacccggtaattgttccacaagtgatgtcctgtatacatttccgcaaaatccgcacaggaaagactcagatactgtccatccagataactatgtcctttgagtttcgcaaactgcggaacttcctgatgtgtaacatgccagctgtcaagcttcattcttccaaaatccagacgataatccggcttaccatcaaaatacaggtcgtctatgtaagctgccacatctcccatagcaaatcccttagccacaccacagagaataacaccaacctcactgatatgaccggtctgtccgccaggaatctccagtgaaagagcatgccactcaccatcacctttaactttttctccgcgaatcacttctccggtcactccattttttgcatagatttgcgctgtggtagccatttcctctcccggaagcggcattacactcaaatgcacggtctgtcccggataaaccaacggagcaaagaacggatcataacgagaatcgtcgaagtcctcagaactataatacgtctgtttatagaagaaactctcttctccggatgatgtcactgccgtcaatttaagagaacgttttcccgtataagcctgttcgtctgtgttgcgtatataacagtctcccggcgaataacttctgatcgcatgagtgctggtcggatattcaaagtgacaactatccattctttcattcaaaattgtattccaattctccggtatttcctctccagccaaaacataagccattttagcgaaatagctggcaccaaacggaatatcaactgcattcaaagaaggtaacacatttgaacatgcaaggaaatcattaatcggttttacccatttgtcataatcgattccatcgatacctgcgaatacacccatgatagttcctacattgccaacattacagtctgtatcccaaccacacatattgcagatattaatcgtatctgaaaaatcttcatgaccatacagcatagacaggatcataaccgcagcattaggtatgatatgacaggttcccggatacttatcatagccaaaattctcaaaaatgtaattgaagcaatcacgccagttctccggatgctcatcatgaaacttcatgactgcctttactacacgggcatattcacaatcactggggatgtactgaagcgccttctcaagaatatcgcgaatactcttttccacaaaagccagactaatgcaacatgcaacatatattccaccatacacaccgtttccaccatgtgtaacgctggctgcctgttcggcaagttttgctgcctgctccggatttcccggagaaacaagtccccatgaatcaataaaaatctgaccgccgatttgttccgccatcgtagcaccgttctgttctatacttccactcctcggcgcaggaataccatttctaaggttcagataagccgtatgctctgttgaaacaccataaccaccccaccagaagaatccgtgttcatacggtgcatagtttaataacgcatttgctacatctttggaagagaagttgttcgaatcttcgcaatcttctaatgctcgaataaaaaacagcggaccgttgctatcatcatcagcggcaaagttcttataatcagcaggataagaccacacttctccgaacacatcgcgaatgcgctgatatgtccaaccttcgataggtgctcccagacgaataccaataatctttccaagccatcccgcataaaccttttccatataattctcagtaattttcatattatcagccccctaatattcaaatttatcctttaattccactcataactattccctgaacaaaatatttttgtgcaaatatatacaccagtaagattggcagcatagaaatcaatgcaccagccatcatttggttccactgagagacatacgttccctggaattgagccaaccccatagctaaagtccatttttcttcactgttaataaaaatcaaaggacgcaaaaaatcattccaggtattcatgaaagtaaaaattatcaatgtcatcagagccggcttagagttcttcagaatgacctcccagaaaattcgcggataactacatccgtcaattttagcagcctcctccagttctttcggaattgtaaggaaaaactgacgaagcaaaaatgtcccaaatgcattaaaaattccaacagcaaccagagacgatttggtatctatcaatcccatatacttgattattttaaactgtggaatcataacagcctgaaatggaatcatcatagtaccgagataaatgatgaataaaatattttttcccttaaagttcaaacgtgcaaacgcataggctgccatagaacatgtaataagctgtcccaaaatagtaaatactgtaataaagatcgtatttccaaaatacacgaaccatggcgcctgctcaaacatatacacataattttcccacgctacgtgctttggaatccagtatggcggtatggcatacaactcttgtacatctttcagggatgaagatatcatccaaaggaaaggaatcagcatggaaattgaacagagaatgagtaccgcatgcgttaatatctgaaagactttcttctttatttttgctcttttgttttgtccaaaagaattttccatttttctccctccttaaatgctatttctttcactgaatcgaagttgaacgatgctggctataaaaacaataatgaacagtatataggccatagcagacgcatatccctgtttaaaatactggaaagcattcatataaataagatagctgaccacctgcgtagccgtaccaggtccaccctttgtcattacataaatctgatcgaaagcctggaacgaattaatcatacttataattgtaacaaaaacaatcgtcggttttaacaaaggcattgtgattttaaaaaatttctgaactacatttgccccgtctatatctgcagattcatagatctcagaagaaatcccctgtacaccagcaagaagaattaccgcattaaatcctagatttttccaaatactcataataatgaccgatggcatagcccacttttcacttgtaagccacggcggttgatataagccaagttgtcccagaaaggcatttattaaaccataatcctcattatacaaccactgccaaaccatggtaatcgagacatatgacacaataaccggtataaagaacgcagatctatacacgttaaccccgtggattttctgatttaacagtaccgctaccagaatagctaaaaatactccaacgggaaccgttccaatagtgaaatagacggtatgaaacagtgcctcaccgaattctttgtttgtaaaaagcatcgcgtaattttgaaatccgacaaatttcggtggttgaattccgtcataatttgtaaggctgtagtaaaatgacattacaaccggaaatactgtgaaaaccaaaaagccgataattactggtgacaagaaaacatatccccagaaattttcttttgcatcaagcctctttgtcttctttttcttcactgtatttgatttcttttccattttgatcacctcaactaaaaaacaatactgccaataatacaggaagggagaaattttcttaaattctgaaatttctcccttcctcatcctgattttacatcctgatgcaaatattaatttgccaaaatggcattaatttcttttatcagcttttcctgtgtctcttctggtgtgctcttgccaatcagcatttcatcgacaagctgctgtacttttgtattaacctctgtacgataaatagacaactgatccttgagatcacaatccggcacagaatctacaaatgcttttacgttagacgggaatttgctgtctaaaacaatctgaagggcttctttgtctgtacttcccggcagagccatattcgattctgctacaattctgtttccttcaggtccgcataagaattttaaaagatcccatgcagcttcaggatttttggtagattttgagataccccagttaagaatacctgcttttgtattctgatttttgtccatcggcatacgtactacatcccattcgaaaggaagaggattctctttgtaagtaggtaacatccacagacctgcagattccatagctaccttctgattacggaacattgcgtctgcgcctttgcccattgctgtcagtgctgcagggttaggagagagttcatctttaacaactaaatcatacaagaatgtcaaggcattaagagcttctggtgtatccagacccttaacttctttaccactaatatcaaaatcaacaccggcacgtgagagccatcccagaacctgatctgcccatgcgcccggatggcgataaccataaaccttttcagcaggatcggtcaatgcttctgctgcagcatagaattcgtcaattgtccaatcgtctgtcggcagtggtacatttgctgcttcaaacatctctttgttataataaattacaaacggagaaacttcctgtggcaatgcatacaactcaccttcataacgtaacggagtcagaagggattctggataaacagatgtatcaaactgttcctgttcaatcagatcatttaatccaagaagtactcctttgttagccataacataagtccactcattaagataaataatatccggcgcattatctgcaccaatcagtgtcatcagcttttggaaacgttcactaccaatatcaaccggtttgattgtaacatttggatgttccttcatatacagatcaaatttctgctgatggatagcaatctcctgggcactaccactaacagccacttcaagagtaactttctcatcatccgtctttgttgaagcatcctcatctgtacttgttgttgaagaaccctcatccttcttacttgcttcctcggtgctaccgcaaccaaagaaagtggttgcagccattgcagtagccataaacatggctaaaattttctttgacataatcttatctttcctcctaaattcctcatattgtttagtgattctcaacgcaactttttaaaataactgcatgtgtagaacccttcttcaggaagaatgctttttaatattcttgactaatattttatgtatattaaacactgtcttcgcattcatcctccaaatacatatttcctgagcagatcatcggtgatttgctctacttctggcagctctaataatgttttcacctctctttcatgagccatttgatgtcgcctaaatttttaattattcacgataatacatcgtctcacttcatcctacatattgcttaggaaattgatatattaaaaccttttcttatttaatcttacgttttaagttgcttattgtcaatcgtattttgtctgtttttgtacgaaagtactttcttacctaattttccttgtgtttttttaccgattttaacaatacccattacacgtttcgaattgacttttacttttagataagatagactattttttaagcatatttatatcattggtaaaatatcaatgtattttatcgccttgattcaatctttaggaggaaaataaatgacaatcaaagaaatcgcccaactctcaggagtctctatatctactgtttccaaaatcatgaatcacaaggacgaacatatttctcctgaaactcgcgacaaggttctgagcatcgcaaaagaatataactattctccctatgcttttgcacggaatacatctatctcaaaatctttcctgttaggtgttcttttacgctctgaaccaaattacggtaaactgttagatggaattctttctgcggctgaagaagccggatatcacgttattgtctgcatcagtaacgaaaatgaacaaatcgaattaaaacatattactgcactttgtaatgctaaaattgacggaattatctgggaaccagtttccccaaacagtttacgcttccaaaagtatttttcagaaatcggaacttgcattacctggttgaacgccttccattctgattcacacaaaattgattaccaagcgctgctctataaagcttccgaatgtcttattcaaaataagcatcaacattttgcattgttaacagattcatcatccccgttttatgatgaaattataaccggctacaaagcagcattatttgaacaagaattcccattcaaccaaaacagcctgttgccacaagatgcttctgattggatgttccacattaaaagccagcagcttaccggaatactctgtacagattgccaactggcttattatctgaagaaaaagctgacacaacatttgtatgaaattccgtatgatttgtctctgatcaccttagtggatgatgccgctccaccaattgtttccgccgagttttcttcaatcattattcctttttatgatttcggcatgcacctgtgtaaaactctgattgaacaatgcgaacaacattccaccgttttttcgccatttatcgcagattataaattggaaaatacaattacattggatattcctgcttccaaacgtttgccacagatcattgtcgtcggcagcatcaataccgatattagtttgaacattcctcatcttccaaatcctaatgaaactattgtcacttcaagacatagtatttctcccggaggtaaaggaacaaatcaagcagtaggagtcgctaaactaaatcataaagtaactcttcttggtaatgtaggaaatgaccttgatgtcggattaatttactcttgtctggaggaacatggtattgacagttctggcatccacagagacagatccgtcaacaccggaaaggcctatattcaaatccaagacgatggagaatctattatcacactcctgactggtgcaaatgccactttgacagctcagacgcttcgaaataaccgccattttttcgaaaactgtgcttactgcctattgcagaccgaaattgcaattgaagctgttgaagaggcggttcttatcgccaaagagaataatgtcaaaacgattttgaaaccggctgctgtctcatccttaagtgagaacatcctcaaacatacagatattctcattcccaaccaatctgagatggcactgctttgtaatcgacctgcttccatagataccgctgagctttcccatcaggcagatatcatgcttcaaaaaggtgttggcgctgttgtcattacacttggagagttcggttgcttcctgaaaactgcttctatggaacaacgttttcctgcagcggctgattttattcctatggacagcaccggcggaagcgatgcttttattagtgcttttgcatcctatctcctctatggttatgatttgtgcaccgctattaaaatcgccacattcgctgctggtttttgtatttccaggcaaggagttgttcctgcattaatagaccaaacctcccttgaaaaatatataaataatgtttcgcctgatcttttgaaatagtttagataaatcatagttctaacattaatttcattttcaacatcgataattaaacgagcataactaaacagcacatagcacatttcaagaataaaaataaggctgctgccatatcctcggaatcttctctcccgaatggcatcagccttctgctttatctttatttcttcacactaatcaacatttacactcatactggtcttcctctctaggttgtactgttagtgcctatacattctcattaaggtataaaaaatcagggccgcaacaccaatactctggttctcaaataccacacttccatctataacccccagacagattttcttgcccgaactagtatgattctgatcatgatgagaagaactactgattagaatgagcagaaagtacaagtcaagtaaaggtaaacgtcaaaccactcgcctagtctaaaagtctcttttgtgagatactctaaaaaatgcaaaaaactattagttttttagaggaggcttaacttatggatcgtatcactcacgatatccgccgttccaactggctggagatcttaaaccggagccagcaaagacctgtgcataccacaataaagcaatggtgcctggataacggtatctcagaaaaatcttattactattggcagcggaagttccgtcaggaagcagccggacaggtttctgttccatctgctacagattctgtgcctgttacatttgcagagattccgttcgcatacagggataaaccttctggatctgctccaacagatactgtagcagcagtccagccaactgcggtttttaagtataaggatcttaccgttgccgttaccaacgagatctccgataccctgctttcgaggatcatccgggaggtgacccatgcttgaagatgctgccgctatccggaaagttgtgatcgcgtgcggatatgtagatctgcgcaaaggtattgacggactgtctatgatcatcggtgacaggtacagacagaatccgtttgaaaaaggcaccctgtttttattctgtggcaggcggtcggaccggatcaaggggcttctctggatggggaatgggttcctgcttctctataagcgtctggaatccggttccttatcctggccccgtacatcggaagaagcggcagagctgacagaggagcagttccagtatctgatgctgggattgaatccactaaatccgaagatcaaagatgtcactccccaaaagcccggctgatctttgtgcaaaaggctgaaatttcccggtctgttttctggcttttccgctcggaccggaaagccctcaatcctttgaagaaaaggttgtgacaacccctatgctccggcatatccgctttttccgtttttttgtgcatgaccgttgcctcacttctgcacggtcacaggcataggcagaatgacggatagcggatattttgccgttcgcttttttcccagtcatccggtataatgggtacagagagttaaaggagtacgggaaatggcaaaacatacactgaatgagctgggaaatatgagccgcgaagaactgatcacaattatcctgtccatgcagggacagctcgacgcactgaatgaaaacatcgaaaagctgatcgaacaggtccgtctcgcgaacagctaccggtttggacgacatacggaaaccctgaaatccatcgatgggcagctatcttttttcgacgaggcagagaccctgtttgatgcctctgcacaggaaccatctgttgaagaagcggtcgttgtgacacgcaagaaaaaatccaaaggccagcgggaactcaacctgaaggcatttccggaagaagctgtaccggtccattccgtgtccgtggagcagctggatgccttctatgggaaaggctgctggcgcaggatgccggatgaagtctataaaagactgcggcacgagccggaatcctggacagtggaagtccataccgttgaggtgtatgtcgggacagatggcgaccatcaggatgaatttgtgagagggaaccgcccgaaggacctgctgcgcaacagcattgtgaccccgtccctgcttgcttccattttgaatgtgaagtatgtgaattcttctgcactccaccgtgtagagcaggaattcgagcggaatggcgtaaacatttccagacagaccatgtcgaactggatcatcaagtgtgctgaccgctatttcgcaccgtttgtagagcggatgaaacaggaactcctgagtcttcccgtcacccaggcagatgaaacaccgacccaggtgatccgtgacagtgaccacccaaacagcaagtgctatatgtgggtgcaccgttccggtgagtttcataaagagcgtccgatcgtggtatatgaataccagaaaggccgtgaccaccagaaaccgctggacttctaccgggattacaaagggatcctggtaacggacggtctacagcagtaccatctggtggcgaaaaaactgccggatgtaacaaacgcaaactgctgggcccatgccagacgtgattttgcggatgcggtaaaggcaatggataaaaaagctccatcggtggtccgggagtccattgcctatcaggcattgcagaagatcgcggaattctataacgcagacacagagctcaaagggctcccgtgtgaagaacgtcttcaaaaacggcaggagaagatccggccgctggttgaggaattctttgcgtgggtaaaagaacaggctgcccgctgtgtcgtcccgcccaagtcaaagaccggacagggactgcagtatctgatccatcaggagccgtatttaaaagtcttcctgacggatggggatgtcccgatcgataactctgcctccgagcgtgcgatccgtacgttctgtatcggaaagaagaactggatgttccataacacagccaatggagcctgggcaagcgccctgatctacagcatatcagaaacagtgaagctgaacgggctgcgcccgtattactatttcaggtatatccttacggaactgccaaagctttgtgatgaacaggggaatctggaccctgcggatctggaacatctgatgccatggtcgccagaacttccagaagagtgtagaaaaccacgccgctgatgaagcggcgttcgtttattcacaggcgtatggtttgacgtttacaaaacgcagatagtaaatctacccaagatttaagcgcttacgatataccagcttatttttgctattaaataaatatggcttaacagcagaaaactgccgtcaagccacatcaattatcatagaagatctgaatttacagaaaaaatttcacagcgtccatttggtgcatgattacattctaaggatatagaataaaagtttccaccaccggaatggtggtttcctcaaaaacggatttacggtttcctgagtccggacagcagggacacggagcccggattattcaattgtttctacgtaataccctcttgcccaaaatgctttatcccatttactttgcaattctggatgtctatcataaagcattaatgtacttttcccttttaagtatcccataaaatttgcaatactaattttaggtggaatagctacacttaaatgtatatgatccacgcaaactgctcctactatattatccacatctttgtatttacataacgtgcttattatttctctcacatcatttctcactcttccatacaaaattttctttctgtatttcggaataaatacaatgtgatattggcatttccattttgtgtgtgataaacttttattgtccatatggaccacctcctgtgattaagtttggcttacgacaccattcttaatatatcacaggaggttttttattgatatcctcaccgctttcagctattccattctccccagcatagctgggggattagacttttcatttacatcccttttcccaatactaagtttacatagaatacttatttggatttaataaccttattttctgaatcacaaaatcaatcatctcttctttaatgtcatacattaatttgactccattcccctcaaattcctggttattagtccgcttttctatactttgatacatggtacgaaaatactctgtcgcaatattaaatttgctcattcctaaatttacagcttctttcatctgttcttctggaatatcagaacatccatgtagtaccaaaggaatatttaccttttttcgtatagcataaattctttctaaatctaaattcggtgttttcacatacggaccatgagcatttccaacagcaatagcaagtgaatcacaacccgtctgttccacaaatcttactgcatcttctactttagtataatagttcgtattatcaattgcgtcaatgctatctccatttccaacatgccctagctctgcttcaacgtcaactccaaacaccttagccacacgcaccacatttttagttagttctacattttcttggaaagatttcgttgaaccatctatcataactgaaggaaatccatcccgaatccctcctactgcaatttcatatgttacagaatgatccagatgtactccaacaggaatagatgctttttctgccatatcgcaggctgcaaaagccaaatgctttaaatctgtgtagtctgaaaatccgggataaaactgaacaattatgggaactctttctctttctgctgcttctataacatatttaacagtttcaatatttaaagtattaattgcagcaacaccaaacttattttctgttgcatatgttaaaatatcttttacttttgctttaggcatattcttccctcctacaatgcacactcttcaattttactatctaaaattttcatttcctcttctgttaatttccagtcgaatgtcttacagttttcatcagcatgctcaatacttctaacgcctactaaagctgtacctacatattctttctgggtactccaatttaatgcaacctgtcccactggtacattatgaccatctgcaatactatccattacttttagcaattccataatttttgaaaatttgggttctttataaacatcataaaagtttaaacgcaaatcatttttttcaaaagaaggcacacttcttatttttccagaaagaatgcctgctcccatagaaccatatgtcatagaatcaattcctctatcatatccccaagacatcaaatcttcaaaccctctatcgaccatagaatataatggctgctgtacatcaatctgaatatattgttctgcttcttttatctgttctgccgtaaaattagatacaccaacataacgtatatagcctttacgcttcatttcctccaacgcagccatagtttcatctataggcgtatttacatctggccaatgaacaaaataaaaatctatatagtctgtttccaaattcatcaaagaactttgaatttctctcatagcatttttataactcgtatcttttttatatccatgtgtatagatatccggaatcaagccaaactttgtggaaattaacacctgttcccttggaatttctttcaaaacttctcctacaattttttctgaagttccatttccgtagcagggagctgtatcaataagatttactccattttctatcattcttcgaattgcacaaatagcttcgtttttatccacttttccatagttttgacctccgattgcccaagtccctaccgctagctgtgatacttcgatctctgcatttttaaattttttatatctcattttttatacccccttgtaatccttatctgctctcctgtttccaaccttctactcaacatatcattcttaaaagttcttccaggtagcatacaaacaatatgaacatcttctttatctactggatactgtgttccatgaacaatcagcgggttcaattttacgaatgttccctttggaacataaaaagcttctatactttcggttctaaaatcactatccataattcctacaaaaataatcacatctccatctagtggaagaagtccttcacatgcatattgatgtgcttcgagaaaagaaatgatattctcgctttgttttttaacatggcacacagaaattgtaggttgattaccctggttaaattctaacgctaccacatctgcaaaaaaaccctcctgaaaaatagacttctttttcagttcactctcatctagtaaatctaaaaattccccatattttccaaaattatcttttgttaatttttgtacctgaatctctctcataatacctactcctataaactataaattccttgctcatgagcattatcaaaatgaattcccaaatatctagatacctctctcaaaacaggtaagtagtgaccataaacacagcctaaatgatgtatgtatggaccaaacattaacttttcttcccaacgtttccagttatcagtttccatccatacataagtaccattcgtctccggtcctgttgtagttttggcttcccccgcaaataaataatattctccatctacatcatcgaacctacaaactgttaaatcaccttgttttaattcaaagcgttcttgtccatctactaattttgcctctaccccatcttttttcaaagaataaggaaatggaccgcaatgccataaaagttctgcattatcattttgaggatgacgaatagtcaaatctgctaaaaattctgattcttcaaataaattacaagctcttaagattgccagagtaatggctccatttatatctgtttcacaggaaagaggcattccattatctgccatttctcccaaaacaacgcaagggcacaaccccattaaagttggaaaagcagaccagcactcaaatgctgccacagaacaattgttttcttccattaattcctgaactgctaattttgtcgcacatatttgttggtaattttctccatcagggaattttctcacaaattcctcctcatactttatatattcttttcctttctcctctagaattttcctagctctgttacaaatttctactggtgaaatagggacagttgtaatgccgaacctcttaatcaaatttgcttcgttagtcataacactcataaaaggcactggacgttctcctattttagcaattcgcaaagtacgaagagattttaaaactgctgctgttctaataaatgtttcatacccttttaaaaattcttcacttttcgtagtacaattataaatgtaactgtatttcaaaccatagcgctgtaaaacctttgtagctgcaaacataccgcactgtgtatctcttcccctagcctcatcagtattcggcctttcatctcttggtccccagatcaaaataggtactgtaaatttagaagcaatcgctgccactacttgttcttctccaaaatcacagaaaggaaaaaataatgcatcaatttttctatttttcattttatccacaattgcgtttactttgtccatttcgcaaacaattccattctcgcatatatcatctatatccacgatttctactatagaagctttaatcttccgaatttcttccataaaacaatccttctgacgttttgcttccaccatactcaaaaagcttcttttatttggtactacacccaaagttaaagtttctctatacatactctatccccctaccatacttttttactctttcatcaatttctctgtaatcaatctcgcctgtttctaaaaagttatctgttacttcccaattaggaattcctgctctccctccaattctggtacatttgatggcagctactccacttgcgaatcttgcagcatctttaggagacaggcctttaactattgcagctaagaaagcaccatgaaaaacatcccctgctcccaccgtatcctttacatctacatcaaaagcaggaatttcaaaaaatccttctttgctgatccccgcacagcccttttctccgaatgtaaaaatcacaatttctggtcccttattatataaatattcgcaattttcttttacactttttccagcttctaacatcttttcgtaaacaaattctgagccaataaatatatctatccaagaaatagcatccaacaattcatctgtataagagtcagcatccataaaaattttgcttcctttttgttttgccatttgagctgcttttttcgtcaccgaatccaagttggccatataaaaataactagaatttgaaatatattctatattcaattcttcctctgtcatacattctgcatttcctggataaaaaacaaaacttcgtcccatagaaccttcgtcactaattacaatatcaaaattagttgttctattttttctcacacacatttgttctgtatcaattccatggtcttgaaaatctctaagacaaaaagttccatatttatcatctccaacatttcccattattccacagcaaagccccaatcttgccgctgctaccataccggaagctacttttcctcctccttgccaactcaaattctgtatcctctctgctccattaggttttggaaagcacctaacatttactgcgagatctacgcaagggctatccaatccgatcacatcaaatttcacacacatcccctccatttctttgctctcgatttttccagaaatatacaatcaaagcacatatcgtcattaaagtagtaattcctgccataagtaaataccctttttcatatcctagtaggcgaattaactttcctcctactaaatttccaacaatggctcctaatccaagctgtacaacatttagtatactttgtccttttgtttgatatttttcatacacacaagtactaatatataccgcacaactataatacatagtcatatatgtaactccttgtaacagttgagccaaaactattccaataattccacttcttattggaagaagaattctaattcccataagaaaacaagataaaaataaaatctttattgttccatgctttctaagcattctgtttatataaaataacactggcacttc

SEQ ID NO: 2547 - DNA, 6832 bp, Unknown
  gut microbiota DNA sequence
accgccgccagccatgagctgtttcatacccaaataggtgtaggaaactggctcgatggcgggcggcggcgtgtcaagaaatatctatggagtttttaagaaccgccccggcggggcaggtcaggctgtgacctgctccacttccgggatgggtttgagattgaaatgaatttcgatagaaatgtgtcttgttttatcgctgtctatgctctcatggacaacgatttccttaatcaggcggtttagggtggcagcgtccagttccgtgatgtcggcgtattcctgaatggcttctacccactggcgggcgtcatacgcaagccggatttcatcggccagcttcttccggccttccgtggcccttgccttcaactcggcctgttccttctgcgtcttttccatcagcagattgaagttcgcttcgctgatacgtccggcaaccatgtcctcatacagccgcagaaccatcttttccagaacgtcaatccgttcctcgtctttggcaagggagcgttccaacgcttcccgctggcctttctgctcagcttcgcaggtgtcggacagcttcccggcaacggcttccccgtccatcagggcggctctggcacactcccggattttgttcaggacaagccggtacagggtgtcgtactcaacccggtgctgggaacagtgctgctttccgtaggcgttgtaggtcttacaggaataaatctgcttcgggtgcttctcgttggtgtagcggatagtcagcgacttcccgcactcgccgcatttgataagccccgcaaacaggctgatttccccggtctggcgggggcgctgccgggatttcagcttgcgctgcacgatgtcaaaggtcttgcggtcaacaagcggctcatgctggttctccacgacaatccattcctccggctttttctccccgatggtgccgattttgaagcggtattccttcttctgggaagcgatagcgccggtgtagacggggttcatcaggatgtccttaatcacggtaaagtcccagatataccgcccgtttaccgggtctttcttttcccacttggttgacacgttccgcagcccccgtacccggttccagtaggtcgggcaggggattttttcttcttccagcctgcgccggatgtagttggggccgtgtccttccagcgcccatgcaaacagacgccggacaatgggagctgtttcctcgtcaatcagcaggtggtttttgtcctccgggtctttctggtagccgaagggggcaaggcagccggtaaactggcctttctgggctttcagcagataagaggaatgaaccttcttggaaatgtccttgctgtacatctcgttgaggatattcttgaacggtgcaatgtcgttgttgtcccgcatggtgtcgataccgtcattcatggcgatataccggacgccgtggcggggaaagaaatcttcaatcaggaagccggtctgcaagtaattcctacccagtctggataggtctttcgttatcacaaggttggcctgcctgcgctcgatggctttcaacatccgtttcaggtcggggcgctccatgttcagccccgtgtagccatcgtcctgatagactgcaacaacctcccatccctgcttctcgcagtagttttccagcatatcccgctggtttgcaatgctggcgctctccccgtcaaggtcatcgtccttggaaagcctgcaatagatagccgcccggaagctgcccgccagtattgcgtccatgcctgtatattccattccgttcatcataaccattacccgcacaatccagacggaacacggtcatgctgaaccttgtctttattatactctaaatcttgctttttcacaagatattctttatcatttctctggctgtatttctgtgcaatcaggctcacgaaaacgtccgtagcgtccagttcgccgtcaaataccgttgtgacatggatttcagttttgctttttgccataggcagttacctccataaatgaaataagccagacaggagagggtcggcaacgaagtccggcaacgggcttcaaaaaacctcgaaaacaatctctgtctggcgggttactgtttatttactttttcttttatttttctgttgctttggttgtcagaggggagaaaagcccgcagttacgggctttttcccggcaaccggctcggcaacgggatagcaacggggtcggcaaccggctgtggtttccccggatttttcagaagggaagttccatctgctcggtcacttccacaaatccgtccggcgttttttcacgcccgttgtcagcgcccgttgccggggcttcccgttcccagcccttttgcctgccgtatccttcaaatatccggggattggagaaatacttccatcccgtgatacagtggttcatgatgtcgttgacttcccggatttcccattgcttcggctcgtcaaaggggtggttcatggcttccttaaaaagctgcttggagcatacggcgctgccggtgtagcggtcaaggtatgcctgtatcatcccggccttggtgtcctccggcatgaaatcccgctggtgttctttgaggtactgtatcatttcgggtgtaaaagacagcttaaaatcgccgcttttgtaggtcgtcatggcttccgcccatacctgttcgatataggctctggaagcggcttcatcgtccaaaatgtgtacctcggcctgttcagggtagaccatgaccggcaggaagcgccggttcccggaacggtcaaggggcaggaagtccagcgcattggaagtcccgccaaacacgcattgccgcagcctgtcctccgggtgggtttcgtaggggattttatagacctccttctggcggcttaaaaatgacttgatttcctctatgctcttggcgttggcagtggcaatcatctccgacatttcaattatccagtggccttgtaacttccggtacacgttatcatcgtccagcttccgcaaatcatcggaaaaccactcgtcctttacggccagcagccggaagaaggtggatttcccggctccctgaccgcctaccagacagagcatgacctcaaacttacagccggggctgaaagcccggtggatggctcccagcaggaacagccgcagtgaatggtaagtgaagttgtccgtgtcggctcccagaaagtgccgcaggcagtagcggatacgctctttcccgtcccagacaaggccgctcagatagtcccggatgggatggtagctgttggcgtctgcggccagatcggcggcgtctgctatctttttctcgctggtcaggccgtaggtatcttccagatacagccggatatatttcatatccgtgtcggtcatggccttgctgccggttctgcgtttcctgccgatgggctttagaaggtcaatgcgctcggtcaggagatttttcgcaaccgccccggaaaggatggggtcatactggaacacggtaaggcagttgtggatactgttccgcacgccgcctttctcggtgctttccagcatggccttgacttcctcaacgctccggggcgggggtgcggcttcgatggtgtctgtcacggcctgccgcagttcgggcggcaaggtctgccattctccgctcaaggttcctcacttcctttccgtagctggcaatcagggcagcccgttcctctatgtcggagaacagcagcacatccagcagatattccacatgggcttgtttctgcaaggcttccacgaaaagcgggtgccattcctcgtccggtgtcttgggggcatagtcccgcttccagcggcgcagcagattgtgatagtcggacagtacccggaaacagtggcgttccatgcgcttaaattgttgctccgggctttcctgccggggctgggggcggcggctcctgcttggcggctccttatcctcataggggatggagaagtcctgcgccagcatgagggcggcttccttggggctgacgttttccagacgggaaacaaagtcaatcacatccccgtctgcctgacagccgaagcaatggaagcgccggtcaaccttcatgctgggatttttatcgtcatggaaggggcagacgcacatcccgtttcttcctacccggataccgtaatgctcagcagcctgccgggtggtaacagactgcttcacggcttcaaatacgttcaataggcaaatcctcctgaaaataagaaaagcgcctgccattctcacggggaaaatagcaagcgcctgattggttaaagttccatatcctgtttttgctggcggcggggcgtctggcgtttctctgcctgttcctcccggatacgctgctcccggcctttgactgcctgctggatggatggtttctttcccggctctgcggtctggcggtactgctcggatggcaaaacctgattgagccagtggcgcacatcccgcaaaatcttcacatcctcctgtacggcagtcagtgcttccgtcttggaagcgatattctctgaaagctgtgcctgttccccggccagcttcttcgtgctgtacttcgccccatcaaggtgaaccttgaaataccgcagggcagcgttgtaggcgtccagttcctccttatggtcggcggcaaatttctccttgggtttcttccagcggatagcagcatattttgtataaaccggcttgtttgcttcaaaattcccgatatggaaaagcagccggttaatctcttttacacgtttctccatcggcctgatttcctcacggatggaaacggcctgtgcgctggcttcatccagataggcgtcaaggctctccacggtggaaatctctttctgccgcaggaaatcaagggcttccatgaccttgttgaaatcgccaacggttccctttagcttccccttggtagtccagccggtacgttcctcgctccgtttatccagataccgggaaagcagttcggggatggtcggctcctttgcctgctccagcgcttccagcagcgccgcctttttctctttcaggccggacagccagccctttaagctgcgtaccatctgccggatagactgcatgagggaattggcagctttgatgtcccggttcaggttgccgatgttggtctgtatgcctttcttctccaactggctgaccgctggccccatgtggacggtggggattttatcaatcccctgtcgggcataggagcgaaggtcaaggcgctccgggctgtcgatggcttccagatagcggttcgccgtgtcagtccagccctgccgccatatctcggcgtacttctggtcgttccagtccacggtgtcctccttgtggcttttccatctgccagacgcaagccggatacgctcgccgttctcgtcaaggtcgtagaccttccggctcttgggaagccatttcccggtttcgtccatcgcccgcatggtaagaaggatgtgggcgtggggatttccgtcccccttgtcatggatggcgaagtcggcaatcatgcccttggatacgaaaaactcccggcagtagtcccggataaggtcagtgtactgttccggggggagttcccttggtatggcaagcacgaacctccgggcaagctgggagttccattgtttttcaatcgcttcgacggcgttccacaaagtattccggtctgcgtacaccggcggggcatggggcggcagcatgatttcggtgtggacgatttcgcttttatgggaatagtatttctgcttctggtcgtattcagaaaacagccgttccccgctctgataggcggcagacgcaacggctgactggcgcttgctgcgctggatgattttcacatcaaagtgcgggcatggtggcatgacggattgtgacctcctttctcccggcgtccgggcaaagaaaaagcaggaaaccgttccatgatttcctgctcggtggtgccgccggtgggcggctggtatttagttttgaaagttcgagtcaggttgacccgatgatggatagcacgataaatgggaagttatctcttacttagaaaatagtatgaaaaaccataggaacaatgagaattaaaattgcacctactacacatacagcaattactttttgaaaacttcgtttttcttgttcagacatatcattataccatttcataggcaagcacctcctcaacttccaatttttcgctgactctatttttgctacttgctacggaacttcattcttctctattttgattagggcgtttcttattacaaagcgaacctaccaacataccgattgcagagattatcgctcctgctacaatcattccaaagtctggggcgttcagtttgttaaaagcaatgttgtttgccattttgaatgtaccatattcagcaagcatatacattgcgccaaagaaaattgtaaatgcccattttccttttccccagaaattgtttttaccaataacaacggacacaataaatgttgttacaggaagaataatccaaagaaacatcaaactgtaacccatagcgtcgcttccgcttgtaaagaaccagaacacaatcattgcaaatgcccaaatcaacagataagcgagaattgtaataattctgtttctgttggcgttgcttttcacaacatttgtactttcttcgagataatcataataggttttcattttctgttctcccttcaataaatagtcaagagagacatcgtagcattcgctcatttttatgacactaatgatatccgggtaggatttttcattttcccaatttgaaatggtctggcgactcactcctaataattcagcaacttgttcttgtgttagttttt

SEQ ID NO: 2548 - DNA, 700 bp, Unknown
  gut microbiota DNA sequence
agaagatgagggagttttacgatatatgaaagcgattttgcagggattttatcagaaagaacatttctggctgagacttggcgtagtgctgctggcggtattcggaatgggatttgcgttgtcgctgttactgctggtggatatgggaacagatccctgcagtatgatgagcaaggcgatttccacacagatcggtatgagtttcggaaactggcaggcaatgatgaatacggtacttcttgtactggtagtgatcttcggaggaagaaatcttggatttggaacactggcgaatatgtttctcgtcggatactttgtggattttttcacctggatctggaatcgggtgctgccggcagacttttttacgactctgccggttcggatcgcggtactgattccatcggtggcactgtttattctgacagcagctttatatatggatgtggatatgggcacggcaccgtacgatgcgattccgatcattatctccgggcatttgccgaaagtaccgttcaaagcggtgcgaatcacgtttgattttgtggcgactgtgatcggattttctttcggcggaaagatcggagcgatgactgtcattatgatcgtagcgctcggaccggtgatccagtggcttggagagatcatgaaagaacattttcctgcgttgacaggagaagcctgagaacagaaaatacaa

SEQ ID NO: 2549 - DNA, 834 bp, Unknown
  gut microbiota DNA sequence
ttccatattttcctgctgttttaacagatacagctttgctttcaacatctgcatcgccttgtctttgttctggaactgagaacgttcattctggcactgtaccacgattccggtcggaatatgtgtgatacggatggcagaagaagtcttgttgatgtgctgaccaccggcaccactggatcgataggtatcgatacgcagatcgtcctctttgatctccacatccagatcttcatcaatatccggcataacatcgcaggatacgaaagaagtctgtctctttcctgccgcattgaacggtgaaatacgcaccagacggtgtacccctttttctgatttcaggtagccgtaggcattttccccgtgtacctcaaaggttactgatttgataccagcttcatcgccatccagataatccagaacttccagggcaaatcctttcttttctgcccatctggtgtacatccggtagagcatacccgcccagtcgcaggactcggttccgccggctccggcatttaacttgatgatggcatccttgctgtcgtattccccggataacagggttttcatacgaatcgtctcgaaatcagcctcgaactgatccatgatctcttgaatctcagagatgaccgaagcatcattttcttcgtatcccatctcgatcagagtttccatatcgtctctctggctctccagattttcatagatctctttatcgtccttgagacttttgagttctttcatcatctcctgggagcgctccggattgtcccagaaatccggttcttccatctttctttccaattcttcgattcgcttttccttgttctc

SEQ ID NO: 2550 - DNA, 72071 bp, Unknown
  gut microbiota DNA sequence
cgatctgttgtataatctacaattgcatccagtaatggggtttttctttgctccatacgattcctcctatccgcgtaaaaaagaaagagccaccgcatcgttatcttctgcgacagccctttcttatatcaatcatgcatatcagcacaattattctttattattttaccagtcttgtccagccatatttgtcttctactttaccccactggatacctgtcagataatcatacagtttctgagtcagttcaccgatctggaagttattgatggtgatttcttctcctttgtaaaccagtgcgcctaccggagagataactgctgctgtaccggttccgtatacttcttccagtcttccgtctcttccggcctgcatcagatcatctacagacagatgagtttcatttactttgtatccccagtctttcaagatgtggatgatggaatctctggttacgcctggaagtacagttccttcgattggagctgtgtagatttcgccgtcgatcttgaacatgatgttcatagcgccaacttcttctacatattttctttcacgaccatccagccacagtacctgagagcagccatatttttcagcttttacctgaccgatgatagatcctgcatagttaccaccgcattttgtaaatccggtaccaccctgtacggcacgaacatattcgtcttcaaccatgatcttaaccggagccagaccttctgcatagtaagcacctacaggagaaaggataattacgaacttgtatgctttggatttgtgtacgcccagagaagactcacatgcaaatgcgaacggacggatgtacagagaagtttccggttcagacggaacccagtcttcttctgcttttaccagtgcgtttactgcttcaataaacatatcttccggaatcgttgccatacacagacgttcattggaattgatcatacgacgtgcgttcatctccggacggaataactggatctggccatctgctcttctgtatgctttcagtccctcaaatgtttcctgtgcataatgtaaaactacagtagccggattcatctcaatcggtccgtacggacgaatggttgcgtcatgccagccaattccttcatcgtaatccataacgaacatataatcagcaaaatatttaccgaaaccaagttttttctcgtccggtttttcctgcagttcttctcttttaataaatttgatatccataatatctctcctcctgctttccaataactctgtcaaagccctctgcttcgacaacatacgttaagtataaaactacatttttctcccgtcaatagaaaatccgttgctttttgcgttttcttctgttaaagtatacatagaaatagctgttctataaatactatttatcagatgatagaacagattcgattttatgaaagaatgaggtttttactatgagtgatctggaaaacagcgcatgcaccggttcctgcgattcctgcggatctgactgcaaccttgatttatccaacccgaacgcaaccgtaaccctgactctggacgatgacagcgaactggtctgtgccgtactgaccatcttccctgccggcgagcacaaatatatcgctctgctgccgttagatgaaaacggagaaaaccaggacggtgaagtattcttataccgtttcttccaggaagaaggacagcagccgactctggaaaacatcgaagacgatgacgaatacgagatcgctgctgatgctttcgatgaactgttagacagcgccgaatacgacgaagtggtagacggaaaagaactgtaaaagtatctgaatcaaactttaaaaacacaaaatcccgtacagcaaccgaaaactgttgttcagtttccaacccctgtacgagatttttatatatagtagaaaaagaatcctgttttttcttcaaacgaaactctctttcaaataatcaatcgtcattatcttcgtaactgttcagtttcttcacagttacgagacaaaatgcatttaaaatcaccttcggtgatggcattttgtcttgtatgtctcgggattttggcatattcatgccaaaacacctcgcgggatattgtctaattaatagttatttatcctctacttttttctcaccataaatataataatgcacccactcgccaagatttaccgcatggtccccgatccgctccatgtattttgcgatcatcaaaatatccagttcgctgcctgtgtggttggcattttttatgatttcttccatcaattccgccttcacttcttcaaacaggcgatctacctgatcgtccgtggcgatgacttcggatgccagtttatcgtcttttcgaacgaacgcattgacactgtcattgaccatctttgaagcgatcttgcccatatcaaaaatcttcgggtgtacttccagctggaaaccggtcagatgtttggatacatctgcgatatctgcggtctgatccccgatccgctccatatccgcgatcatacgaagtgcagaagagatacttctcagatccccggataccggctgctggcgcagcagcagattcatacacattgcctcgatatcccgctctttctgatcgatcttccgttcaatcttatgtacgctgtccgcgatctgctcatccttttcccggagtgctttcatcaccagcgacatcgcctcctcgcagaggtcacccatctcaatcaattctccattcagcttaagcagctgctcctgatatgcctgtcttgccatcagccaaacctccctgtgatataatcgtctgtccgtttatccttcggtttcgaaaatatagtttccgtatcattcatctccaccatctctcccagaagaaaaaatgctgtcttgtctgagattctggctgcctgctgcatattgtgcgtaaccataacgatcgtatactgttttttcagttccagtgccaggtcttcgatctttgtcgtggagatcggatccagcgcactcgtcggctcatccatcagaagaacttccggctgtactgccagtgctctcgcgatacagagtctctgctgctgtccgcctgacataccgagcgcgctctttttcaggcggtcttttgtctcgtcccagatcgctgcttttttcagagaatcttccacgattgcatccagttcactctttttgcggattccgtgggttctcggtccgtaggcaacattgtcatagatgctcatcggaaacggatttggcttctgaaataccatacctacccgctttctgagcagattgacatttttcatctgattgatcggttccccgtccagcagcagtgttcctgtgatcttgcagccctccaccagatcattcatccggtttaaggattttaacagcgtcgattttccacaaccagaaggtccgataaaggcagtaatctctttttccgggatatgcatgaaaatttttttcaatgcctgaaaatccccgtagaacaaatccagatcttttatcgtaaatttatctttctccattttcttacctctttgtcagtttttttgcgatccagccggatccagcgttaataagaagtaccacgatcagaagtaccactgcggttgcatacgcctgtttcatgtacagtccctcggacaacagtgcgtacatatgaactgccagtgttcttcccgaactcatcagtcccggtacttttgcgatggttcccgcggtgtacatcagtgccgccgtctctcctacgacacgaccgataccaaggatgacacccgatacgataccaggaaccgcagacggaagaatgatacggaaaatggtccgcagtcttccggctcccagtccaaaacttccctcacggaacgaatccggaactgccttcagcgcttcttctgtcgttcgaaggatcagaggcaggatcataattgcaagggtaagtgcacctcccaggaaggtatacccccatttgaatgtggttgcaaataacagataaccgaacagaccatacacgatcgacggaataccggaaagtgtttccgcggtgatccgtaccagttttaccagtttgcttcctcgttttgcatattccaccagatagatggctgcaccgatacctaccggaacggcaaataacagaaccagaagtaccatcagaaccgtgttgatgatcgccggcatcatggatacattttctgtgttatattcccaggcaaacatctccggagagagattcgggattccgcggatcagaatataccctacgatacagaccgtgattcccacggtaagaaatgtggcgatccacatcagaagccgcagcaccagagaaaatggctgtgatttatagctttccagctgtccttttaatttttccatcactgtctgttccccctttgcagtgcgctgcagcacagattaatgatcaggatcaggacaaataacacgaccgccgttgcaatcagtgcttctctgtgaagatccgttgcatatcccatctccataacgatgttggaagtaagggttcgaacgcccatacccaggcttttcggtatgatcggctgattaccggcaaccatgatcaccgccatcgtctcaccgatcgcacggccgatgccgagaaccataccggcaagaataccggattttgctcccggaagtaccgcaaaaaatacgcttcgctcccgtgtggcaccaagtgccagagcaccttcataataagaatccggaacggcacggatactactttccgccacaccgatcaccgtcggcaggatcatgattcccagcaataccgatgcggtcaggacactttttccgcttcctcccataaccttctgcatgatcggaacgatcactaccagtccgaagaaaccgtatacgatggacgggattcctgccatcagctccactgccggcttcagaatcttatataacctctcgttacagaattttgccaggtataccgatgtaaaaaatgcgatcggcacaccgataataatagctccggcagttacatagatacttcctatgatcatcggcaggataccgaaaatgttgttcataggtttccatttttctcccagcagaaagttcagcggtccgatctttccaatcgccggaagtccgtttgcaaacataaagatgcagatcaggactaccgccgcgatcgatacacacgcggtcaggagaaaaacacatttcataatgaattctcttacttccttcatgttactccttcttgcagagaaaaactgttccgtctttcttttttcatgaaatacggaacagtcttttctggttttcatcattatttactgtacgtcagaccagtcctgcgtttctcctgtgaagatggacattacctgatcgctggtcagttcgtctaccgggttctgtttgtttacgatgactgcgattccgtccagtgcgatagaagttccggttacaccctgagaagtttccgtatctttcagttctctggatgccattccgatatcacagattccgtcgatggcagaggtaacacctgtggtggaatcgttctgctgcacttcgatctctacatccggattcagttctttgtaggcttctgccagtttttccataaccggtgttacggaagaggaacctgcaacggttactttaccggaaagacctgctgcctcgtaggcaccttcgttgccctggctgatatagccgttatcttctaccactttctgcccgtcttcgctcatgatatattttacaaagtcagctgctacttcgctcaatccgtcttttgttacgatgttaaatggacgggagattttgtaagagccatcttttacggtatctactgaaggttctgcgccgtcgatctttaatgcttttacagtgtcatccagagatcccagagatacataaccaatagcgtattcatttcctgctacggttgtcatcataacagaagtgctgtttgtgatctctgcggtatctgttgtgttatcaattttatttccatccgcatcttcggtttcgataccgaacagctcgatgaatgctcctcttgtaccggatccctcttctctggagatcgggctgatcagtccggagaaatctccgcttttggtttcttctgcagaggtatcggttgctgctgtgtcagtgcttccggattcctgtgttgtatctgtactggttgctgtatcgctgcttccgcatccggtaaagatcattgcggaaattgcaactgctgttcccattactgcccatgtttttttcataataaatgtcctccttgtcaacccctttgggttcgtctttttctttatttatctgacaagcagagtataaaaaatccatgttaaaaccaaaagtatgctttcgtaaaataagcgttaaataaaatcgctctttgtaaaataattttacattaccaattattgatatgcaatgcaacgcaaacgagataaaatacgcttcgcgaattttactcgttatcgcggcagtcgtcaaggtctcgtgcaagcacggactttgactcgttgctcgcgtaaaaaaggatgtgcagttttccctacacatccttgtctttatcgtcaccgatatcttcatatttcagttcctctgcatattccagccgacccagatatgccgtgtggataaaaaatccgggtaacagcagactggtaatcacactcattaccgcgtccctgatcgggcggccatcccacagcagtaccagataattcaccatgccggacagaaatcccataccgaacagtaacagtcccatattcatcaggaaacggagccgccttgggttctcccggaagataattcccaaaaatcccacaataaacaggcagattccgtaaccaccgtaaacgatgcacaggacatttgcccgatgtatctgtgccggtacatttggcacatatctcagtcccagccacatatattgtataaaatatatgcttatatccattgcgccttccatcatgatcaggaacgacgccagaaaaagccagtttctcgctttcattttttcaatcctttattttccggtggtacttccgaatccaccatttctcactccatccgcgtcatcatcctctgtgattccatactgcatgaagattccctgtaccatgccttccccctgaccgagttccagcgtttttccctctttgctgtcattggtcagtttcatgaacatatgtccttcattgtcagaatagaaataatcactgtcaatgattcccacggtattatttaactgcaggcggtatttgaatcccagaccgcttctcggatacaggcacagaacccagtcctctgccatctccacccggacaccggtaggaatctttaccgtctctcccggagccagtgtaaagctgaccggtgcaaagaaatcatatccggcacttcccgttgtagcacgcttcggcagtttgattccttcatagatttcacggatcttttcttccagctgttccccgaaggtatccacccagtctttttcgaactgttcccagcttactttatgaaattttgcgattcttttcatgttcttctccttatgcgtgtaatactacctgacctacttctctggacttcggcacatcgatcacccgctgattagggcttcctttccatggaagactcacatctttgcgttccagatcaaatttaccgtctaccactacatccagataagaaatgatcggcagatccagaatatcttcccacagatatccggtatacagccagatattctttttcggatatttctctttgatttctcttgcaaaggcagtgatctcatccacattgctctcataaagcggatctccgccgctgaaagtgattccctcgatatatgatttgtccagctgttcgaagatctcctgtttcgcagcttcgtcaaacagtacgccgccttccggatcccaggtgattggattctgacatcccttacagtgatggctgcatcccgcgacccacagaactacccgcagtccgtcaccgttcagcatatcgtcttttgttatattatgatatctcataaccccttgttttcctttctcattcttcttcaagcagatcgcggatcttggctctgaccacgtcaaaagccacatcgttcataccgctgtttactacaatatccgcgcggtttcgcatcggctccacatagagataatgcatcggttttaccgttgtcagatactgatccacaatattgtccagatctcttccgcgctctttcacatctctggtgatccggcgcaggatccgttcatcggcatccgcatccacatagatcttgatatccagcagctcccgcactctcggatcggtcagaagaagaatcccctctaccagaatgatccgtttcggttccacatggatcgtctcatgggagcggttgtgctggctgtaatcatacaccggacactcgatgctctctcccgctttcagttttttcagatgttctaccagaagatctgtctccagagaatccggatgatcgtaatttactttttttctctcttcgaaaggaatgtcatcctggcaccggtaataattatcatgataaataaccgtcacatcgtccggaaatgcttttttcagacgattggtaaatgttgattttcctgaaccggttcctccggttattcctatgatcgtacatttcatacgtattgttccacctttgtgtttatttctctgaacagtgtagcacaccatggctttccgtgcaaggaaaagagccgggaagtccgtgtcggtataccctcctctttaaatatgttttttcaggaattccagcacgatatgtaatacggtatcgttgttgaatccgaggaatccgtggtttgcatcgttaagtttatagaattccacttcttttcccagttctttcatatagttatataactggcagctctgactgaacggtaccagcatatctctgcctccgtggatgatcagtgtcgacggtgtcgctttgtcctctgacaggtaagataacgggctggcttccatcgcaagatctacatgctccagcacatttttataaccgatctcatagccttccgggctttccggatcgtaatggttctgagagctctcaaaataattcatcagtggaaatacggtcggtccgtagctgtccacgatacagtttacctttgcggaatattcgccgtacagatcggtatccggcgcatcatctccggtaaatccgaccatcagcgccgtatgggcaccggaagaatctcctgccactgccatatgttccggatcgatatggtattcctccgcatgttttttcaggaaacggatcgctgtcttggcatcctgcatctgtgccgggaacggtgcgatatcggacggacggtactggatcacagctaccacatagcctttctgtgccagacgcagatgtctcgggatattgttccacagccactgctcatgaaatgcagatccctgcacatatgccacacatggccattttgcagtgtctgcattgtctcttggcttcggttccaggatgatcagtttcagttctctctcctgatcctttgtctcttctttcgttccgtagcgttttgcatagacgatatccgtgtgaatatcgacatcatacccccagtcatctgccagattttccagtacatggcatccctccggcacttcttcatcccgcggaaactttgccggatccggggttggaagtggtgatagtaaagtcctctcctgcataatcttttttacatcgtacatcacatattctccttttttacgcaaatacaccgaaacctggaaatacgtttttgtctcctgattttcggtgtattttttgtctcatttttttatattataacagatttttctatgttcggcagtcttttttcccttattttttgtatttttccacttcttttcccgacatttatcgacatccgtcctcaatattccggataaatccaacatatgtcgccgcaaaatagacagcatagatgccgaaaaacagcagaaacgaaagtccgaaatactgaaacaccggcgtactcacacctgtataaaaattaaatgcgcttcccacatagcctgcaacgattccgctgaccgccgcggaaaacagtgccgggcacagataatagccaaacaactggtaaaatacggttttatggatcgcgcgtctgccaagtccgatcttcgcaagcacctgatagcggtaacggtattttgcggaatcactcagctgctgcacggaaagcaccgtcagggcgatacataagaataccagaccgatgtacatgcagggaaacgtgatacaggtcatcatatagcgaatctccgggatcgcgtagtcccgtaccagattgactgctgaataactgacgatcgtgtctgttccatagcagagcatcccgtcatccggcgatgcctcatcgtcatcgtcgtccccgtctatcagatcatccagtttgctctgcagatcggcaggtacttttccacggacagccaccgccagttcggaataatatgcattcatcccgttgattctctcatccggcaccaccagaatgtaatccccaccgttatgtccgtcctgagaaaatggctctgtgcgaacctccttacaggtcagcttttctccctgatcaaagacaccgatctcatcggtaaagtcgccggtttcgttatagatccgcgctttgatctgaagaatatattcgtcttctccaagcgtcacttttgaatacccaagcatcttccgcaggtaattatagtcgctgagcgccataaacgtatcatacggagcatattcttccccattctttccggcaattttcttttcatccggtgttccgtctgccttcttatatttatctccaaaataccgcagatgtgtgtacagccaggtattgaccgcatcggtgtgattctcccagatccggtaagtccgggaatccttgatcttcgtttcgttccggatcacctccaattccgatgaaaaatcatacgccggatcctgatgatatacctggatagcaaacggaaacttaatgccaagcacctgtttttgccagtcggtaaacatcagcgccaccgaacatcctaaaaaggcgaccgtaaaaagcaccgtcagcgtccccatcgtaaaacgcatcgtctttaacttcgatgcaaactgccgcatcagaaacagattctgtccacggtagatccggcggccttttttcttcacatagcagatgatccatgccgaaagtccactgtagaacagatacatcgacaggaaaagtccgatcagaaaaatataagcgcctcctaccgaccggatatgtccgctcaggatccagacaccaaacgcgaggatacagccgacagacagtgggaacagccattttctgagggcttcgtgtttctctttcatctcctcatttttctgatcatcgcgcatcagatcatgaatattcatcttgcggaaacgtctcttgcaccgcaacagtgccagcagataacagcccgcataacagctcaccgtcatgatcagacagtaacggttaaattccagatgtggtcttttttccagctgtaccacactgtacagcaccaccatcagtatctgctgcaacagcatcccaagtcccagtcccagcacaaatgctccggttccaagaagaacattttctctcatataaagtctggatacctgctttttcttcatcccgatcagcagataaatcccgaactcccggcttcgtttttccagcatgaagcgtaccatataattgatcagccacgccacgatcagcacgataaaaaaggtcgcgatcccgatcatcgcagccatcatcccggcaagttcatacattttctggatgtctctggaaaaaataatgctgttaaatgcaaacatcagcgccacgataaaggtcatcgtcagcacatagaccagataatctctggcggagcgtctgacatttcgaaaggcaagtttaccgaacatctttcagtccacctcccgtcagggcaagcacatccaaaatcttgttcagaaacgtccggcgatcttcgctgcctcttaccagttcatggaagatctttccgtctttcagaaacagaatccgtccgcaatagctcgcagaaaatgcatcgtgcgttaccatcaggatcgtagaacccagctcgttgttcattttctgaaaggtttccagcaatgtctgcgctgcccgggagtcgagtgcgccggtcggttcatccgcaaggatcagctgcgggtgatggatcagggctctggcacaggcgcaacgctgtttttgtcctccggatacctgatagggaaacttatcccggatctcatcgatctgtaacagtttcagaatctcatcgcattttttgcggatctctttcctgttctggctgtgcagagtcatcgccagcacgatattttcttcgatcgtaagcgtatccagaagattgtagtcctgaaagacaaaccccagattctcttttcgaaactccgccagagcgtcttcgttcagttccgtgatatccacatttccataataaatatgtcctgacgttacatgatcgatcgtggagatcatgttcaaaagcgtggtcttgccggatccggacgcgcccatgatgccggtaaattcgcccttttgcaccgtaaaactcacccggtctaccgcttttgtcacattgttatcggttccataatatttttccacatcacagacccggatcgttccgtttgaaagcagaacctgtggtgtccgtgtgatctctttttgctgttttcttctcattttgtcatcctcctgattgcccgccgacacattgccattttaaaattactctgcaatgtacctgctgttcccttgttcttcgtcttttactgtacacgtcacaaccagaaagtggtatcgttttccctttcgtcttccttacatttttgaaagataacggaatcgttactttaaaagatacgtgctgaccgggaaagtcagaatcatccgggttccctccccgcgttccgattctgcgcgtatctcgatccccagcttttcacacaggcggctgcacagatacagtcccattcccgtggatctgcctcccattcttccgttggttccggtaaatcctttttcaaaaatcctcggtatttcttcctgcgggattcccacaccggtatcttccacgaccagctgtacaccgtgatcgtatgttttcgtgtatatatggatctgcgtgccttcttttttgtattttacactgtttaataccagctgattcaggataaataagatccattttttatccgtatagaccggatccggacattccacccgggcactgataccgttaccgatcagatactgtttatttttcatcaggacttcggatgccgcgctttgcagatcggttttctcgatcatgtaatctttatagacattttccatccgggcataataaagtaccatgtctacatcattttcgatcttcttgttttccagcataatctgtctggtcaccggatctttgtgattttcacacatcagctggatcccggtgatcggcgctttgatctcatggacccaactttcgatatattcccggtattctttctgcgtatcctcgatctttcggatccgctcgatcaccgacttgttcgactttaagatcagctcccggtacagacagtcttccagacgcgaggacggcggaagcaattctcccaacagatagcgttgatccgcctgttcgagaatatgttccgcctccgtaaaatactgttttctcctgacataccccacacctgtccataagatcaggatcaggcaccagcaaaacaggatcagggaaacggcatttttattatatccggtgatgtaaaagaaaaatgtcagcaggatcatgcacagcaaatgtagcagataggtcataattttgtctttgatatagtccgaaagtctcatatccgataccccatcccacgcctggtttctatgaagtcttccacaccgatctccagtaattttccccggattctggtcatattgacgctgagcgtattatcatcgataaatgcctcattatcccacagatactcgatgatctccacccgcggaacgatctctcccggacgctgatataaaaaatgcaggatcttcagttcatttttcgtaagttcttcccgctttcccgcatgctcgatcgttcccgccgacagattcaacaccacgcctttatgttccagctgcaacagatcctttgcggcatctacggcatccttttttgctgttctcttcagcacattcgcgattctcgccagaaggatcggcgcattgaacggcttggtgatataatcatccgccccctttaagatcccggtcagctcatccatcgaatctgttcggctggtcagaaagatcacaggaatctccgagtactcccggatcttcgtacagatggcaaatccggactcctccggaagattcagatccagcaaaaccagatccggcatcggctccatccgcgtgatctgccctgccacatccgaaaaggattctattgtggtcacctcatacatggcattttgcagcagctgttttaattcttttcggatattctcttcgtcttccacaatgataatctgcatggttttctccttattttcccttatacgcaaggatgtgctgcagtagcgattaaaaaccgctgccacaacacatccctcaataatttttttatttctttatacggattgtcttgatctcaaatgcatgaaagtctaacggaagcactccattttccaccggaatctcttccttgcagttttccagcatgtcgcaaagataaactttttctccctgtaacagatccgataaggtaacctctgcggtaaccgcagctttcttggattcatacaaacgaagaatgatatctccgcttccgtcttcagccggtttcatggtatccaggataacattacctttatcaattgtcaatgcgctgaatgtcggtgctgcaccgccggcaactaccggtttcacattcagttcgtatccctgtcttaccacatcactctctgcaaaatttccttcccatgcagtaaatgcataagtgaaatgatgtactctgttgtccgcacacatttccgggcaggtcgctgcacgaagcagtgtcagttccagtgcatttccgttcatgctgattccatatttggagtcattcagcactgccgcaccatgtgcgccgtcagcaagtgcactgtaacgatggttgcatacttcaaaccggtctctgtcatatgctttggaacggtgtgtcggacgctctacgaatccgaactgcatctcgttgataccattttccgcgtatacatttaccgggaagcctgtcttcaacagacggtgcatctctttccagtcaatctctgtctcgaactcgattcttctgctgtctgctgccagacggatatactgcgtaaaggtcgagttgctgatctctccggttactttcagtacgccttccagcccatctgcttccatggaaactgtaacattttttgctgcctcaatttcctgatcgatatagttggaatcgatatcccaggcatcaaacagacgcggtacatctttgtacagatggaaacggttcatcgcatctgcagcgaattctcttccggactctttcagtacgaaagaaataacctcgcctttttcgtttacgactgcttttatctgactgttttccatggtaaatccgccgtcacatgacgcaacggtaaccgctttttcttctacctgaccttctgcaggaaccagggaaaccgcaccacaggatggtacttctaccgaagcctttacaacatctccgatcttctgtaccggtactgcggttccatccacggtttttgctccgttcgcaaatgcatccggtagttctaccagcatctttctcgggaagctcaatgagttaaatacggttaccgcctgatcctctttctgatcggtcaatgcgttcagtgcatctttttgcagttcgtccgcaccatccaggatctcatggaatgcattttctgcttccacataaactttcgcgatactggatcccggaagaatatcatggaactgatgtaacagaagttctttccataacgcatctgccttggaaagattgtacgtcatgcctttgttcattgccagaacactccacagttccatctcacgcagtgccagttcacattttctgttattctgttttaccatagcctgagaagtgtacgttcctctgtgggcactgaaatacagttctcctacataggtatttgccgggccgccctgtgcttccatatcatggaagaattccagcggacttgccatttttactttcacgccgccttcgatatcttcctgacgttttgcagattcgataaaatctcttgccggaccgccgccaccatctccgtatccaaacgggagcaggaatgcatccagatcctgtacctgtacacggttcttccagatgttattcacttcgctcggatgtgtccggtaggtataacttgtcggtaagaaagaatcaatctcactgccatccataccctgccaggtaaagtaatgatacgggaactgttctccctcgttataagaccagaaaatcttctgcgttaccagataattcacgccacagcctttcaggatctgcggcagtgctgcggtatatccaaacgtatccggaagccataacacttcactgtccacgcccagttcttctttataatagcgttttccatgaaccagctgacgaatcagtgcttcaccacttgccatattcgtatccggttctacccacatcgcaccatctgcgatccactgaccgcctttgatagcttctttgatccgcgcatacagatccggataatatttccggcacatctcatatgctgccggctggctctgtacatatttatattccggatactgctcgatcagacgcagctgtgcggcaaaggtacgctctgttttccgatgcgtctcctccatcggccataaccaagccagatccagatgtgcattaccaaccgcataaaataccggcatcgtagaaccgttctttgcttccatcagcgatttcaatgcttctctcgcctctttataagatgcaatacgtgcttctctcggctgctcaaaatccacgatcagtgtaaacttctccagcgcttttgcaatctttgcggcacgcagcgtcgtagaatccatcgtttccagaagacgtcccagggtatctacatccataaacagctggtatgcatcttcattccagataccatacgtggatgttcccagaacacatcttgctccttctttcttcggatccgtaaatgctcccggtaacaccggtcctgtcgcacaaccacccgtcggtgcttccggataaaaatgacccgcatacgtttccatcaggatctcataagtgtctccctcttttccgcagacagccagacagttatcctcgataaactgatgtgcctcatctacccaagccgcacgataattaccaaatgatttcccattgacaaacacggtcgactccccgccggcatccaggtccataactattctcttaccctctgcccctttcggaagaactaccgtccctttaaaccaacaatactcccaggtcttaccccaagtaaacccaggctccactgctgtaaactccttctgcagcgcctcctccggagaaatatgatccatcgtccgaaaagcctcccaacgaatctcccccagcggttcataaaaatcatcctgcagagtccgcacccaatgtctgactctgtccttccattccgaatgcattagtttcatgctacctctccttttctcgtaataaacccatttccatacatttttccggatatccccatcatactattaaaacgctgagatatcaatttctttttgtaagaattgctaattttttatctatttttcaaaagttctttatcactttcacaacaccatatctatttttcctcttatcccctccactttttccacaactacccatctattcccccgagtccaaccacctcccccctaaaatttccagttctcatccagccaccagaaaccgggggactcacatagaaaaacagacacccttatgctggtgcccttagcacagatgagatccagcatttacgaaaacttaggctcaagcgctctcgcgagagtcttagttgtagttaatgcttagctcagctgtgcgttaccagcgggtgtctgtttttctatgtgagttccccggtttcgtccgtcttgaaagaactcatcaaatgtttattttccttccctgaacttactaatcgcctcataattcttagcaatatccacattcggatccagcgtagtctccggtccgcgtttgaataccggtttcagcagaatcggcgcaataatggtcgtcaggataaccacaataacaaccggtcccataaccgccgtcgacatcagtcccaggctctcacccttgcttgccacgatcagcgcaacctcacctcgtgagatcatacccacaccgatacgaagtgcctgataattcttataatggcaaagctttgcacccagaccacatccgacaaccttggtcaggatcgcaacaatcgtcagaacaacagcaaacgcaacaatcgtgctgttcatctccggaagacttaccttcagaccgatacttgcaaagaagatcggggacagatatgtataagaaagtacatcaaatcgggatgcgatatacggctctctctgcgtcatagaaatgatcagacctgcaaagtaagcacccgtgatatctgcaacaccgaaaaactgctctgccgcatatgacatgaacaggcagaatacaaacgaaacaataacgtgtctctgtaaacctacgccttctcccgcactccatttgctgaagaatttgtagaaaataaatcctgcgattgcaacaaagatgaagaaaccaacgatcttcagtaatacgatggaaatcttgaccgattcatctgccatacttgtgatcaatgtcagtgcgatgataccaagaatatcatcgataactgccgcacccaggattgcattaccggaacgtgtttttaactttccaagttctttcagagtctcaaccgtgatacttacggatgttgctgtcaggataacaccaataaatacattctgtaaaaacagactgctggatgcatccgattcgagcatacccggacggttaaaaaatgctgctacggcataaccgccaaccagcggaaccagtacaccgatcagtgcgatgatcagtgcggattttccactctttttcagttcctgtacatccgtctccataccggcacagaacatcaggacgataacaccgacttcggctgtatcactgataaagtcagtaggtgtgatgattcccaggataccagggccgaggatgacacctgcaagcagtgcacctaccacctgcggcatactgaattttctggtcagaagaccaagaacttttgttgataacaggatcagacacagatccagcaaaaatttatacgtttccattttattaaacatcctttctattataaatataaaattttattcataacagaaacgatccttttttcgcccgtccatatcctgcatatagcggatcacataaaccatccgctccagatacttccggctgaacctctcaatctgcccttttccagaaagcagaatcccgagaagcatcagaaattcacccagcgccaagtaatacaacagctgttcgccgtcctgcgactgtcggttttcttctttgcccggattgaaaggtccgttttcattttcttctttcctacagtccaccagtctcatatgttccgaaaaggaagtgagcaccgtctcatcttccgaaagcaccagcagagagtttctggatggcacccggacctgaaaggatcccataagaaagataaccgctaaactatatataatgatttttctgattttgtcatttttcttcatgtcatttcatcatactccattacggttccacatcactgtttttaaaacagtcctcttacatctttaaatgtaacaaatacaagcagtcccatcagcaaaagcagtcctgcaaaatgcaccataccttctgcttcccggttcaccggctttcctctcactgcttcgatcagcaaaaataccagccgtccgccatccagtgccggaagcggaagcagattggcaacgccaaggttcgcagagatcaggatcatcatattaatcatggtcagccaggtcatcagcgcaccctcactcttgctttcctgataagcgtctccgatcacatttaccacaccaaccggaccggacaagctgtccattcccagttttccggtgatcagaagtttaaaaccttccagtgtgctgttgatccagtagcgcacttccagggcactgtatttgatcacgccgagagcacttgttttctcccgaccaagattataggaaaatccctgttccacatagttgactgcctgcggagtcacctccacatcgtagtccagtccgtcacgcagataggtcagcgtcactgtctgatccgacagcggatgatcctcaaaatactggctcagcgcctctccggaagctacctcattgccatccacggcactgatataatcgcctgcctgaagacccgcatctgccagcgcaccaccgatcgttaccgactggatctgcgcctgattttcatccggattataactgaatccaagcatgtagcggtcttccgttgtcggatgatacgtcagagtttccttttttccgtccctttttaccgtgacggtgatatctttatctttcagaccttccagtgtcagataggaatacagatcccttgccaggtaaattttctttccgtcaaacgaagtgatcaggtcgccttctttcagacctgccgcctcttccggtgttccttcttttacctgtgtgactaccggaggatcatatccgataatacctataataatcattgcgccgaaaaatgcaagaataaaattaaaaatcggtcctgcggcaatgacggaaaaccgtctccagacggatttgctgttaaaggttccttccccttcatcctctccgtcttctcctttcatcatacaggaaccgccgaaaggaatcagtttcagcgaatatcttgtcgttccccgctgtgtcgacagtatcctcggtcccattcccacagaaaattcttccaccacgatgccatttgtctttgccagtaaaaaatgtccgaactcatgtacgataattacgataccaaggatcagaacagcgattataatactcaaacactccacctgctttccatccattcataggtctttgcttcggtctccagaatctcttccagacctggatgctcgatcacctgatggcggtccatcgcctcccggatgctccggtagatatccagaaaaccgatctgtccatgcaggaattttgcaacggcacgttcatttgcggcattgaaaaccgtcggcatgctgccgcctctccgggatgcttccatcgccatcggcagtcctaaaaacgtctccatatccggttcttcaaaggtaatctcggtcagcgtcttaaagtccagccgttctcccggaagataccgtctgtgtggataatacagcgcatactggatcggcagtttcatatccggtgtgccaagctgtgccatcaccgcaccgtccacaaactctaccatcgaatgaatgatactcttgggctgtaccacgacctggatatgatccagatccacatcaaagagccattttgcttccatcacttccagacctttgttgacaagcgttgccgagtcaatcgtaatcttctgtcccatcgcccagttcggatgcttcagcgcatcctccactttgacatgttccagatcttcccgcttctttccacggaacggtccgccggacgctgtgatcagcagtttgtggatctctctcttatcctctccgtgaattgcctgaaaaatcgcactgtgctcactgtccaccggaaggatctgtacacccttttctcttgccatcggcatgatcagatgtcccgctgtcaccagcgtttctttatttgccagtgcgatatcttttcccgcctggattgccgcgatggtcggacggattccgatcattcccacgatcgcggtcaccagaatctggctttcttccatctgtgccagttccagcagaccgtccatcccgctgacgacttttacttccagatcgctgactcttccagccagaatctttgcctgttcttcatcccagacagctgccagcgacggatgaaattcgcggatctgtttttccagcagggtgatattgcttcccgcactcagtcccgctacgcggatgtctttattctctcttacgacttccagagtctgcgttccaatcgaaccggttgaccctaaaattgcaattgttttttccatagtatgttctctcctccacgttctatgcttcttttcgcggattttatttccttattttattgcatttcctgtctgtgtctgcttcaccttacatcagggtgatcgccagcgcatagatgacaggtgcggtaaagatcacgctgtcaaaccgatccaggataccgccgtgacccggaatcagtgttccgtagtccttgatattttcctgtctcttgatcgcggatgcagccagatcacccaccatggataccagtgcaccaacgccgcagatgatcgcatagatcaacggtgtatgtgccggattcggattatacgatcctgtcgctaccgcatagatagctcccagaagtgccgcaccgacaacgccgccgacagctccctcaatagattttttcgggcttaacaccggtgccatcttgtgttttccgatcaggacacccacacagtacgcgcatgtatcgcatccccaggagcataaaaagatcagccataccagaaaagcgccacccggcaatacacgggtctgataaatataagaaagcatcacgcccacatacaccataccgaaaaatgcagtcataatctgtttattctgatattttggataggtaaatacaaaaatactcatcatcaccagtacaccaagaatcactgctggcagatgatagcttaccggcagataggcaactgccagataatagatcacaatctccaggtagctggcaatctccagtccgtttgtctttccttcatggacgcccgctgcccgatacaactcctgcataccgatacaggaaactccgatcagagtcaccagaagtaccggtccggaacagataatcgtggcaagtgccaggatcacaaggacgattccactgatcagtcttgtcttaaacatcctactcctcctttacaccgccgtatctgcggtctctctcattgtatttttcaatcgcttttaccagttcgtccctcttgaaatccggccacggcacatcggtaaaataaaattctgtatacgccagctgccacaacagataattcgacaaccgcagttctccgctggtacggatcatcagatccggatccggaatacctgccgtatccaaataattcgatatcgtctcttcctccaccggtgtctccagttttcctgctttctgatcttccagcatccggttcactgctcttgtgatctcatctctgcttccataattcaatgcaatctgaaaatgcagttccgtaaaatctttggaaaaattctccagctttgcgatactctcctgaatatccggatcaaacgcgctgacatctccgatcacttttacccgcatattgtttttctgggaaatcttgatacattttttcagatagttgcgaaacagcttcatcagcccgtccacttcttctttggatcgtttccagttttccgtagaaaatgcatagaccgtcagatattttacgcccagttcttttaccacttcgcagatgtcttccagattctcgcatccctttacatgaccgtaacttctcggcatccctctttttttcgcccagcgaccgttaccgtcaagaatgatggcaatatgatttggtactctcatacgattctcctttgtcattgaaaaagggacaccatacaatggatcgtgttccatatgttgatgcccctcagcttttattaaacagttaagatttcttttgattttacttcgactgcttcatctacttttttgataaacttatctgtcattttctgaacagaatcttccagctcagcaatctcgtcctcagacacatctgtttttcccagcttcttcagcatatcatttgcatcgcgacggatattacggatggctacttttgcagcttctccttttttcttaacttcttttaccagatcttttcttcgttcctcggtaagttccgggaagatcaggcggatcactttaccgtcgttcgtcgggttgattcccagatctgacatattgattgctttttcaatttcttttaccagtgatccttcccaaggctggatctggatcatacgcgcttccggtacagagatatttgctacctgctgcagcggtgtcggtgttccgtaatattccaccatgatacggtcaagtacgtgaggattggctcttcctgcacggattgttccaaattcactgtccaggttggccagtgttttatccatcttatcctgatattttacgattctctcatccatgtatatttcctcctggtctctctttctattccgtttttaatctaccagaacttttgttccgtcgatctcgccttttgcggcacggataatgctgttttcttcattcagtccgaataccagcatcggcatcttgttttccatacacagaatggatgctgtcaggtcaacgactgcaagtttctggtcaatgacttcctgaatatgcacgctgtcgtatttctttgcgttcgggtttgtcttcggatcactgtcataaacaccgtccactgcttttgcaagcagaatggtctctgcttcgatctcgatagcacgaagtaccgtagtagtatcggttgagaaataaggatgtccggttccgcctgcaaagaacgctactttcttttctgcgaaacatgcatttgcctcatctttggaaaacagttttgtcatagctccacaggcaaatggggtaaagatctcagtcttcattcctacggaacggaaaatctcagatacatagatacagttcataacggttgccagcataccgatctgatctgctttggtacggtcgatcgtctcgctgcttcttcctctccagaagtttccgccgccgattaccacaccgatttccacgccttcatctaccagtacctttacctgttttgcaacttcggttacggtaggttcgtcaaatcctgtatgtttggcacctgccagtgcttctccgcttaattttaacaatactctcttcatattctcagctcctcatctgttttagtcctgtgtcagtccactgacataatcctgtactgcactcgcatcaaattctacagtttcctgcgtagtgccctgtgctctttccactttcgcatagatagaatatccgatccatcccacgaaaaccacacagacaagggtaattcctaccatttccagacgatgcaggaatttttcttttttcatcatcttctggcgattggctttattttttttataattatctactttcgcctgactcataagtgtgctcctttgctttctgttttgccgctgtcactgaaactttggacagccgcgcatttcataacatcgattatagcatatcacacgttaaaagcaaagaaagttttctgtaaattcataattatatcacaacaataattccaccatcgttcgcatacatggaactgactcccgcggtgtcgagaatgatcacatctttcacctgcatgcgctcgaggagtgcttccttaaccatctgcgctctctccgggcagttgcagtggcagatggcaagcactttatcactgctgtgcggctctccctctttcacataatccaccattttcaccagggctttgttgattccacgcgcctgatccagctggcagatgcttccctccggtgtggctcccatcaccggcttgatcttcagggcagacgccaccatcgcttttactctgctcagacgtccgttctttcgcagtgtctccagattctccagtacaaaataagtatgctgggattcgatataggcatctaccgtctccacaacctgttcaaactccataccggcttcctcacattcctgaatcttcagggcaatcagtgtttcccctaccgaagcactttttgagttaaatacatggatcttcttttccggatgttcttccagtaccagattttttccgagttccgcactgttataggaaccgctcagttcagaggaaagggtaaccgcatacagatgttccgcatctgtctcaaatcctttctgataaacctccggtgacgggcacgcagatttcgggcactccggatatgctgccacctttcttaaaaaatccgcctggtcaaacgtttcatcatccacgatgatatccgctcccacttcgagagtcagcgccgccgatgcaaaacgttcgtcctgtttcatctcgggtgtcagctctccacaactatctacaatcactttaaatttcatcactgtctgcctccgccatttatattctctgctgctttctgcagcttgtatatgtcatcatgtctttttctcgtcatcacaggattgcatcttttgtttttcaactttattataccctgtaatcgcgcctacctgacatagttttcaatactacattttactatagcatatcttccagcaaatgaaaagagattttctatgttctttttgtgtcttttggtttataatactggtatctgttttttgaaaatacacttggaggttttatggattatttactgaacagtttcatggaagttctggatgaagattaccagccgaaagacacggacatcgtggtgtctctggttaccactgaggaatgcgaagagcgttaccgttctcttccttattatcatgtactcgcaagaaatatgcaaaatcataacatccgctactgcaaagcggagatgtttaaagactgtatcctgggaacccttctgattcccgataaaaaaagtatctctgagacgattttgtccatttctttctatatgaataagaatctactggttctggtggatgattcaaaacacattcaggatattcttacacttctggaagagggggaacttctgaactgtaagaccatcgctgaatttctgtgtcagctgatcggtactctgacgctggaggatgcggtatttttgcaggagctggaacagcgcatgagtgatctcgaagaagggatcttaaagcatacggtctccgactcttccacgcagctgatgcatatccgcaaacgtctgttgatcctgcattcctattatcagcagctgtctgatttctgtgaggatctcgaggaaaattccaatcacttttttcaggcggaagaatgtcagattttttcgctgtatgcgtcccggatcgagcggctttatgaccattcgcaaatgctccgggaatatgctctgcagatccgggagatggaacagtcgcagaccgacgccagacagaaccggaccatgcggattcttactgttgtgactacgatctttttcccgctctctctgatcaccggctggtacggcatgaatttttctcatatgccggaactttccgctcctcatgcttacgggatcctgatcggtatctgtgccgtgattgttctgatcgagatctggatttttcataaaaatgactggttttcctgaattttctgatggaaatgtgtctttattatcattttgggaggatattatttgttagcacttcgaattttagatctgaaagattttacagcaaaattatttattggagaaatgtttcagcatttttcttttgtggaagcttcttttaccacatttgtcacttataccctcgacggacagctgcataaggagtttttcgattccgaacagtgtcccgaccggacatactgcctgtgggaagatgtgcaggcacagtgtttttcgatgatccgcggaaaacgtacaccactgaactttaaaattgtgtttcagctttctgcttctaatgtagaaaaacttctgatgcagagctgtgttccgttaaaggcagaagatatctacggactgtatctgaactgccagttcgatggaaaacaattgctttgcaccaccggtacttctctgaaaatcttcaccctggacaaacagcttgaccgggtgtgggatgagatgatccggaagtttttccgaaaaaatcagatagcttttgaagaatagcaaaacgggaaactcttttcatcgagtttcccgttttgttcgttttctgtttgttctattttatcttatctgctatttctgtatttttatttcagaatagatccctgcaggttgccgtcctgtccggattctcccggctgggtctgtccctgctgaccgtcctgtgtagttgttgaagtatctgctttgtccagtgtgatggtcagtgttttttctacatagcttccgttatcagcgatctttacaaccagatctacggtttctcctgctgcataatactccagacagctcttcagatcatccatggattcgatcgtcgtatcgtcaaattttgtgataacgcttccggctgtgattccggctttctcagcggcacttccctgttctatttctgctacataaacaccctgcgggataccataagcttctgcgatagaactgtctacggtctgacctttgataccaagtgctgctgcctgatcagaacttacttttgttcttgtctgacggttcatcagatcttcaaagatcggagaagcggtgcttaccgggatcgcatatcccataccttctacttctgtggaagccagttttgcggagttgataccgataacctgaccctgcatattcagaagtgctccaccactgttaccagggttgatggctgcatctgtctggataaatccattttcagaattggaatcttccagctgacggtttactgcacttacaataccggttgttacagactgaccgtaacccagtgcattaccgatggctaccacctgttctcctacctgcagctgattggaatcaccgatctctgcgatcttgatctgagacattgtgtcatccgaaatatcagaaagtttgactgcgataacagccagatcgttatcggaatcagttccttttacggttgcctcacaggcattatcatcagcgaaacatacagacaacgtatctgctccttctactacatggttattggtggcgatcagaagttcgctgtcattttgtccgatgatgataccggaaccctggctttccacttcctgttcctgtgtgccgccgcctcttgagaacatgctgaaataattctgtacttcctgtacggatttgttagtgattgcaacaatcgatggcatcgcactctgaacgatagaagtaacatccatacttcctgaggaagtgctacttgctgtgctcgttgatgctgttgcggtctgcagtttcgtcgttgttgtctgctggctgctgtcactttctgtctgtgttgcctgtgcttttgctgtcgcaccggttgcataagtaactccggtaaatacacccccggctacgcctccgaagagtaccgcgctcagtgctaccgcaccgattttctttgcccattttgcagcatttttattattctttccatgcggtttctttggctccatcggtgtattgttctgcggttcatttccctgctgattccagttgtaacttccatattcttccataagtcattcctcctgtttatgtaaatgtgttgatttcttttttgtttgtttcttttttgtttatggctatagtatagaaaaggtttgtggtcaatttgttatcaaaatatgtttattttgtgaaatagttcaaactatgctataatacttttcagtggacagacacaggtgttgtctgtttatcagaaagaagaatactaaatgtactctcggaatttttcagtgcttgattttgtgagatgattttttgtcagttgtacccaaatttctgaggcgtacgcggtgcgtacgttgatgaaattcgggtgcaactggcagaaaatcagccacaaaagcaagtgccgaaagactccgagagtacatcgaactcacaggaggtttttattatgcagaaaatcacaagttttaccatcgaccacataaagctccagccgggtgtatacgtatcccgcaaagacccggttggcgattccctgatcaccacattcgatatccgtatgacatccccgaacgaagaaccggtgatgaacaccgctgaggtacacaccatcgaacatctgggagccaccttcttaagaaatcacccggacttcggctccaaaaccatctacttcggaccaatgggctgccgcaccggcttctatctccttctggcaggcaactacacttccagagacatcgtcccgctgatgaccgagatgttcaccttcatccgcgactaccacgacgaggtcccaggcgcctctccaaaagactgcggcaactacctcgacatgaacctgtccatggcaaactacctggcaaaccgcttcctgaccgaagtattaaccgacatcaaagaagaccgcctggtatacccggaataaatactttcattgctatccggcagtgaacattgttgcaaaatatcagatactataaaaaggaagatagcagtacatcttaatgtacacaactatcttcctttttatatctttatatccaaaattatttagaactctttcttatcacttattaatgaatatttttcctttttcgaaaaaaactcttttctcctatttttttgaataaaatacgcgttcaagacacagcccctctgccggcgccgtaacgcccgcaaacttccgctccatcctctcaagcagctccggcatactgtccgcatccctcctatgctgccccacctcaatcaaagttccggttaagattctgaccatatactgaagaaacccatttcccgtatacacaatccgtatctcatgctccgactcttcaatcactatatccgtaatcgtccgcaccgtggatttcttcatcttcggattgccacaaaacgatttaaaatcatgggttcccaccagatcttttgccgcccggcgcatcgcctctacatccagagtttcccccagatgataccgaaacttccggtcaaacaccgatttctgctcatctgttccgatccggtaagaataacattttccttccgcccagagccttgcatgaaaccgttccgatacctgttccacggactttacacagatatcttccggcagatactgattcatatattgcaaaatctccttcggatcccatttctttgccagatgcacactggctgtctgattctttgcatgaaccccggcatccgtccgccctgccccgtcgatctcaatctctttttctgtcattctggataatacctgttccagctttccctgaatcgtctgcgtggttttcttctgtctctgccatccctcgtaacgggttccttcatattctattgtcagcaaataattcatagatttcttactctttccagttttttacttcatcgaactctgccagaatttcctgagatggttccttcgtacagagactgaagatcacaatgcagagaatactcagcgcaaatcctgccaccagtgaatacagcccggtcgcagttccaagcgtctgtccatgtaccaacggcagataatcccatatcagaaccgcaccgccaccggacacaatccccgctactgctccggcaaaattcgttcttctccagaacagggacatcactacgatcggtccgaacgccgaaccaagacctgcccatgcgttggataccagtcccataatactgttgtttggatcccaggcaatcaaaaatgccagcaatgcaacaaccagtactgtaaaacggctcaccttcagcacttttttctcatcggattccggtttcagaatatccttataaatatctttagacacggatgaagccgtcaccagaagctgtgaatccgctgtggacataatcgctgccaggataccacacaggaaaattcctccgataaacggcagattcgtatcttttgtaaacatttttgtgatcatctcaataaagacgctttctgcggaagcatttccgtcggttccaaggatcgtcgggaacagatacacacgcccgatgacaccgatcgccacggctgctgccagagaaatcgttacccatataatagcaattactctggattttctcaactctttctgattctttaccgccataaatcgggtcagaatatgcggcataccgcagtagccaagtccccaggcaagctgcgagatgatttccaccgccgtgtacgggcggtcaccattctgaaacagactcatatacgctgaagcaccacccacaacaccactctgatcaagaatcggtttcacctgatccgatcctaccataaaataagcagcgatcggaacgatcagcagtcctactaacatcagacttccctgaataaaatcggttacgcagactgccatgaacccacccataaacgtatagatcagaatgaccgtcgcaccaatagccagtgctacatgatagtccacgccaaatacggagttaaataattttccgccggcagacagcgcggatgcggtatataccaggaaaaagataacgatcacaatcgatgataccagaagcagtacccgttttttgtcccggaaccggttttcaaagtaagccggaagcgtcagggagttatttgccttaattgtgtattttctcagtctcgaagaaataaacacccagttacagaccgttccgagaaacagtccgattgcgatccaggactgtcccgttcccagtgcatacacggttcccggaagccccatcaggagccagccgctcatatccgacgcctgtgccgacagcgcagccacccagccgctcagtcctcttccgccaagaaaataatcctctgagtcattcgtgtttttcatgtagatcgcaccgatcacaatcatcagcaccagatatgccgcaaatgcgatcaggattgctatggtatctgtgttactcattccttttcctcatccttcctttttgtttttgataccggattgttccgtacttcgtactcccacaatcctcaaaaatatttgtaatccattatccataaaacttcctggcttgtcaatcatttttgctttattttgttatcattttaccatattaaagcattttatataaaaaatttcccggatacggatgttttttctccatatccgggatttcttttgctttattttgctgcgattgcttcgatctcgatcagaccgccctttggaagtcttgcaacttctacacaggaacgagccggtgcagcatctttgaagtattctgcgtagatggcattgactgttgcaaagtcatccatattgtccagaaataccatagtacgaacaacatcttcatatccaacgcctgctgcttccagaacagctcccaggtttttcagtgcttgatgcgtctgtgcctcgataccttccggcagagttccgttctccggatccagtcccagctgaccggaagtaaataccatatttccagcttctacagcatgtacataaggtcctactgctgcaggtgctttttcagcaaaaattgttttcttcatgtttgtatcctccattatcatttttctatatctgcttcttattataacatgatgttcgagttcgtcaatgttgaaccgctggggacggagaaatgtggcattaagccatatttctccgtccccagtatttgcttgctcttttttgcacaatagaatataatgtttttaatatatctttgtataaaaagacgaaaggggaacgatatgaaacacgaaaaagactggtataaggatctggtgatctatcagatctatccgagaagcttcaaagacggcaatcatgacggaattggcgatctgaagggcatgattgaaaagcttgattatctgcaggaactcggcatcaatgcggtttggatgtcaccggtgtttgcctcaccgaatgtggacaacgggtatgatatttccgattatactgccatcatggaagaatttggaaccatggaggactgggatgctttccgggacggtgcacatgcacggggaatcgccattatcatggatctggtgctgaatcattcttctgacaaacatctatggttccaggaatccagaaaatcccgcaacaatccctacagtgattattatatctggagagatcctgctcctgatggtggtgcaccgaatggctggatgtctgtgtttggcggcagtgcctgggaatatgtagcggagcgtggacagtattatctgcatttctttgcaaaagaacagccggatctcaattgggacaatccggagacaaaagaaaaaatctttgatattatccgcttctggaacgataaaggcgtggatggctaccgcatcgatgccatcagttatctggacaaaggactggatggccgtgccaatccaaacgaacagtttggtactgtcgcctgtgtgaacctggaaggaacacatcgttatatccgggaaatggttgcaaagaccatgacacccgaccatctgatgagtgtcggagaggttaatatcaataacgatcaggatgccatccattactcgagtgcttccagtgaggaatttaacatggcaattccttttgtaccgccgatcgtggagattcagacctggtcaccggaaaaaatgaaacgggatcttcgtcacgattatgaactgctgaaaaaagacggctggtgggcacggtttttaagtaatcacgacaagccacgccaggtttccctctacggaaatgatacaacctgccgggaagtctccgcaaaaatgctggcatcctacctccatacgctcccgggaactccttttgtcttccagggagaggaacttggtatgaccaatgttgcttatccttccatcgaagattatgacgatattgataccaaaaatgcctaccataccatgctggaacaggggattgctcccgaaaaagcactggcagaagctcaacgaatcagtcgcgataacgcacggacaccgatgcagtgggatgacagcgcatacggtggattttccgaccatacaccatggctcggtgtcaatcccaactataaagaaatcaacgccgccagccaaatagcagatgattcttccgtctttcgtttttatcagaaactgatcgcactccgaaaagagcatcctgtcatggcacacggtgatctgcagctttgctgcccggaggacggaccggtaattgcatatacgagaagttatcaggaggaaacctggctcgctgtccataatttttcgcaggatgtgcagaaattcctgtacgccggaaccggtttgcagttggatacttcaatacttttatctaattatccggaacatgatatttgtccggaagatgaaattttaacactgaaaccatacgaaactgtgatcttccgcttatcgtaaaacagcattgtgtcaaccaccacacatgcataacagaaaagtctgaaccattaacttgttactcttgtttttctgatatttaccgattagaatagatatagcaggtgcagacaactaaaaattgcaccttttagaaggagggtttttcttatgaaacttcaaaattattttcaggatccttcttctttacatatcggaacagaaccgcttcgtgcctactatgttccttgtaaagaggaagcgggagccaacgacgcagatatgctgaatgcttcccgtgccatcgtgttaaacggcgatgactggaagttcaaattttatgaaagctatcaccaggttccggaaggatgcatcgaaaaaactgccgatactaccggctacgataccattccggttccaagctgctggcagattcttgggtatgatcataatcagtataccaatgtccgctatccgattcctttcgatccgccatatgtaccggataacaacccggctggtgtgtatgtgaaagaattttcactgaccgaagaggaagcggcacagaaaatttatctgaactttgacggcgtggactcctgctactatgtatgggtcaacggaacttttgtcggttacagccagatttctcattccggaagcgaatttgacatcacagacaaagtaaccacaggcaataaccgcctgaccgttctcgttttaaaatggtgtgacggaacgtatctggaagatcaggataaactgcgttttaccggtatcttccgtgacgtttatctgctggttcgtccggcggatcatatccgtgattattttgtccacacaccggtaagcgaggatctcaccaaagctgagattctggtagaccttgacctttgcggaactcctgccatcacagcaaaactgtatgcaccggacggagaattcctgactgctgccactcctgccgatggaaaagtacagtttagtgtaaatactccggatctgtggaacgcagaacatccggcactgtatacgctggttctttccacaccggaagaagtgatcgctcagaaagtcggtcttcgccggatcgacatcaaaggaaatgtcatctatatcaacggtgtcaacttcaagatcaaaggtaccaaccgtcacgacagcaatccatttaccggcgctgcagtcacaagagaacagcttctgaccgatctgaaactgatgaaagagcataacatcaatgcgatccgtaccagccattatccaaatgctccatgggcaacacagatgtatgacaaatacggtttctatgtgatggatgaagccgatctggaatcccacggatgcaccacactctatggaagtaagagtgaacatgtcgacatgggcgaagtgcagtacgaagaaagctatggttatctgatgcgtgacccttcctatgagactgctgtcgtagaccgtatccaacatctggttcaccgggacaaaaactgctccagcgttttctcctggtccatgggaaatgaaagtgcttacggtccgaacctagaaaaggctgccgcatggatcaaatcctatgatccggatcgtgttctgaactatgaaaacagtatctggcagcagaccaataccgattatgtgaatgatgtacatgatctggatgtcttctcccggatgtacgcaccggtagaatttatcgacgagttctgctccaaagaaggcaaaaaaccatttatcgaagtagaatactgccacgctatgggtaacggtcctggagacctggaggcttattttgaacgtctctacaaatatccgggttatatcggcggtttcgtatgggaatggtgcgaccactccgtatatatgggcaaaaccatcgaaggcaaagataaattcttctacggcggcgactggaacgaagaagtccacgacggaaacttctgcatggatggtctggtatacccggatcgtactccgcacaccggtcttctggaacataaaaatgtagcccgcccgatccgtgccactctgctggacgtttctaaagggctggtagaactggataacaaactggattatacaaacatcaaagacggatttacgatcacttatgatgtgcagaaagacggcgtaaccacactttccggtactctggatccagttgactgcccggcgaaagaaaaagtgacgatcacattgccattcgctgtaactgcagagggcaacaccatcgttaccctgcattatctgcaaaaagaagacactctgctgactcctgcaggatatgaagccggtcacgatcagctgatcttctccaccgatgccgcaagtgccattgcagccgttgtcaagttctccggcgctcagaccgcatctgctgcatctgctgtagctgtagaagatctggaaaatgaactggtgatcagtggtactgccttccgttatgtctatgacaaatggaaaggaactttcaccgctcttgtaaaagatcagaaaaatctgatcgcacagccgatccagttaaatatctggcgtgcgccgctggataatgaccgtcggatccgctgggaatgggaagctgccggttacgacagagcccgcaccaaagtatatgctaccgaatggacacaggatgaggaagctgtaaccgttacttccacctattctctggctgctgtatatctgcagagaatcatcgagggaaccattacctggaaagttgccaaagacggtactctgaccgtcaccgtagacggtgagcgcaaaccggttcatgtaccgcttgcaaaaactccgctgccaaagatgcctttcctgcctcgtttcggtctgcgtctgttcctggaaccgaccttcgccgatgttacttatttcggctatggaccaatcgaaagttatccggacaaacatcacgatgcaaaactgggactttatacctctgatgtagacagtctccatgaagattatctgcgtccgcaggaaaacggaagccactggaactgctccggactggctctgacctcttccgatcaccgttccctgctggtatccggtgcacagaacttcagctttagtgcttcccgttacacacaggaagaactgaccaccaaagcacacagcttcgaactggaaaaatctccgtacaccgtgctgtgtctggatggttatatgtcaggctgcggttccaacagctgtggtcctgctctggcaaaagagtatcgggtagatcaggacaaactgtcctttacctttactctgaatttctaagatttttataaaacagatccctattgatctgactgataccgggtcacgagatgtagaaatacactcgctgacccggtgtttttctttgaccttgaccaaatctgttttttccgttaaactaaaagacaggcataactgtagcattgataaaacagttagcaaagacagaaacagcatagtaaggaattggtgaacgaatgaaacaaacattacaacaaccccatctgcatacagccggtaatggcgaaattgaaacctgtgatatctgccaccaccatcatctgcatcttccaatgaaagctccggaggatgaaactttgtatcgtctggcagatctctacaaagtattcggtgatcctaccagaatccgtattttgtatgcattatccggcggtgaactttgcgtctgcgacatcgcagagcttctgggtatgacacagagtgccatctcccatcagctgcgtgtgttaaaacagtccgcactggtcaaattccggagagatggaaaaaccgtatattattcactggctgatgcgcatgtggcaaccattctcgcacagggactggatcatgtgcaggagtaacagaggcttacttttatgaaatcattgactgacatctatttcagaatccaaaagagagagcagacagaactccataaaagttccatctgctctctcttttcttctgtatctcaatatttttatttttgatgatatccatccagaaactctgccagtttctttgtcgctttctccaaatctgcgactctcggcagatataccacacggaaatgatccggtttatcccagttgaatccgccaccatgtacaatcaggattctcttctctctcagcagatccagtgcaaatttttcgtcgtcgtagatgttgaatttctccacatccagtttcgggaaaatgtagaatgcggctttcggtttcttcgccgatactcctggaatatcattcaacagtttatagatcacttctctctgttcatagattcttccgcccggctgcagatactcttctacactctgatatccgccaagcgccgtctgaatgatcgactgtgccggtacattcgaacaaagacgcatattggaaagcatcttgattccctcgatataacctgctgctgcttttttatttccgcttaataccatccagcccacacggaaacctgcgatcatatgggatttggacagtccgctgaaggtcacgcagaacacatttttcggcgcgatcgatgcgatggaaatatgtttcagtccatccatcaccagacggtcatagatctcatcggagaaaatgatcagtccgaactcttctgcgatcttcacgatctcttccagaatttctttcgaatacaaagctccggtcgggttgttcgggttgatgataacgattgcttttgttctgtctgtgatcttacttctgatatccgcaatatccggattccagtcagactcttcgtcacagatgtaatgcaccactttaccgcctgccagtgtagctgttgccgtccacaacggataatccggtgccgggatgaggatctcgtcaccgtcatttaacagtgcctgcatactcaggttgatcagctcactgacgccgttaccggtgtaaatatcgtccatcgtcacatccgggattttctttaactgacagtactgcataaccgcttttcttgcggaaaacagtcccttcgaatccgagtatccctggcagtcccataaggactgtctcatatccagaatcacttcttccggtgcattaaaaccaaatggagccggattaccgatattcaatttcagaatactgagaccatccgcttccattctggccgcctcgtccaccacgggtcctcttacatcgtataatacgttatccagtttggaagatttatcaaaagtcttcattagtatctgcctccattcgttttcatttttttactttatcacactaattcagtggattacatattttttttattgtaacgcacaatggtgcgcttgtcaaatttccatttatttcagaatcttcttcagttcatccataaaggtattgacatctttaaattctctgtataccgaagcaaaacgcacataggcaactgcttccaggtctttgagtttatccatcacgatctccccgatcacagaactcggaatctcccgttcctccagattgaagatctcggtttccacctcgtccaccagcttgtggatctgttctgcagataccggacgtttgtggcaggcacgcagtacacccgcctcaatctttgaccggtcaaactgctctctgttctggtcttttttgatcacgatcagcggaatcgtctctactttctcataagtggtaaatcgttttccgcacgcatcacacattcttcttctccggatggcagtattgtcatccaccgggcgggaatccacaacccgggtattatcctgattacaaaacggacacttcatattttatccttctctttccgcaaactgactttgattgtccggtattctctcgtgtccccttattcccgttcaattttctcacagttttcttattttcccagtaactgttccgtgtcttcacagttacttttcctacaaccggcatctctcctgcgtcccctcacgcagcggatgctctatctcttctcatcataatataatcgcaaactcatcgtcaagacaattgtccacaaaacatataattattataaaagaaagataagattcaggatttttatgcgaattattgatctgaaacaaaaagaagtcatcaatacctgcaactgtaaaacccttggctgccctgtggatgtggaatttgatccgtgtaacgggcagattaccgccctcatcattcccggtcccggaaaattctgctgttttctcggaagggacagcgaattctgcatcccctgggaatgtatctgtcagatcggggaagatattattctggtggaaatcgatgagaaaaaatgcctgaagaaactgtagctgtttttctgacagctacaacatttttctccagacataatttctgtcatattgctgttctctcagtctcgtccggctgtaccgacatccaacagcaacaggtcttcttctttcacatacagcaccttgggcactccatccgaaggatcccagtcggttttcgctgttttccattgcagccactcacaggaatcgtcttttcgaaaagagacattccactcaaaaggatcttccatgatccggtattcacccaccggaaactcgctgtaattgccttccaccggtttttctcctgtaaaataatgggcgcggattccgatcgtctgcgcctgcagggcttctttggatacccgaagggcgacgccccactctgctgcccagagccagtttccgtctttgtggctttccatggcttccaccgcacagatatttttacaaccggataaaagtgccgccgtcttcgtcttcggattccggaaaaattcttttaccggttcgatcacttccatccgtcccaggttgatacagctgaccgtatcacacagccggtagacctcatctctgctgtgtgatacgaaaagtacaggcttctgtacctcctgcaaaagttccagcatctgctgttccattttccatttcagatagctgtccagcgcagcaaacggttcgtccagaagcagcacttccggctccgaagccagcatacgtgccatcgccacacgctgtttttgtccgccggagagctgatccggcatgtgattttccagtccgccaagctgaaatcctgtgatatactctctgactttcttcggatccggctttcttcccatccccgcctgaatgttctgtaccacattcatgttgggaaacaatgcgtaatcttgaaacatatatccgacttttcgtttctgtggcggcagattgatccgtttttccgagtcaaacaatacccggtcattcagtacgattcttccctcatccgggcgttcgatccctgcgatacattttaacgtcatactttttccacatccggatgctcccaggatggcaaatacaccgccatccatcgaaaaatccacatccagcagaaaatttcccagtttcttttttatctttacctgcagcatcgttcgtctcccttaccagcgttttttatgtttgtccccaccggatccgatcagattcatcaccagtaccacaacaaacgcaatgatcataataatgagtacccagaaaccggcggttccataatcaccgtcctgaataaccatggcgatcttctgggaaatcgttcccgtctttcccggaatatttcccgcgagcatcgaagtcgctccgtactctcccatggctctcgcaaaggtcaggattgttccggaaaggatacccggtccggcagacggaattaccactttccagaaaattgtcatttccgacatgccgagtgtcctcgccgcatagacaagattggcatctatctgttcaaatgccgccctcgcgttccggtacattagcggaaaagcgatcacggtcgccgccaggatacatcccagccaggtctgcacgactttgattccaaaattgccatacaatgccgcaccaaacggccgccgcagactgaagatcagcagcagaaaaaatccagctaccgtcggtggcagtaccatcggaagggtcagaatcccgtccagcaccgcttttgtcttcggaccggctttcacaacctgccttgccgcatagatcccaccaaaaaaagaaagaatggtagccaccactccagtctttaatgagatcagcaggggactccagtccagtcccttcataaattccatcatctgttctatttgtgtctccatccttcattctcctcgccggaaaaacagatcccggcggtatatatgcattttttatattactattagtcctctacatccgtatcgaagtagtatttctggaaaattgtttttgcgtcatctgtgatcaggaaatctacaaattcttttgcagcggtggattccagttcttctgcttctgcattctgtacctgtgctaccgggtagataacatcaccggtcagatcatacgggataatctgcaggatctccagacgatcttccagtccgtaagtatccgaataatataccgttcctacttcgttagagccttctgctactgcggaagtaaccgcaccaacatttgcacactcattgatttccacaccgcccagtgcttcggaaacagttgcggtcgggatggtagatacatcatcaacggcatccagtatacctgcatttaccattgcctgacgggtgtattttccgaccggtacagagccgtctgccagtgcgatactgcttgctttgctcatatcttccaggctggttacttcggtgttgcttcctttataagttaccaggcatacctggttatttactacattgtgacgggttccgtccacaaccagaccatcggtctcatccagctgatccatctgttttacagctgctgagaaaaatacgtcgcaggctgcaccttcttcgatctgtgtcagcagcgttcctgaactgtcatagcttccctgcacatttacatttggatgtgtttcctggaacttcgcgatcagctcttccataacctgattcagactctttgcagcaaagacggtaatggtagtttcttcgcttgcatcgtctgctgttgtgtcagtgctttcgtcatccgctgcatctgctgttgcttctgtctgtgtctcttcttttgttatatccgctgcgctgtcgctcttagagccgcatcctgtgaacatggacactaccatagctgctgccagtaacatacttacgctttttttcttcattgttttttctctttaatcctgttttttctgcgcggatctgtatcagctgtgctgcgatgctgatggcaatctccgccggtgtttcacttccaatctcgattccgataggtgcgtacacccggtccagttcttcactggtgaagccttcgtttaataatttttctctgacatactgggtttttcttttacttcccactacgccgatataagaagcaggtgtccgcaaggcaaaccgttccacatcggcatcacagcgatgccctctcgtgactaccaccagataatcctccggttttacttccagaatctgcgaaagtgctgtaaaatctacggtctttgtctcctgcactcccggaaacaaagcgggatcggtatattcttcccggtcatccatgaccatacaccagaagcccagatggctgagcaccggaaccagttcctgcgccagatgaccgcctccaaaaacataaacttttccatcgtaacagaattcttctgcatatagtttctgtccattttcctctaggatccggcagtgtcctctgccttctgtgatctcttttcggatctgtggcagtccttcggaaaatggaagaaccagccagtaaggttttccctcgtccgctgtcaccagcgcctctttgaaaaatgctccaaccgccggatctttcatacggacactgtaaaacaggactttcacattgcccccgcagaccattcccaatccaccgttttctccggtttcaagatcaaagtcttccacaaaatgtgcatcggttcccgtcagttccatggcttttttcaccgcctggtactccaggttaccgcctccgatggttccgtagattcttccggtcttatccaccgccatataagcacctgtggttcgcggaatggaaccatttccttctacaatggtcaccagaaccgtatcggtcttctggttccatcgatccagtaataactgatatagtgttttcattgattgtatttccttttatgattctttttttactcttttcatagttatctgaaatttccgttttttatacactcatttttttcatgaatcacttttccgtgaagttcctgttattccatttccatgatttcgagattgtcaccctttcggatggttccgccttccagcacaacagcaaatacgccttctctcggcatgatacattctcccatgcgtttatagatttcgcagtggctgtgacactctttcccgatttgcgtcatctccaggatggcatccccgcatcgaaaacgggttcctaccggaagactgcggaaatcataaccgctgacgatcagattttctccgaaagcaccaagcccgatgtcggcaccttttttgcgaaattcttcgattttttcataggacagcagactcacctgtctgtgccagtgccccgcatgggcatctccctggataccccagtcctttaccagcactgcctcttcgatttcatgtttcgctgtacctcgtttttcactgatacagattcctttgattactcccaaagttgttcctttctatccaccaatttttaccatctcatgtgtctccgtcatctctgacggacgttcaaaacagtgtgccgcaggtttccgaaaaatagcctcttccattactgttcgaagattttctttttctccttctcgaagcacatggcgaagatctacgccctgatcgtaacacagacacagtttcagatacccttccgccgttaatctgacacggttacaggtgtcacagaattttccatgtatggcgctgataaatccaaccggaactttcagatctgaaaatcggtaatacaccgccggtccgcttcccatccgggaaagttcttccgaatcaacaagcttttctgctgttccaaatgttttttccagcatttctcgcagttcttcattgcttcttcccacatattgtttgccatatccaaccggcatcatttcgataaaacgaagcggaaggttctcattctgtgcataacgcaccaatggaaccggatccagttcttttcgattgactgcattcagcttcaccggtaatccggcatcttttgccgcccggatccccgcaagaactgccggaagttcccgtttcccggtaatctggcagaattcttccggatccagtgtatccaggctgatattcactccatctacaccggcttctttcagctgttttgcatagtttccaagcagaacaccatttgtcgtcatcgtgatggtttccactcccggaattttccggattccaagtatcagatccgcacagccttttcgcaccagaggttctccgccggtgatgcggatatgcgtgatgccaagactcacgctcacctttacgatctcccagatttcctcaaaagtcaggatatttttcattcccacatcctggacaccttccggcatgcagtagcggcaccgcagattacatcgatccgtgaccgatatccgcaggtaattaattcttcttccatactgatccagcatgtttcttctaccagccttttccaaaaccgcagttcgggtaggtacagaccggacagttcaggcacaaaccgccctcacccagtgctgccagttcttcggctgtaatctcatcatctgctaaaaggcgcggcagtgccagatcgaaaatcgtccgttttgcatacatcacacatcccggaagtcctacgatcgggatccgttcctgataataggacagcaggaacatcgctcccggaagcaccggtgcaccgtaagaaacgatccgcgcccctgtatttttgattgccagcggagtcctgtcatccggatccacactcatgccaccggtacaaagcaccagctcagctccctgttcgatcgcctgcagacaaccttttgtgattgcttcgtgatcatcgtcatacgcttcatggaagatcatttcacagtcatattctttcagtttttctaccagtaccggggtgaatttgtcctcaattcttccgtgataaacttcacttccggtggtcaggattgccacctttttcttatgcagcggcttcaaagtcagaatcggaccgtcctgacagactgctttggcgcgttccatcttctctttctcgatcaccagcgggataattctggttcccgccagcttgtccccttttttgacacaggtatttccatggcgggttgcgatcatcatctctccgagaccatttacttttttcagtttttcccggtctactttcaaaagtccaccctgatcggcgatcagttcgatttttccttcttttacttcggacggatgcatatgatcatttttgcacatctcgtagaggatctgtgccgcctcattttcatgaagcatatgttcatccttttcccagatataaatatgttcttttcccacgctcagaagtaccgggatatcctcctcggtaatgatatgacctttccggaataccgcgtctttcgtcaccccgggaatgatctgtgtgatatcatgacacagaacctgcccgatggcgtcttcggttttcattaatttcatacgtgttctcctcccctactccagtgctccgcagattacttccaacacacttcctgcgatgcagcgggctttgtcagaaatcgtaaaacaattcgccagttcttcttttctcggatcaatatccgcgatcttaaatccttttgtcaccggataattgtcccggatcagaccgcggagaagtccgttgatcgttgcgggtacttccgtcgttcccgcttctccctcgatcacagccagcacctgcccggcttccacgatatctccaatcttacttctatttttcaggattcctgctgccggagcgtgcatcacacgttccgcgccgtatccgccgatgatccctggaatcccggtatttggatacgcactgccctgccggataattcttccaagattatgtccgcgcttcgtctcgatcaccacatccacatcttcgcccgcggtaaacccaggaccaagtccgatggtaagcggtgccatatcttttttcgttccgaggttcttctttgcaaggatcgcatccaccacaaccttcggtttcaaaagccggatgctttccccctccggatccaccaacaccggcactttttcctcatcccatgcctgatgcagctgtcctgtgttttctatcctgacagcctctacattctccacacaggcacttccactgtagacagcttcactcaatgccacctgtcttcgaatcgccgccgggtgatccgtttccagaaccagaagatgaaatccgctctttttcagtcgatgaatcgtcccggtcgccagatcccccgctccccggactatgatcagatcactttttttcatcggatattcctttctttttcgttattctcactcaagaataacgttcacataaatataactttacactactcgtttttatttgtcaattctgttaatgtacacttttttcgctctgtttttctcaaatatgttactttttacaatatttctgatgtgatactttgcagcatacatagattttgttcctatcgttctcatatttttctcttggtttatttctctcgcaatattttccgcctatttctggaaatatttcacaaaagcttttttagcgctctggtttagttcatccataaacatttcatatcgccgcagaaaatcctttccttccccggtaagcatggttcgtccgcctctgctaccgccccggcttccttccatcagggtaaaaccaaggtcttcctccgcgtgtttcataatgcgccatcccttggaatacgccatccccatgcaccggcaggcttctgacagagagcccgtctcttccacatgacgcatcagctccgccactccgggaccaaatgctccttcttttcgaaacacccgcactttcatatgatagtgcagttcattttcttccatttgttactccttttttcatacgttcccgtatttcccggaacttattttgtatactccgcaattattggatctatagttattttatccatagttcaaattattctgccattatccgctccggcaaaacattttcatttgcatacatactgtgaattttcattttactataactccagtacatattccgcttcccagcgatagcctgctttcttgagtgccgtgagaacctcatctctcgcctccggtgctgtcttccaggaaagaccacaacctgccgtaatctcccttggaatcggaatcagacgtcccggtaagttttgctccaaacaaaatttttctgccgccatcgcctgcgttgtgctctcgaaagtcagaatccatgttttctttttgattctcattttttattcagccgtcctgttttttgttatcctcttttcgcatagatgtaacctttacagcaatttagccagctcccacaaagcccctgccgtccgatccatctcatcttccgtattcctatgcgacacagagattcgcaccgccccctgttctgttgttcccagagtctggtgcatcagcggcgcgcaatgtgctcctgcccgaaccgctattccatgttcttcatacagccagtccgcaacatacgccgaatcttcctctcccatattaaaagaaagaatccccacgcgccggtttccgtccggagttccataaaatcgaatcccaggaatctcccgaatctgttcttccagtcgtcttaacagctgtcgctctcgctgcaaaatctcctctgttccctttttcttcagataatccaacgcaccaccaagtccggcgattccatggacattcaaagttccagcttccagatgctccggcatcgccttcggatgttcccggtcaaaactgtggataccgcttccgccaaccttcaacgggcgaatcgccacacccggacgcacataaattccaccggttccctgtggacccagtaaccctttgtgtccggtaaagcaaaagacatcgattccctgtttctgcacatccaccggcaaaattccggccgtctgcgatccgtccaccaccaaaagcagatttctgcgctctgcaacctcccggattttttccagatccgtaatatttccggtgagattggacgcatgcgtaactatgattcctttcgtattttccttcacaagatccggaagtttttcatactccaacacaccattcctgtccgcagaaagaaagctgacttccacgccttcttcctgcagccggtaaagcggtcggagcaccgaattatgttcgcagactgtggttatcacatgatctcctttatgaaacagtccgaaaatcgtggtattcagtgcttctgtagcgttcaaggtaaatgcaatctgcgcaccattctctgcatgaaaaagttctgccaactgctctcttacccgataaacacaccgtcccgcctgcagcgtagcctcatgtgctccccgtcccggatttcccatcgtatgaaaggcacggatcacagccgcttccacctcttttggcttttgcaacgatgtcgccgcgttatccagataaatcatggcttgatgatcagatcggcttttgtcatccgctctgcaatatcatacatattggtgacttcgcctacctgtaattttccggataacccataaaaattcagacaggtaccacaggtgcgaatctccacaccctgctcttccagcattttcagatcttccagcgactgagagccctcacaggtcaggaatgctcccccattataaaagagcatctgatccggcagctcgtcctgctgcgtcagcgcataaataaatcccttcaacaacgtagcacccagctcgccatttccctcgcccatcgttttcgaagaaatcaccaccagccgattcttcttcgccggtgcacatgctacataattttcttcttccactggtgcctcttccgttgcttctgcctctccaaccgtcagcgtcacctgatattcctgttctttcagtttctgcgaaacacagccatagcctttctggtttgccatcttggtcaggttctgcacagcgatctcattgtcgaccagcacctccacggttccggcgccctgcagttctttgatggcttcctttgctttcactaacggaatcgggcagatatctccgagtgcatttactgtttttttcattttcggttcctcctgtgtattttttcatattgatgataaatactattaactatctattaatttataacggacgggtatccttgtcaatgatctcccaatgactatgaactccatgtccggcaaattaaatgctgcccaataagctgttcgtagtaaaatgaacagcaagatttctattctatcatcagacatagaaactctgatgtgtgaattagagcatgtctgaaaaaggcttttcgtgaactgcgagtcccagtttgtgggagattttatccgaatgagggcagcgtaacgggctacggcaaccgaatgagggtaaaatataccgcaaagtggggcttgcagattgcggaaatgatttttcagacacgctccaggtactcagttctttctgggcgaaaaaagaatgacagatacgttttgtatgccggatcattcaagtctctatttgcgccctgccacctgaatctctatgtcttctctcgccatcactttcccgacaatctccgccggaagtccggcctcccgcagttctccgcgcagttcttccgccacctctcccggcactgcaaacagcagtccgccggaagtttgcggatcgtacaatacttcttccatcccgaacgatacattctcaaaccgcacatactgctccagatgattcctgtttttctgtcctgctgcggtcaggagaaattcttctgcgcatgattccgctccgtcaaataccgggagccggtctgcgtagattttgcaggaatgtctgccgtccatcatttcgtgcagatgcccaaggaatccaaatccggtgacatcggtgcaggcgtgtaccgggtattttcgtccgatctcagacgctttgcggttcagtgttgtcatggaagcaatcacctgctccatcgctccttttggtgcctggctgacacggttcgcggcgcagaggatgcctatgcccagtcgtttagtcagaatcaggcaatcgcccggttttgcgccgttgttttcccatattttttccggatctaccacaccggtcacggacagaccgtatttgacatcactgtctgcgatcgaatgaccacctgcaaggcttccacccgcttcctgtactttttcagctccaccctgtaagatctttccgaggatattcaggtccatggattccggaaagcaaacaatattcagtgctgtctttacttctcctcccatggcatagatatcactcagggcattcgttgccgctattttcccaaatatgtacggatcctctaccatcggtgggaaaaaatccaatgtctgtaccaccgcctggtgctcgttcaggcgatataccgccgcgtcatccttgctgtcgtaaccaaccagcaaattttcatcttttttccccttcggaagccgctccaggatgtgttccagcactccggctcccagtttcgcggtacaaccgccgcttttgcagaatacaatttctttttcgctcatattctctccgattatccaattatttttcaatttttctacatttatcgttcaaaccaaaatctgttaaaatttactctgactccaaaacttgtctttaacaagtacaagatctccacaaaataaggaaaattgcatctttattttcacttccgtgcacattccccatcttctcccagaagaatatccagcccgtgtcccagtgaactcagtatgtaagtaagactctcctctaccgccttcgggcttcccggaaggttgacgatcagggtctgtttgcggattgcgctggctgcgcggcttaacattgctctcggtgtgatcgtcagactgtacgctcgaatcgcctctgcaatccccggtgctacccggtctgctactgcgagcgtggcttccggcgtcacatcccgcatggaaaatccggtaccaccggttgtcagaaccagtgcacaatgttcctcatctgccagtctgcaaagttctttttcaatagctgcctgctcgtccggaagaatccgataagaaaccacttcatactgatcgtccggaagtaattcctgaatcttcggaccacttagatcttcccgttctccacgggagcctttatcgctcagcgtaacaattcccactttatattttcgtttttccattctgttcacctgttactattccctttccttttttcttcatgtgttctgttcatttatttttttctgacgtaacgtaatctttttcattttttcttatatgttatccattttcgtttctgtaatgtccgctctttccgcccatcttttccaccagatgaatctcggaaatcaccatgccgcgatccatcgccttacacatatcgtagatcgtcagaagagccacgctgactcccgtcatagcttccatctccacaccggtttttcccacacaggatgtccggcaggttaccgtgatctgacgggttttctcatcgagtacaaattcaatctcacagtctgtcagtgcaataatatggcacaacggaatcaactccgcgttctttttcgcccccatgattccggcgattctcgcgataccgagaacatcccccttttttgccgtgtgatttgtgattgcctgaaaaacctcctcgttgaccgtaatcgtcccctgcgccaccgctacccggtaagtgtctgccttttcatgcacatccaccatcacggcatttcctttttcatcaaaatgtgtaaatccactcatgatattctcctttgtttacccctgtcaattctaataatcagacgtcttctgtatgaagtgaagttcctgccatctgcttttcagggcttctattatatctttaattttaataattaatttctgaattttctactgtctcaaacagtctttctcataataaagaatcagtaatacctgctaagtaacaagtaacatgctttcattttcagcataatttgaatcaattgtaattttcaaatctatactatactgccgccttaaaactttacagttgctccccccgctcgacagttacgtaattttgtcaaaaccacattctccacgccccatccacgcaacatttctccgatccgttctcctccctctctccgcgtatcatcgtcgcactgattcaacacagccacatattttctccctccgacatctttccgaagcccttcctcagatgccagaatcttcgccatatcctcacagctcagcagatgatcctcatccgcctccaacagcttttccgcctcttccagccgaaaacaacattcctttaacggttgctccaacgccaaaagtcccagaactgcaatcacaacctctgtctccggcaaaatgaccggttcgtgcgtggcgggtactttacagggcagtcgttttgatccgtctgcttcgatcaggacgaaatccgcaagtgccaccgcctgtctcatccagtcgggatccggcatttttagtttctgtggctgcttcacttccacctctccgatcaccgcccagtctcccgcgccccagatacgttccagatcttccggtgtccgtgccagtttttccggctccggtcggaaaatatgcgtggtcgtcgttaccagtacctttttcccctgcttggttccccaggctgccataacttcgatcagcgaacttttcccgcctgcccctacaaaagaaaaacaatgtctatctttcgtaagagtcgaaaataacagatgcgactcgaccttttcactttgtttcttctccagattatatttgtaaaatttctgtatcaattctttttccatttttaccaacagaacgatagcttttcaaacttttcttccagttcactcctgctgcccttcccattgtaatcaacctccaaaaccagctttccttaagtttaccaaactcccccaaaaaagaaaagccactatcccctaccggagataatttctcatcacccgcagggcatttttctccagacggctgacctgtgcctgggaaatgccgatctcctgtgctacttccatctgcgtcttgccctcataaaaccgcaggttcacaatatgacgttctctgtcatttaaccggttcatcgcatcctgcaatgccagattttccacccagttttcttctttgtttttcttatcactcacctgatccatcacatacagggtatctccaccctcggtatacaccggttcgtacaggctcatcggactctggatcgcatccagggcataaacgatctcctctttttccatcccgatttccgatgcaatctccataatcgtcggttctcggagattgtttttcagataattttcccgggcatagatcgctttgtaagccgtgtcccgcagtgaacggctgacccggatcgtactgttgtcccgcaggtatctccggatttccccaataatcataggtaccgcatacgtggaaaatttcacctgcaaagtcgtatcaaagttatcaatcgccttcatcagcccgatgcagccgatctgaaacagatcatccgcattttcattgcttccggaaaatctcttgatcacgcttaacaccagtctgagatttcctttgatgtacagttctcttgcctctttgtcccctttttttatcttttcaaagagcaattctttttcctcattggtcagtaccggaagcctggatgtattcacgccgcagatctctaccttgttcaatgccataataagaatcctcctaattgtatttgtttttacaactaaaatgattctcagctggcaaactgtctattcatttccgacaaaaataaaaaaagttttactccttgacagttcttcttatttccgtcttttcgaaccgtaactttttgtgctatactgtttttattatgtttcagaaagatgaggaaatccactatggcagataacaaaacttcacatacagacgaaggtttacaggataacgaacagatcgaacaggcaattctggcattgcagcagcagccgtcccaggaaatgcttgcccacgcgctcaccgtactccgcagacggatgcttgctcacggacagctgatcgttgcagtcgaaccaccggttggcgacaaccagatgcgccttcaggcgatccagaccgatgacggtaaaaaatggtgggcagcctttaccagttttggcgaggaactaaaaggcggcggcagtgtgatgtctacctttctcacagatatcgaaaaattatttctctccgccctttcggtagaagaaatcgaaggagtgatcatcaatccttggaaccggacgctgatgcttgataaaaacctgatccgtatcgtccgcggatgagccaaaccgatttcttagattgattcattattatcattctatatgtaataaaacagcatatatcttctatgcgaaaacctgatattgctatagtcatcaggttctcatgcaaatcttgacatttgctcgttgtacacataaaaataaaagagtttttgtctaataaacaaactgctccgtttattagacagaaactcttttttatcttatccataaaaaacattgttcataacaaaaggggttaccgaaccatcgattttccaccacgctctgctaaattaatattccaccccagccagtgtcaccattttcttcatacacatcttattaaacagcgcgatcacacgtcccacaccaagaaccgcaaccaccgttccgattcccacgccgatcagtttgtgagcaaacacgaggctcaccgtaatcgtgatacagatattgcacagatcaaagcagttttttgtaaatccaaccggttttcggatcgtatctgcgattgcctgtacgattccgtctcccggatttggcacgattcgcatatttaaggacattgccgctccaattcccgtcaggatgataccgcaaagtagtacaacaaatcgcatccccacctgttccggtgccgggatccaggaagaaaacagattcataaaacgggtaaataccagacttaatggcagctgtaaaagatccatacccagaatcagcggcaatgatttcttcgttgacgcatccagcgcatgattttcttctctccgctgtcggtaattatggcaggtatgtaagagcagttcgatgataacaaacaccgtgtacagcccgaatgtcgtatttccaaagttcaggttccatatagtagaaatactgtaagccacagaaatgatcggcgaaacgccaagacctgatttggtattcagaatgatccccatcgccaggatcagaagcccgccggcatagaaaatccagcggaaagttgtactttttttcattttccattcacactctctttccggagaatattgtagcacacttcccgcatttttttcaaattcttattttttcacacaaaatttcgcacaaaatcaacgttttcccacacatcaccggcaatccttatcctttatccaatgcgcaaaaattccctgcccggacaggcattccattatcgccttatccggacagggaatctatatttacctatctatgtaactgctccgtcacacacccttatgcattcaggatctccagaactgcaccgaacagtgccgggctcaggttcatggttgccagtgttgcaacaccgtctttgcccatcttttctacgattgcctgaatatcagatttcaggttgtacggaatctgagctttatcaagcattgcatagcagcgtccggccagatcgttttctgccagagatataccgtctgtaaatgtgatcacgatttcttttcctactgctgtttccggaacttctacagtcagagctgcaattgctttgtcataggaaacttttacagctacttcttcaccgtctgcggttactttgcagcatgctttttctacgcccatgaatactaccttccagcttctgctttccggaatcacagatacgttacccagtgctttgccgatggtaaaggtatcttcttctccgccggtaaatgtcagctgtgtagctacccagttttcttctttatcaaccggggtatctccctggtcttcccacagagtgaaggttccgtcttctgccgggaatacacgaacttccatagctttcgggttatcggtgctgctgtcataatcagccatatctttcatcggaacgatagctcctgctttcatcagaacaggcatatcttctacacctctccacagatcgatcatacggccaccctggtataccatacccgtgaagaaatcaacccacattccttccggcagccaggttgttactttcgctgcacgaacttccggatcctgtttctctgtgatcggggataccagcaattcagaaccgaagtaatattcattcggaacctggtaagcctcgtcacgatccggctccagataatacattggctggatcagcggcagatcatcgtaatttgctctgcggttcatggtgtacagatatggaaccattccatgacgcagacgcaggtaatcttccataacaccctgtgtgatcttgtcaaatttccacggttcttttccgttgaacggattatcggtgctgtgcagacggttaatcggagagaatactccgtattctacccatcttgccatcagttcatcgtcacggatacccatcatatggccaccgatatcatggctccaccatccatatccaacgttgcttgctgtattggtaaaatatggctggaactgtaagctttcccatgagattacactgtcacctgagaatcctaccggatatctgtgacttcccacacctgcatatctggagaaagtcagcggacgattacccttccagctgctgtccagataatgataatggttcagcatccacagcggatccagtcccggcactttggtaacagttccctgctgccagtcaagccaccagaaatccacgccttcttcttccagcggatgatgcagatctttcaggtacacttccatgaaatgtggatctgcaggatcaaactgtactgcaatctcactttcaggatcgattcccatcttttctgccacgcgcggatacagttcctcatatgcacggattccgtcagccggatgcacattcagtgtaatcttcatattgtgctcatgcagccaggacataaatccttttggatccgggaagaagtttttgttccaggtatatcctgtccagccgcttccgtatttcggatctacatcatcaacaatatgccagtccatatcaacaacagctacagagaacggcagtttttcgtcttcaaaacgttctaccagttctttatattcctcctccgtgtaacgatgataacggctccaccagttaccaaatgcatatcttggcagcagcggctgttttccacacagataatagaaatctttcagactttccagataacgatgtccatatccgaagaaatacagatcctcgccatctccctgtctcggacttacccatccgtcttctgtcagtgccatcgaatgactgtcatccacaacagcaaagccttttcttgagatgataccatgctccattttgactttaccgctgtatttttcgttcatcggtgtgtcacccttcaaataagcatcatcactcagtttcatagcaccgtcgcatccgtccagtgtacgggctgttccaagaagatcactcggttcatctccgtaattccagtttcttccccagccgctaccgccgcctacgactttgatagacagaccgtttgctgcaaatggttttctgttgtaatgaatctccagagaatctgtataaataaccagctcttcttcatcctcaacgaccttgaattccggtaccgggaaatcacggttcagtacggactgtgttgcacggtcctcgaatacaccttcgctgttgtattccagacgtaccagtgcagatgtcagcatcgtgattcgataacagtctccctgaataatcgcttcttttttgcttaccggatgtgcttccagcttatactcttccattcccatgtttgtaaaaacctcctttaattttttattttgtaactgtgagaatactgaataattatagtttaaaataaatatactataaaaatttggagaattcctctattaaactgacaaaaaagtatattattttgacttttttgtcctgccttttattataaggaagaagcgattttttcagccagtgcttccagggatgcttcctgtgcttcttttaccgcagaacggatcgttacaccttcctctaagagttcaatatttttcataccggcaaaaatttcccgcatctgtcttccggcaaccggtgcccaggtcccgttttccatgatggctacagtacggttctgcaaactgtgtgctttcaattcagacagtacagtctccatcttggtaaagataccgccgttatagctcggtgcggcaaataccagatggctgcaacggaaagattcggatacgatcaccgaaggatctgtcacagatacatcgtacatggcgatattctttacacctttatctgccagttttgatgccaggatctcagcggcattttccgtattgccatagatggatgcataggcgatcataactgcctgatcctccggtttgtagctgctccaggtatcgtatttttcaataaaccatccgagattctctctccagaccggtccgtggagaggacagatcattttaatctccaaggtagctgcttttttcagaagattctgtacctgaacgccatattttcctacgatattaataaaatatcttctggcatcatccagccagtctctttcaaaattcacttcatccgcaaacaggtttccattgattgctccgaacgttccgaatccatctgcggaaaacaggatcttatcgacagtatcataggaaaccatagcttccggccagtgtaccatcggtgccatcacgaaggcaaaggtatgttttccggtacacagagtgtccatttcttttacaatcacagtacggtcttccaccgggaaattaaagaactgttttaacataggaactgttttcgcattacataccagttttacatccgggtatcttctcaccacatctccgatgaccgcgcagtgatccggttccatatggttgacgatcaggtaatccagtgtccttccgttcagtacatattccagattttcaaaaaacaatccgctgatggatgcgtccacggtatctaacagaaccgttttttcgtccagcaggacataagagttataagaaactcctcttggaatcgggtatacattttcaaataatgccagtctgcggtcgcttccgccgatccagtataagtcatccgttacttttttcacacaatgcatggtgcaactcctcactttcgcttttgtttttctatattatactgttttcagacatttctttcaagcgctaaacatagtttaactgtttattcatagcggacaatttctttttttaaccgcaccatgatccttttttccagtctggagatgtaggattgagatattccgagaagatctgccacttctttttgcgttttttcttttccatccggctgattcagcccgaagcgaagacagatgatcatcttttctctggcatttagcttgttaatagcttttaccagaagcttacactccacctcgtgctccagatccctgtagatcacatcttcgtctgttccgaggatatcagaaagcagcaactcattcccgtcccagtccacattcaacggttcatcgatggagacttccatgcgggttctgctgtttcttctcagatacatcaggatttcgttttcgatacagcgggacgcatacgttgcaagtttaatctttttttccggattgaaggtgttgattgccttgatcagtccgatggttccgatcgagatcagatcttccattcccacaccggtgttatcaaacttctgtgcaatatagacgacaaggcgcagattgtgttcaatcagacttgccctcgcctgctggctgtcctcttttgtcagactctctatcactgcggattcctgctggggagataacggatttggcaggacatctgctccgccgatataatagatctctcccggctttctccacatcacacgggaaaaacccggtaacatacgcatacgaaaatgactgggtaatgctgcctgcatcatagaatttcctcctaactgtctatcagatttggatgtaaaatcatctgacagtccccgaaataagaactgtcctctcctgaaaaagcgaccaccggatggcggatcactttctgtacttcctcattctccaggtacatggcatccaatgtgacagcgaccagtaacccggatgaacagccaaggctggaaaagaccagaaaatgcggatgcagtctctgaaaggacacatcctgtccgctttctgcctttcccatctgaaattcccgtaatttttccatcgtatctgcgtcgcagagcttttcgagcgtttcttttcggatgatgctcaccggtctttgcagtaccgaatcatacaggccgttgcccgtatcaaaaaatgcatccacttctgtcctgtgctcttccatctgcaatttcacccgacagtggatctttcccttttttctccaccgcgtatacagggaaaatacagcagcatacgcaaggtaacagacggttcccgcgagcagcacttccgacattctgtccagtccaaggaagcgcttcagaacttccatcatgcctcccatgagaaatcctgctatgtacagccccgcgactcctccgcagagtccttttatcgtccgcagtccgcatccgaaccttaccatgatcgtgttgattgccacatatgccagtatcgtattcaccggaaggctgacaggtaagaggatcagcagacagtatccaaacgctccgaaagccgcccctccaagagaagcaaatactcccgcctttcctctgcacagtttttttaccagtctcagtaagagaaaatccatcaccagattcgtaacaaacagtacgtccggatagatcgtataagacaaaaagcaccccctgtcccacctggaatacttaccggaaaacaagtattattatatggaaccgggagtgcttattttgtcaaaaacgaggtgtcgaacgacagtttcgctcgacaccccattcctggtttttcgctttttcgaaatttttatacatatcccttccgaatcagcggtatattttcctgctttttgtatttatttgtagagaattactcttgtttcatatggctgcagaacacctgctacatggtttttgtagttagtgatcagttcttcgccttcttttccttcgaacagatcgcaaggtacttctttgtttgtaaagttacaagctaccaccagtttctcatcgcccagtgttctctcgtatgcatagatatcatcgttgtcttccagcagtccgtggaatacaccttctacgattacttcatactgatgacgcagctggatcagtttctgatagtagtagaatacactgtccttgtcttcgagtgctgcttttgcattgatctgcatatagtttttgtttacgctgatccacggtgttcctgtggtaaatccggcatttgcgctgtcatcccactgcatcggagttctggcgttatcacggctgaccatcttcagacagttcagcatctcttcttctgtcatcagaccgctctcggtatactctttgtatgcattgatagcttcgatatctttgtaatcatcaatggatttgaaatatgcattagtcataccaatttcttcgccctgatagatatatggagaacctttcagcatatgcaggcaggttgcgatcatctttgcggatacctcacggtacatcgggctgtcatcaccgaatctggatacggcacgcggctgatcgtggttatcccagtacagactgttccatgcttttccttccaggtcattctgccatttgttcatgaccgcgcggacttttttcatttccggtttcttagtggtccatttgccgtattttccgtctgttgttcccatgtgttcgaactggaataccatgttcagttcgcttccatccagatttgcatatttctttgcttcctctgtggtaacacctggtgtttcaccgacggtgatcagatcaaatttggaaagtacacgctggttcatttcctgcagatattcgtgtacatgaggtccgttgcatacatatggtgacatatcgccgtgcagtccatcacggatttctccgtccggatatgcaggatctttggagatcatgctgataacgtccatacggaaaccatctacacctttttcacaccaccaggtcatcatgttaaatacttcgtcacgtactaccgggttctcccagttcagatccggctgttttttggagaagcagtgcagataatacattcctgtttcttcgtcaaattcccagacagaacctccgaagcatgctccccagttattaggctctttgccgtctttcggatctttccagatatagtaatcacgatacggattgtcttttgattttttgctttccaggaaccatctgtgttcatcggagctgtggtttactaccagatccatcaccagtttgatgcctcgtttgtgcatctcagcgatcatccggtcaaagtcttccattgttccgaaatcggtcatgatatcctgataatcggagatatcatatccattgtcatcgttcggggatttatagattggtgacagccagatcacatcaactcccagttctttcagataatccagatgtgcggtaataccattcagatcgccgataccgtctccgttgctgtcggcgaaacttcttggataaatctggtaaataacactacttttccaccatactttgctcatatgtttgtcctcttttctttcttccgaaaattttctgtattttcagactcgttttcatatatattcaggatactatatttcatttcacatttcttgtaatatattgctatttttttatactatattcactttctgttgctctgtttttgacacctatgtaatatctttctgtatgtttcttccctttttcataagaaatacacaaaacagagcaatcgttactgttcactccgatcccggtaacacgcttcgtgggatattaccaatgaacagtaacgaataatccacgatatccctgtgatccatgcgtcatctctttcttttttgaaaatcatgtgttatctttagaatataaacatagcattttgagataattactcgattaaattttaattaaaggactgtatttacatgaatagcttatcttatcacgaaagtcactctcatggttctctcggtcttccgtttcaggcatactctcaggaagatccttacgggcaatactttgtgccatatcactggcatgaggaagtggaatttatatatgttaccaaaggaagtcttgtacttcgtacccagaaccgtacccggctgctccaggaaggacatatttattttattaatcccggcacactgcacggactgtttggaaacagtccgttttcccaccattatgcgctggttttccggttggatatgctgaattttcttcagacagattcctgccagacctcttatctggtacctctttgctccggaaaatatctgtttcccgatagtgaagcacttgctccggaactcactgctcagattgctgcactcataaaaaaagcagccgacgagtaccgaaactgcgatacctcgctgactgccgctctctcgatcaagatcacgctgttgcagattctggaactgctgtttgccagccagtcctttatccccggtacacaggcaggagaaacttccggtgatgtgaatccgttaaaagctgtattttcttatattgaatctcactacggagaaaaaatatctctggaagaccttgccggcacaattcatatgaaccggaattatttctgccgtttttttaaagaaaaggcaggaaaaacaccgttttcctacctgaatgaataccgggtcaaccaggcggcctcccagctgctctccacccggcttcccatcactgagattgcattaaacgccggtttcgaaaatatgagttattttatccgtcagttcagacgttgcaaaggctgtaccccttctgcctaccggaataccgaagaccccaagtctctgccgattccgttctgacattctgtatctgtttttccgtcaggcagccacctgtttttttgtgcgggttacccattggaacacaatcacaaacagcacacctttaacaatggaagtcgatgacagtgcccaccagataccgttcagtcccagcgaagtccctccaagaatgatcgccagcggtatccgggcactggtaaagattatgctgatcacactgcatagatgtgtccttcccagtccggaaagcgctcctactgtcgttgtctcaatacataaaaaggcttcgctgaatccaacgatgatcagataatcaaccgctgtggcaatcgctttcggctcatggaagaaaatatttgcgatcggacgcggaacacacacaaacaacagcgtaatgaaaatcccccagattccgactgtccactgagatgcccgatatcctttctttacacgccccatctctcccgcaccatagttctgcgcgataaacgcatttaacgcggtggcgaatccgtctgccgtattccaggatatggattcaatctgtcctcccacacgctgtgtggcgatggcttctgcaccaaaggccgataccatgcgggtgattaccatcgatatcacgcagtatgccattccctgtatcgcagtaggaattccgattttgcagatcccgttcagatattctgccggaatttttgcgaacagggtaataccttttaatacattttctttcttctgtttcacgattccaagaatcatgatactcataacgataaactgcgccgttaccgttgcaatggctcctcctgccgcacccagtttcggaagcggtcccggtccgagaatcagaagcggatccaggatcatattcgtcgccagaccgatcaggttcgcataaaacggtgttttcgaatctccctgcgccgtatagataccggtcagtgtcaccgacaaaaatgaaaagacgatcagtccgcaggcaatctttgtgtagacaaatgccgccgcatacgcctccggatcctccagtttaaaaaatccgatcatctgctttgtaaaaataagtacaaccagtgcatacaccagccccatcaccgttgccagctgaaccgccgcctgggcatacccatgagccttttccttatctcctcttccgacacactgcgccacctgcacctgtccgcccattcttgccatagatgcaaatccctgagacagccaggtgaacatgcctccgacaccgataccagccactgcttttgagccgagcagtccgatccatgccatatcggtaatgttgtataaagttcccagaaaggaagacgccatgatcggtatcgccagtttggtcagcgtcttcagaataggccccttcgtcaaatttccttccatgtaatataattctccttacatcatatttttctttttgtgcttcatccactatttctctgattttatgcttcccatggtgtcggatctttctttaaaagttccggaaacgtgatcatcgccggctgttttttctgatgttcgccgattattttctccatccacaccatgttataccaggtatcaaacttatacccgcactgatagaattctcccaccagccggtatcccagatgatgatgaaaatccatgctgttgcggtcaagatgttcatccggcacttctggcacaccgatgcaggcattcagatttgtgatgttctgctttttcaacacctgttccagcgccgcatacatcttccttccaagttctctctttttctgatcttcccggatatagatcgtcgtctctaccgcccagtcgtaagcagaccgctcattgaatgtccctgcatacacataccccaacagctccccgttttcttccagtaccagatatgggtatttcgtcagaatatgacggatccgtccggcgaactcttcctccgacggtacttcatattcgaatgtgatcgctgttttctccacataaggcgcgtagatctccagaagtccttttgcatcttccggctttgccacccggatcgtcagttcttctttcatgctatccctctccttttttcaaacatatgttttatcttaccattccaccgcccgatatgcaatgtgaatccgtattacagtcgttttttcttattttaataaaatttaaaataaccgatagattttttttatcataccgaaaataatacgaattagtacttgttatgcttttgttatacaattaacacatacatgatacccaaacgtcaaaaagtcggaagtctgacgcaggcttgcttgtaggaagatttctgaccttgagactcgcaagaaacatgagtaagtagccattttttaagaaaaatgcgcagattacgaatgtttttgaggattgggagagtacgaagtacggaacaatccggtatcaaatggggcaaaacactttttgccccatcacctacaaaactctcagggaggtttctttatgaaaggcaattatcagcatatcttcaccccattgactgtgaagaatatgactatcaaaaaccgtatcactatgatgccgatgggcaccaactatggtgaacagaacggtgaaatgagttttcttcatattaattattacgaacagcgtgcgaaaggaggtaccggtctgatcatcgtggaaaacgccagtgtggactctccgcagggctccaacggtaccactcagctgcgtatcgatcatgacaactatctgcctcgtctgttcaagttctgtgaaaatattcacagatacggaacctgcattgccatccagatcaaccatgccggtgcttccgcagtatcatcccgtatcaacatgcagccggtgtccgcatcggatataccaactaaagacggcggtgatatcccgcgcccgttaacaaaagaagagatcctggatatcgtaaaaaaatacggacaggctgcaaaacgtgcgcagatcgcaggttttgacgctgtagagattcatgcaggacactcttatctgatcagccagtttctctctcctaccactaacaaacgtactgacgaattcggtggttccgtagaaaacagaacacgtttctgccgtatggtcatcgaagaagtcagaaaacaggtaggacctttctttccgatcctgctgcgtctgagtgcagatgagatggtagaaggtggaaacacactggaagatactttgaaatatctggaatatgtacaggaagaagtggatatcttcgacgtatcctgtggtctgaacggatccatccagtatcagattgatgccaattatatgaaagacggatggcgttcctacatgccaagagctgtcaaagaaaaattcggcaaaccatgtatctccatgggaaatatccgtgatccggaagtggctgaaaagctcctggctgatggtgatgcagatctgatcggtatgggtcgtggactgattgcagatccggaatgggtaaataaagttgcaaccggtcacgaatgtgatatccgaaaatgtatctcctgtaacatcggctgtgccggaaaccgtatcggcttcaaccgcccgatccgttgtaccgtcaacccgtccgtactggaaggcgatatttacaaaaaccagaaagttaataaaaattgcaacgtggttgttatcggtggcggtaccgcaggtctggaagctgcctgtacagctgctgaagtgggatgtaacaccttcctgctggaagaaaaagaaacactgggtggcctggctgctgagatttccaagatcccggcaaaaaaacgtctggctgattttcctcactacctggaacatcgtgccgctgctctggataatctgtatatctttaccggaacacaggcaacaccggaaaatatccgcaagttccatccgaacctgattgtcaacgctaccggctccggtccgctgcttcctccgatcaaaggtctgatggacaacattgacaaagaaggtggaaatgtttattctatcttaggtatgatcaaccatatcaacgacttcccggaagatctggaaggcaaaaagatagctgtcatcggtggcggtgccgtaggtctggatgttgtggaattctttgccgcacgcaaagcagatatctctatcgttgaaatgatggatcagattggccgtgatctggatccggtaaccaaaaacgatatgaaatgtcagatgaaaactcacggtgtacaccagctcacccaaactgctcttctggaagtaaaagagcattccttcctggtaaaaggaagtgatgggtcgtacgaacttcctttcgattatggattcgtatgtctgggaatgagagctaaaggtcagctgtatccacagcttctggatgcttttgccgatgacgatgtggaaattctcaacatcggtgacagccagagagcacgtcgtatcatcgacggaaccatggaaggaagaaatatcctttatcatctgacccagagaggttacctggattaattaacaaatcaatccatacttcaatctaaccatcctatatcggcggatcttccgccggtattgatgataaaaagaaagcgtaattgttccgtgcttgcacagttttgaataattacaggaaaggacaaaaatcatggcagaaagaatcacaggacacacagaacttattggactgatggcataccctattcgtcactccagctcaccggcaatgcagaacgaagcatttgcaaaattgggttacgactacgcatacctggcattcgaagttggcgctgatgaaatcgaagacgctgtaaaagccatccgtactctgaaaatgagaggatccaacgtatccatgccgaacaaaacactggtaggacagtatctgg

SEQ ID NO: 2551 - DNA, 43310 bp, Unknown
  gut microbiota DNA sequence
catatcacagacggtatcggatttatgcaggctctgaaagacaacgatatcgatgttatcggcaaaaagatgacaatcgtaggtgccggcggtgctgctacagccatcgaaatccaggcggctctggacggtgttgcagagatcgtaatcttcaaccgtaaagatgaattctgggatcgtgcagtatctactgtagaaaagatcaataccagaacttcttctcatgcagttctctacgatctggcagaacttgacaaactgaaagaggaaatgaacgacagctacctgttcgtcaacgctaccggtgttggtatgaaaccgctggaaggacagtccgtagtaccggacaaatcttacttccgtccggagctgatcgttgtcgatgttccttattctccactggagacaaagatgcgttccatggcaaaagaagttggatgcaagaccatgaacggtctgggcatgatgctgttccagggatctgctgctttcgagctgtggaccggcgaaccgatgcctatcgaacacatgaaagaagttctgaacatcaaatacgactaaaatgtaaaaacggttttcgagaaaggaaaacactatgaatactgtaaaagtaagaaacattaccatcggcgaaggcagaccgaagatctgtgttccgatcgttggtaaaacccgcgaggaaattctcaaagaagcagccaccttctcctcactgcctgtagatgttgcagagtggcgtgtagactggtacgatgatgtcttcaatacagaggaagttctgaccaccgcaaagcagctgaatgaagctctgggtaagattcctgtactcttcaccttccgaacctccaaggaaggcggagaaaaagaaatctctccggaacagtatgcacagttaaacaaagccgtagcggaaagcggctatgtggatctggtggatgtggaagcacttaccggggatgagattgtgacctccatcatttctcatgcccatgcaaatggcgtaaaagtcatcgcttccaaccatgactttgcaaaaactcctgagaaagacgagattgttcgtcgtctcagaaagatgcagactctcggtgcagacattccgaagattgctctgatgccgacctgcaaaaaagacgttctgacactcttagaggctactctggagatgtctgaacagtatgcagaccgcccgatcatcaccatgtctatggccggaacgggtgttgtaagccgtctgaccggtgagacctttggttccgcactgaccttcggtgccgcttccaaagcttctgcacctggacagatcggtgtccatgaattgaaacaggttctggacatcattcacaaaagtctgtaatacagaaaataataaagctttaaaaacataatttcaaattcctacctatttcataatccttttatataataaagataaaaagagaagacctgccgtaatttccccttaccacaggccttctctttttgttatctgctttttacgttattctgtattttgctttactcttctcctgtttttactatcctaaaacagacgctcctattccatgaataaaatacgtaaaatacaatgcgagagatgttatcacataattcttcttgctgttctgtttcattttttaccttattttattttgcgttttccgcctggaactttttatattcctctactggcatatccagaccggtatataatttgtaggctgcaactccctgccacaggagcatgccttttccgccgatggtctttgcacagccggcttctcttgcttcccggaggagtcttgtttcttccggattgtatacaacatcgcatactaccagatccggacggaatacggatttgtccgtaatcagggaaacatcttcatgaggtttcatccctgccagtgttccgtttaccagaatatctgcttttgcgatctcttctttcagtttgtcctgatcttcgatacagaatacctgaacatcgcaatccggtacttcttttttcagctttgcagctgtattttttgcgcgatccaggaaaggatcgttcgggttaaagatggaaatagatgctgctccgtccagtgcacactgcacctggatcgctgttgcggctccacctgcacccaatactaccattttctttccttttacatctacaccgtggtctctcagattttcaacaaatccgattccgtctgtcatatgaccgaccagttttccgttttcgttgacgattgtattgactgcaccgatgattcttgctgcatcggataattcgtccatgttctgtgctgctgcggttttgcacggcatggttacgttgcatcctctcatgttaaacagacgcatggcatccagcgctgccggtacctgatcttctttgatatcaaaagccatgtagcaataatccagattatgatagcggaagcagaaattgtacatatccggggatcctgaatgtcctaccgggcttccaatcagtgccaataatcctgttgttcctttgattctctgttccatcttcttttcctcctgttttgggtctaaatctgagatgccacatcgtaggcttctttcgttgcatccagtgcacgtcttgcacggattgcatcaccgattacataggtatccggtacgatagctttcacctgttcttcaagaggattataatttctgtaacccatggaaagtacaacggaatcgtagcctctggcctcgtgatgttcgccgtctgctgtctcatactctacgccatcttcgaagaatctgcatacttttgccccggtaatctgaccgataccgtattcttcaaaatctttcatcagatatactctgtgctcgtggatcacatctgcacctacggtatctctgaattcaataactgttacctcatggttctgttccccaaggaaggctgcggtctcacagccaaccattccgccgccgactaccagtaccttcttacctgctgcacgttttccttccagcagatcagatccgtaaataatagacggattgtcaatgccttcgatcggcagtaccagtgtcttggagcctgttgcaagaatcacgctgtccgggttctcctctttgatgaagtctgctgtcacctcgtggttcaattttatctcaactccgtctttttggcaacgatgaatgtagctgcggatcatgtttgtgatatcaccttttcccggcgggtaagcggccagtcgcatatttccgccaagcttttcgcctgcttcgtataaagtaacctcatggcctctttcttttgcgacaaaggctgcacacagaccggcaacaccgccaccgattaccatgatcttcttcggtgtttctgcctgttttaacggttctgcatcatgacccaagaacgggtttgtcagacaacataacggttttcctgcatacatatttgccacacagccctgcagacaggcgatacacgggatcatatcttccagacgttcttcttttgcttttttcggcatatgcggatctgccagactctggcgtccgaaagctaccagatcgcagcgtccttcttttaccatcagttctgcgaactgcggttcggtataacggcccactgtgataaccgggatgtttaccgcacgtttgatctcttctaccagttcagcggagaatccaccatggatcacagtcggtgcccacatatactcatctttgatatgaacggctcgtgagacatggatggcatccagtccacaggattccagataagcggcgattgctgcgctgtcatgtacatccagaccgcccggaacttcatcatcggaattgattcttgccagaacggcaatctttccttcggtctgtttcttgatttcttcaataatcagtctggagaaacgcatccggttttcaaagcatccgccgaattcatccacacgcttattggtgcgtggggacataaaagtgcttaccagatatccatgcgccatgtggatctctacagcatccacaccggcttccattgctcttcttgctgcttctccgtaaccttttaccagctcatacacttcttcggtagataattctctcggaatatctcttccgcaggctgccgggatactggtagctgctgtgatcggtgctcctgcattttttgcatttccttccggacctgcattctgcagctgaacggaaacctttgcaccttctgcatgacaggcatctaccacctttttaaagctttcgatggtagaatcatcatacagacatggttttctcgggccacctttggctcctttatgtacaacagttgcttcgatggtgatcagtccgaatccaccttttgcacgttccctgtagtaagcaacagactgttcactcatggttccgtcggtgttggcaaagttattgcccatcggaggaactacaaaacggtttttaaccgttaccggtccgatctgaatcggctgaaacattgcatcaaatttcatatctgttctccttttcttagttcagtacttccggccacgcctcttccagtactttctttgtattttcataagtatgttttgccgcatactcgattcctttttccagatttgcatcgctgattacctctacaccaatagcgtttggctcgatacctttttcacggatcatctttacaaatgccgctgtacatccgataccggttcccggtgccagacggtcatgcatggattcgtcccttaaaatcgtagttgcatacggtctttcccatacatcgttgatctggatggacacgactttgtctgccggaacatctgtcagtacggaaatatctaccggctggtttgctcttacccagtgccaggtatccagtatcagtttggcattttcacagtctgccgcctttacaacagcccatccttttttcacatccgggataccactgtatggcattggttctacaccgataatatattttcctgctctccggcacagctcacgcagtttctgtgcagtgtattccacagaatagttttccatcagaccacagttgatctgttttacgttaaataattcacacatatggaagcacagctgctctttgtatttctgctcataagaacgatgctcttctgcccactgtacgatgtactccacttctgtgactttcatatcatatttgtccagaatattcaggatatcctgatcgaacagtccctcatttaaggcgtctacataggtttcagcacgaagaccgataccttcgtatccggcattctttgccgctgcaacacgctcttcaaaagtacactgatctcccagtgtccaggaactgaccgtaattgggaatctctttgacatagttttatcctcctgaaaaatcattcgtttcattcctttttcttacttgtgattatatatctttgttaaattcaaaacaaattgattgtatttgagtattcatagattttttcaatacatcgtgttatactgtaaaagaaaattgtaactagtacagcgtttcataaataactataccatacacgcaggatacggattcgagtgtgcaggtttaaaaacgtaggcgtagcgggctacgctgaggcttttaaacctgtgcaatcggattcgtagacaagtgtattgtgtagttattttgaaaacgctgtactagatgtatctcagacagttacttcttgtttgcggaggatattttttactaggaggtatatctgtttatgaatctttatcatttacgatactttgtgacactggcacatatggaacattatacccgggccgctgaccttctggcaatcacccagccaagtctaagccatgcgatttcatctctggaatctgaactgggtgtcaaattatttaaaaagaacggaagaaatgtcactcttaccaaatatggaaaatcctttcttacggatgctgaggatgttctgcaaaagctggatgcttccgtgggcagtttacagcttgccggaaaaggagaggggcacattgatattgcctttctgagaactctgggaagtgactttgttccccggatcctgcgtcgctttctggatgaaaatcagggaaaacagatcgactttgctttgcactgcgataaagtaatcacaaatgagattctgaaaggcataaaagaacagaaatatgatatcggcttctgttccaaaatcaatgatgaaccactgattgaatttatcccggtcgccaaacaggatcttgtagtcatcgtgccaccggatcatccgcttgcttccaaatcagagatccatctggaagagacactcgagtacaagcagatcatctataagagtggaagcggtcttcgacacatcatcgatcatttattcgatcagattggtgcttatccggatgtttcctatgagattgcggaagatcacgtggttgccggttttgtcgctaacggtttcggaattgctgtggcgccggatataccgatcattcattcgctgaatctgaaagttctgcccctagtttcgccgacctggcaaagaaacttttatatggctaccttaaaagatgcctatcatccgccggtggtggatatcttcaaacagtttgtcattgaccagacacgaggggaactcgattaccggacgatctgatcctacccggtatctgttatcattggaacacgaactttggctctttgctcgcgtaaccaaaaaaaggtccaccggatctttttgtcgtatgcttggcaacgcaaaaaagctacagaaacaatgtttttccattgcttctgcagctttttatgtgctttttataaattatttgttatccatctgacgcagtctgtggatcagttcttcgcagatctgcagctcatcttttccatcggtctcgatgacgatatcggcagctgcctcgtatttttctctacgtttttccatcagttccgcgatgaatggtaccgtcttgttgttttcgatcagtggacggtcatggctgtctttgacacgatccagaatcgtttccggttttgcggtcagtaatacgacacgaccatttttcttcatctccacaacattgcactctctcatcggagtaccaccaccacaggagataaccacattggttctcgactgcatctcgatcagcagattggtttccagatcgcggaaatactgctcaccatacacttcgaagatatcggagatactcatgccttctctctcggcgatgatctgatccatctcgatcacatccatcgcaaatgcggttttcagaaattcagaaatcgtactcttacccgctcccatgaagccgatcaggacgatattatagttgaacagttttcttgcctgaattcttttactgttctgcgtaatgcttccaaagacatcttccacttctgctttatggcgtctgtctgccatccggcgctccagccattctttctgttttgcttcctgttccggctgcaggatcgggatatcatttgcctctttatatgccatgatatcttctacaatacggttacgcataagcaatgcatccagaataatttcatcgcactgtccaagactttctcttaatatttccaactgattcattcttcttaccttcctttttcaagttcaagactttaacatcttttcgttattataacaggtgtttttagttatcacaatacgatttaatgttttttcactttaaattgctaaatttcagaaaattctgttcccggcgcgcccgattttcccttttgcgttgttgacagtcccttactcgggctttataattagtttatattgctctgtcagacgcatactgcagttacacattatttacagagcacaaaggagagtttttatgaagcaaattattttaaccggcgaccgtccaaccggtcgtcttcatgtgggtcattatgtcggatccctgaaagaaagagtaaaattacagaactccggcaactatgacgaaatctatattatgatcgccgatgcgcaggcattgaccgataacgcagaacacccggagaaagttcgtcagaacatcatgcaggtagcactcgattatcttgcctgtggtctggatccggagaaatccacaattttcatccagtccatgatcccggaactgactgagctgactttctactatatgaatctggttaccgtatcccgtgtacagcgtaaccctactgtaaaagctgagatccagatgagaaacttcgaagccagcatcccggttggattcttctgttatccgatcagccaggccgctgacatcaccgctttccgtgccacaagtgtaccggtaggtgaagaccagatgccgatgatcgaacagtgtaaagaaatcgtacacaagttcaacagcgtatacggcgaaaccctgactgagccaaagatcgtcctgccaagcaaccaggcctgcctgcgtctgccgggtatcgacggtaaggcaaaaatgagcaaatcccttggcaactgcatctacctgtccgacgaatcggaagatatcagaaccaagatcatgtccatgttcactgatccgaaccacatccgtgtgcaagatcccggaaaagtggaaggcaacccggtattcatctatctggacgcattctgtcgcccggaacactttgaagaattcctgccggactacaacaacctggatgaactgaaagcccactatcagcgcggtggcctgggcgatgtaaaagtaaagaaattcctgaataacgttattcagtctgaacttgagccgatccgtaaccgccgtaaaatgtgggagaaaaaccttccggacgtatacgacatcctgaaaaaaggcagcgccgcagccagagaaaccgccgccaaaacattggacgatgttcgtcactccatgcgcatcgactacttcacagatgacaatctgttgaaataaggtaaaacatatcagcatgtcgctgactgtaatatagaaaaaagctactgtatcatgggtattcttcttaccatatgatacggtagctttttcttttctatgaaagaacatttccatcatactacgcgcttctatctcttccaccttatagcaccaacaagtccaaaaccgaagaagtaacacatgctactcccctttcgtcttgaaaagtcagcaagcccggagtcggagatgggggatggacaacactttgtgggcggttagagcaagctttaagatccagtccttagaagaacttgacagtgagcggctctccgcgaactggcatttagttcttctttggacttagcttaaagttgctctgcccacgttgtccatcccccatctccggcttcgggcttgcgtccccttttcaattactcttcaaacttagaactatgatcccgacaaggaaccggcaatttcagaatatccagtttcatctgatctgcatcctcaaccgagaaaaatctctgctcctccagaacatcaatcgccttgaaaatcttatcaatataatcccgtctcgtaggatacagttttttcagcttctcttcagagaaatacacacaacaactgtcctgatcgttcttctttgttccgctgcagtaagtagctaccggcacatccagctgtggaaaacggaaaccacccttacagttattgttttcatccagaacctcaatattattctcatccacctcaatcagaccctgtgcatacggagccggaatcccctctctcacccacagatccagattcgtcagagcctgacgcataaatgcctctaacggcagagctgtgatatcagtatgcggaagaccagttgtcttctgaatctggtcaatctctgcatatcccggacgataaaacgcaccggagaaagagttatgagcctgtcctgccagctcatacagacggaaacgatccccctctgcatcactgtccgctcttctcagattgatatgacctgtgaaatccttaaaatcccactgtgtcacacaccgaataaccggaaccggacaatttcttgttttctgaatctcgtctgtcacatcggccggagactcttcctgattcagagccaccatacggcatccggaatatgtcagatacccatcataaggaacctcaaccggtgatactctgtctgtctcatggaatacattgatataagtagataactgcatggaagactgcgaacaactgatcgcataaatcttctccacttcttttcctgcaatctgtgtaccctgcccggacttgaacagatttcccagttgtgtcagcatatcccataacagaccgtcctcgcagtcttccagacaatgctgccacagtaaaatatcgtggttgaccggccccggattcggatttggattcttccaggacaatttctcataccgttttgtatcgtactgttttaacgtctttgtacagatcgcacgtaccgtcacaccaacatagatgtctccctcatgaagcattttctgccacagcaggcaccacatcgggcttacatcccagctgtttgtggaattcagcagctctacaacgacatttccgctgaatttcttcggatctttcggtttgcggatgataaaacggttggtatacggtgcatttgacagttttacctgcgcctgtccatcctttaatgtataaacatcagcttctccggaatacagatactcttcttcctcatatccatatttttccagatacgtcggaaccagctgacgatctgctgctccccacgggaaagaatcctctgtacgaggaagtaaaattgcctgtggaattcttttttccataacaaatgttctcctttcgcttcgttccattttctttttatacagacagaggctgtcgcatcaaacccttgattgccacagcctccgctattttcatgaatcgctgtgagtattattcacagtttttatttatatcagtccggcaaacattccgcttccaacaggaattaagattgctgcacagatcacgatcataactgcacagaaagccacactgtattttgctgttcctttgtattcaataccgatatccgaataaatgattcccatcagcgggcatgcgctcagcgtacagattgcagtaccacagatagcgataacggcacatccgaaagccagaacctgtgcctggttgattccaggaacggacatcagcgccgggatacagctggagcatacgataacaccggatacggtattggaacagaagttggttgccagactggcaacgatcagtccgataacgatggttacgattaccggcatttttgcaacaaccggtcccaggatattctgcagacacaaagtgataccgtaatcatctccacctactgctcctgcatagaacatgatggcacccaggaatacgatcattccccacggtacttttgctgctgctttaccaaagtccataaccggttttccgtcaacagtgatcacacacagcagtgcgcataccagagttaccggtgctgcgatcgtaatgccactgaagtaggtagcaaccggtcccaggaattccatagaagccaggatgtagcacagcaggatcacgcccataccagccagagcgattttacctcttttgctgatcggagttttcttcagttcttcacgcattgctgcgtcatcaaaactcttgaactttgatacgtccggtcgcatccacagttttaccatcagaattgccacgacaactgcaaataacagatacagacctgcaaacttgaagtacgttgccgcgctgaagtttccaaatcccaaacctgctacaattgcaaccatggtcaggatgtacggtcttccccagatcagagtaccatcacataactgagagatccagccgatcagcagaccctgtgatttgtagaagctgtcttcttttgtatatccgatagaagttgttacatcttccagcagtttgaagaacagtacggctactacctgtggtgcggtaaagatagagataatgatcatggccagtgtaaacatgatcataaacagtgttggtcttccatgaatgaactttctggaaatgatccattttacgatccattcaaatgcaccgctctcttccagaacggttgcaaccatcataaatggaataatggcagcacatactacgttaccccataaggttccgtatgcatttgcacctgcataggttccgagaagaactgctacggtaacactcagaagagaggtccagcttgttccacaggtcagccacagataaatcgttggcaggaacacggacagcatagcgatgcctgcttttgtcagtccgtttgcttccggcagaagaaagtacagtaatacgcctgccagaacagcaatgagaaagtgtttctgttgctttttcataagtgatctccttttcagttaattttcgatgatgtctggtacctgacgttttcataactgcaagggtaggatcttttccattcagttatttttttaacacgcccaatccaatgctattttgtaaaaaccaaatatttttccggctttttctaaatcacattcgtcacattcaccataattttattataatggttagttaaagcaaaaacaaatagatgctattttctgatcaatagattttttttatattttttgatattttttctactatttggcaaacctataaaaaagatcggtaaatgtcgtgattttctgtgatattttctatagaatcacataaaatctgttcagacattaccgatcttttttattgtttcggtttgctcctgtttcttattctccggtagcttcccggtaggcttcgcttcccacctcactccaggatgttttttcccctgaaatcacttccccggttgtcttattcactgcatagaatccgagcagctgggtatcttttcctgtttccaccctctcatagacaaacaactcgcattctccattctttgatgtcctgtcatagaccaggcgattgtcccagctgttgccattctcttcaccgctttcaaaaatggcataaaagtttccttttgcattacaacttgcagtcacttgggagacatctccgtcatctgctatctcaccatgttctttcatgtatgtatagactgcccgcgcctgagacatcagcggatcttctgtttcggtatctgctccgttctctgcggttccatctatatttatatctgtcgtattctctccggttgtctgattttcttcggttccgctatcgttctgtgtttccccatcggatgcatgcgctgtcgaatcgtcttccagcgtttcctccgcgattccgtacgcgatgctctcatccagtgtcagcgtccggcggaaaaacagtccggtagctttgttataataatactccggcggatccagccagttttcatgcttcatctcgatcacaccattcgactgtacctctacctccgcatcacttccaagaatctgagccacctgcatcaggctatttcccaaaaagagacagatccagagaatcaccagaaggatcttctgcacagtctttgcaccctttcctttttccgtctgttttccgatcagccggaacagtttgaccagccagtacagcgtgagcactgtccacccaaagaaaagaacgaaaaaggaaacatacacaacccagtctctgtaatgataccgccatgacagtaacccattgacactgtaatagactccggtatacaaaatcagaagcgcagccagcatcgtaaccaccggccaggaagctttctgctcctcccagtcactcacagcaagcaccagtttgtccggattgctctccggtaaaaacaggctttcgatttcctcctgtgataactgctgcggtttttgtgggattgcataacaactggtcagcgcttcctgccagctctcctgtgcatccagatatagcgctgctgcctgataaaaataaaaactgcgaagctgcgctacattcaatttttcccttttcaccagctccaatgcctgcagtgccatctgcggacggtgcagttcaatctgctgccttgccatctgaatcaggataatcgatcgaagtttttcattctttttatataaggtacgatacatggcgtaattgtaatcatgccgctcctgcacttcccgttttctcatccgtacaacatcgatccgattgcgtgcaaccagtaacagtaccagaaacactgccacagaacaaaacagcagacagatggcttgtaacatatcactcgtataatcgtctcttttcagtgtcagatacagcagaatataggtaagaatcgctgccagagcgatcaggatacgatagatccgctgtctccgaagccgccacaaccccagccggtatccacgggttggcggtgtggacgggatggaaaggtcataataattcattgcgtattcacctcacatcaggataatatgcctgttttctttctctcatcccgtttatcttatctttcttaccgcagatacgcaagactaattttcttacgttttcttttcattcaatcacacacgctcaactgctccatgattcatgcaaccgtcatttacaggcacatgcttttccttcttttcttctataacccaataaaagcggtgaaactccagatttctctgattttccaccgcttttttgttatttactgtttctcatgatttcatgaaccattttccatccgtttattctccggaaagatccatctctttttccggtacgccctgtgatttgatgacaaatccatctctcgcatcaaaccggatcacatactcatattcgctttcctgtccttcttttgctgcctcggcatccgcataataaatcagccggatatgataaacattcttcttttccttccaggattcatccccgacaagccagtcattttccagctgtttttcatttttcaacagtgtttctgcgtactgctgcgcactgctccacacaccgctgtcacctttttgtctctgtatcgttccctgatactgccagagtgtcgcacataaaagtacgcccatgatcagagaaaacagcactgttttatagcgcttcacttttttctgtctctgctgccggatcgcacggaaggttcccatcataagcatggcaatcacaaacagataccataccgtccagaaaatttcctgctgcgtgtcggtttctccgggcagaagttcgccaagctgttcgccccagacatactgcatcagcgccagcaaaaatccaaccgaaagaatcgccgcaacgccatagattttccgactctctgcatcgtcgatattctggaagaaataccagagcgacacaaatacagtcgcagctatcccgccaaccaccagtgctccgccaaaacttgccagttttgtcatccatacgatgatggtgatcgcagccagcacgatcccggcgatcacattggcatctcgatcctgttttttctgctgtctggaaatatcccctgcattctgtaacatttcagccacctcgccctgtgtatagcggaattcttccggctgctggtcctgcttttccgtttcctgtctttcggaacgcatcagttccagaacggagattccaagtgcctgcgccagcggctccagtgtctgaatatccggaaagcccaacccccgctcccaacggctgatggctttatctgtcacatgaatcttcccggcaagttctgcctgtgtcatttttttctcttttcgtatcccggcgataaactgcccgaatttttttgcttccatgttctgtcgcttcctcccctgctgttctatgtattctccaaaactgcctgtctgccctccgtcaggcatgtttttacagtaacagcataggcgaatctgagggattttgtcaatctacgaatcatttaccctgatgtttactgaggaaatcacggattgtccgcacatacgcgtctactttcaggactgtagaaagatgtcctcccgatacatattgtatttccgggttatgcatcagctgaatcagatttttctgcatttctcccgagaagaaatcctgatctggaagtatcagtaaaatgtttcctttcagctgtgcaaaatcatccgcagtcaccggcttctgattcatcagatcagccagtaggctggaaatgtggacatctttttcctgtttgtaatctttaaaaattgtttcgaacatatcctgtgcacacgcaatctcttctttactttcatttcgaatatggctcatgccggctttgatcagttttggtttcatttttttataattgccatgtttcataataaacagcataaccggtgcaaggaaatattttttcttaaggtttttgagtgtgttctcatccatcccgcctgtcgagatcagaaccagtcctccgacctcgccgtgatacatctgtgtgtaaatctgtgcaaccatacctccgtcgctcgctccgacaaagaccggctgtgtaattccaagttcctgaaagaatgcatgcattcccctgaccagttcctgattggttttcagttcctgcggataatcaaaaagtaaaacctgatagtcggaagataggggcatcgacataccccatccacatctccatcgtgttcattcctccgtttaacagtaccagcgtttttccatcttcccacttaatacataatgaaacgtgcttccctcgacgatctttgtctcataggtatgtgtcgctctgaacgctttcagctcctctgaatatgtcatcgtattctctcctctcccggtcaatagttagacttttctaacttttattttagcacatattctttatatttccagtcattcactgaaaaacttttccttactcaccaaaccaaaatggagcagtgcggctttttatcaccacactgctcctgttctcttatctgtctttttgtacctgttgttcttttatgctcatgatcagcatctgcagacgattctccagattagcgaaactgacatccgggtcataatccatggagaggatctgtgcatccggatacatttcccggagtttttttacgatttttcttccgactacatggtttggcaggcatccgaacggctgcaagatgacaaataataactccggacacagaatttcctcttcactcaaatgcagtctctccgtaaatactcggatcagtgtcgggttaaatgtcagtggtccaccctcaaatacaaccggcggtttgatcgtaagtccctgcgccagtcctccgatggtctgctttgcaatcgcatgaaaagaggaaagtgccagatccgctttggtacatccctgatttaaaagcggctgaatatctgtttttgcctacacaccgcagcgcccgaaatatcataaacggtagttcccttttctgccagacttttcgccccggaaccggtcattgccacgtgaaaatatgcatccggaaattgctcgtgagctatctcaagcgcacattttacactgtcaagctgtttggagtgatgtctcgtataatcagcgagtaatacttcgtcctgttcttcaagaacaagcaacccatttttctccgggacagggaacggatctacactgccagtaccgaatccagacacaatataagcgcatattcatatgcattgccgccccagtttctctcatcgtatctgtcaacctcggcaagactgtccgctgtatataatatcattccccaggtcgcatccctgaacgctgcacaggcggcaagtgctgaacattccatttctactactgagcatccctctgccttcctgtatgcaaccttttcttttgtttcacgaaaaaatccatcggttgaccaggtgatcacttcctgatatttcatcccatgttccagtatcgtcttttcgatcgcttttcttgcccttttattaatttccataaatctcgaaggcgcagcataatggtatgaggttccttcatcacgcaaagctttctccggtatcagaaaagttccttctgcaaatttctccaacgctccgcaactgcccgcggaaataatttcacgcactccatatccaatcagccagtccagaatctgtgtcgcagccgccgcacccaccggtgcctggcaaagcacaattttttcacctttatatgttgttatataaacaggatattctttggtcatactaataaaatacgatacaatctgcgctccggtcttctccgcatattcatcaatgtattcgccaagaaaggcaaatacacattttttcggaagaaccagattcaggttctcatgcactgggctgatcactgccgtttgttctgtatcaaattccaatattggtatttcattttttataatactcatactattcctttcccccttataattttttaataactagtatcatataatactttcactacaaaaacaatactattttaaaattcacagaaaatttccgcatctaaaggcaattttcgatgaattatttgatattgtagaatattaatatatagaaaagcagcaagaactgcattttacctcgttcctgctgcttttctctttcaatctttatttcactgctttgcgatacgtttcctcatccaccgcttcacaccattccgtatgagtatcttctcccgaaacgctgattgccaggtgggagaaccagctgtctgctgcgccgtgccagtgtttgacacctgccgggatgttgatgacatctccggcggtcatgcagatggcttcttttccttcttcctgataaaatcctcttcctgccacgcagaatttttctctgatgatctcaatgccctgacactgccgcagttccagcatcgtatcatcgaagattcctgcaatcacatcgatattctgtcccagatttgccagactgttctgctctggctaccgattctttgcaatactggatcacgtatttcgcatccttatacatcgaagctcccgccggtgtcacttgcaatccccggtggctccggtcaaacaactgtaatcccaagctgctctccagcgaatgatctgcttgatcaccgccggtggagaaatatataatttttctgccgttttactgaaactccctgcctccacaacacacaggaaggtttaagctggggattgtacatcataggatctgtcctccttgctgctgcatactgctcacagccgccccggttgccgcttcttcttcacattctgccagcaccagtttcgcgccaaacatttcttctacgatctcacagagaaccggattctttcgcaagccgtttccggaaccgatcatgcgttttattttcattccggttccgttttgaatcgtctgatacatctgatagagttctctgctcattccctcgagcgtcccataaacaaatgctgccggtgtgaaattctccgcgcagagattggtaatacttccgctttgttccggatgtactctggttccgtcaaatgttgtctctatctgaagtctctgcttttcctcttttcccacacaggatgcttttccgtctcttgccagtttctctaatgttttatacagcggttcctcctgcccggttgccgctttcataaattctctgaagaatttttccagcagtgcataggcttttcctccgcacagagaggatcctgcaagcaggtaagcaccctgtaagaaaggtcttgcttcgattccctccgccgtaaaatactgatcggagagcaccgagatctgtccgccggttcccatatttaccagcaatgtatttttttcacttcctgctgctccgagaaagctcgcctgattgtcgccgatcgccacagtcacaatgcgttctctgtaacttcccagtgcttcgattccggtgcagacttccggaagccacggttcttccacacccattttggcaagttttcctgtcataaaagcatttttctgtgcatcaaagaatccaaaacttgcagcattacttgtatgtaccagtgcttcttttcttcctgtcagctgcatcccgaagtaatccatgatcgtacagaaactcactgccgtatccgggatcagatcgtgtctcagattatagatatgtgtgaccattccataaccggaagctgcctgtaccttacatgtctgctgaatctcttccgccagggaaccgtgattcccctcacagagacttcctcgcgcatcctgccaggtatacagcggactgacgcaggttccttctttatcaatatacacgattccatgcatctgtccggtaagtccgattatttccacttccggatatctctccagaaaatcatccagcatctgtctgctcttctttacgatattttctgcatcctggattctttcccagtcatttgccgttgtgagaaagcttccattttctattgtttttacctcaagaatccgggctttttgtgttccgtttttttccagaaccacaccgctgatggttgttgttccgatatcaattcctattgttctcatagattttttgctccatttattacaattaaaataattatatttttccctctgtgtcttttagtgtcatatataacagcggatacgaatttccttcttcatcgcagcccgcccgtttgtatgtttcaaatcccagatgcgtgtaaaatacgactgcctgtgggttctgttcattcacggtcagttcccggatgccatactgttccatgccatattgcagcatctgctttccgattccttttccacattctttaggcgaaagaaacagcatttccagacggttgttttccgttcccataaaaccgatcgattcaccggattcattttgtgcaacaagcagatgggacacattttgtaacgcctgtggaacatattcccggatctgttcgatctctgtgtccgacagaaaatgatgcgtcgcccgtacagaatcttcccagatcgttaaaagaacaggcagcaacgtggttcgctcctgtagttcgtatattttcatggtttttcctccacgaatgtcatttgatatatttgtttctattattataacaaatactcttccccttttcacatatcttttgacttttcctgtaatctgtgataatttggttagtataagctaacatttatttttgtcaggaggaaatttctttatgacaccggaagaatataaaaagctctcgatcaaagaatttacccaggcagccaaaatctatgacagcgggcatgccgggatctatgagatgtgcaagcacgattacccgccgatcttagcggaactggaaaaagaggattttcacgatgtgcttgactgcggctgcggaaccggaccgatgctcgaactgctgcatcaaaaatacccgggcaaacactatgtcgggcttgacctcacaccggagatgatccatgttgcgcaggcaaaacagctctccaacaccgaatttctcatcggagacagcgaaaacctgccttttgcggaaggttctttcgacgcgatcatctgtgccaacagtttccatcattatccgaatcctcaggatttcttcaacagcgcctaccgtgttctgcgaaaaggcggccgcctgatcctgcgggactatacttcgtccaatgttattgtctggctgatgaatcatctggagatgcctctggcaaatctggtcggacacggcgatgtaaaggttcacaaaccggcagaattcaccgcgatggcagaaaaagcaggatttacggtattgaaaatggaaaagcagaaaggtttccgcgcgcatctggttgcacggaaactatgagaaaaacgcctgtacgatgtaatcatctgttacaggcgttttatttacgcgagcaacgcgtcaaagtccgttcttgcacgagaccttaacaactgccgcgataacaagtaccttttccacttatgcttcttttcccccagccatgtcagccactctgccttccagcctgggggctcttgaggcctgttctgtccgaattttattaattgctgcttccagcatactcgccgcataatcaacgtcttcttccgtattgtccattccgagagaaatcctgatactatttccggccaactgcttttctattcccagtgaaagcagaacatgagatgcttcctgtgaagctgcggagcatgctgatcctgagctgatacagatgccataagtattcatctcattcacgagcagcacactatgtgctattccttcaactacatacgaacaaagaccgggaagtcttttttccggatcaccagtctttaatacgcccgggatattcaggactttttcgtccattcttttggaaagtgcatacagatattccatattggactgcatcctttctgtctgctcctcgagagccctggtcatccctacaattcctggaacattttcggttcctgaacgcccttctttctcctgtccgccacctgtcaggtatgccggaagtctcgtcggaattctgcagtaaagagctcctactcctttaggtccattaaatttatgtgctgatactgacaaaaaatcaacaccgagtttatgtacttctattgggatatgacctactgcctgtactgcatccgtatgaaacagtattctgtgttttcttgcaactgcttccagagactgaatatcaagaatcgttccaactacattatttgccatcataatacttatcaacacagtgtcatctcttatagccgcttccagctgctctgccgtaatctgtcccgtctgatccggtttcaggaatgtaacctcgtatccatcttccattaactgttccagtgtttttcttacggcattatgctctatttctgttgaaataatatgttttcccttatttttccgtaaccgacaggcacttctgatcgcccagttatcactttctgttccgccggatgtgaaatatatctccgttttaaacgctccaatacattttgcaattctttccctgcatttttcaattgcattttttcctgtctgaccatagctgtataccgcagatggatttccatattcttctgcaaaataaggtaacatttcctcgagtgccgtttttgacatagctgttgttgccgcatgatccatataaattgttttcataaatattcccccgtcttttgttccctgtacaggttatctgtttccatataaatgaactttcttctccacaagcttatcaccttcatatctcaatttcagcgagaaaaagcgttcttccccggaaaggagcatttcaagaaataccctgtcgccctcccaggttggcagttttagcacctccattttctatcggtcagttgttttacatgctcatgttaatcaatctgcttccgatttggaagatattagtaaatttataagtcactactaattttcatagtttggcaaagatgaaaagtccttacattgactgcactgcaacgccggatctactgtctttctgctaaaattgctcactgccagcatatcatggatactccgtgacatgctcccaccagttaaaccatagattttgaagtgggggcttcttgctcaatggctctactgagccaagtatctacaagctatcctcgcgtgccccgcgatttttttgcctggacacaggcgtattttctttcttcttgtcctgatacggacagtttatgccgacggcatccttcttgcctcttcacggatgttgattgctgcatttcaatctcggtccatttcattctcacacgtacagcggtaaactctttcggatagtttcagctctttttttatctttccgcatttattgcattttttgcttaaagggaaaaaacggtctacctttactaattcttttcctttccaggcaagcttataatccagcatatcccggaacatcccgtatccattatcctgtacacttttcccaaaatgcaggcactggcccatcgctttcatatcaatatcttccaccgcaactatatcataccgttctgtgatcctgcggctcagtttatgcagataatctcttctctgattgcgtattttttcatgacacctggcaactttctttttctgccgcacataattgtggcttccttttacacatctcgacagttttcgctgctcccttgccagtctttttacaatatattttttaccacaattttaccaacaccttttccctgcatggttggatgaacagcaagtgcatggggagtcaggacttcgccgggatcgcaggtaattccccatgtacaatcatcatatccctcattgtgttcactgttcaggataacacaggcgtataaagtatctttttctgtcaaagtataaagttcccctttgataaggctgttctgaagaaaatcatccgatggatacacacctttttcccatccgagattctcgttatttacattgtttctgtgaatatcctcgatcacatctcaataaaatctctgaatcatcagaaagttcgattctcttgctttttgaaaattcatttgtacaatctcctctgatttgcattgtattttctgcactactcgtattctttgctttgaatttttaatacatcttccaaacattctcccgtcacatctgcaatttcttccggtgtttttcctttttgtagcatattggttataatactggcggcttttctctgttctccccgtttctcacctttctcttctgcactctgtatctgcgaattgtagtcccggattgctttttctcttgcttcatattccagtctcttcttctcatccgcactcatatgtttcaacatctcatatgcttcatcgatataggaatcttcttttgccatcttctcaaattcctccctgctttttgctcccagaaaacgcatccatcgaataattccagactcatcctgttcttctttcggcaatttttccaactccagaacatggatttccaacaaattctgtgtgtaatattgttggaagtaattctgttctctcgattttctccggttctacacccaataatgctgcaatcattccctgtcttacctttgcattctgcattaattctttaaaacaaaaatccacggttggaagcatgataaattcttctttttctggtgtttcctgtgtaattacctttgtctgttcgttcataaatctccttttctcacagaacagaaatacggagactctctttttcatagtaccacacttttccttttcatgaaagaaaacacattttattgacaaaccaactttatttcaaaatcgctaaggaaaatgtccgcattctgttctgtattctattttttgtatacatcggatatttgctcaggactctgagtgttagatatgtgtttccgatatgttgattagatatttatgtccgtcgctaaatgttcacggatactataaatttttattattgtagcagaatttctcattctttacaagattttatttttctttcccaccaaattttcagttttcttaaaacgagcaacgctacacaaacgttttgcccatgtaacattgctcttttactattgaccttctcaagcaaactgacagtcagcttcgggctcttcccttattcttccacacactcaatcttaaatacattcagcgtatcgacatccggacaggcaaatactgctgttcctttttcctgtcccggaatgcttccgccgtatcttaggatatcgacatatggaaatgccacatgcatcgccatagggcacaggtttcctctttccgtatcaaaatcataagaatccccaatcttatgcccccgatggcatccgaccgtacccttttgatcgatcagtgtaattctgatttttggtctcttcatcagtcaagttcctccagacatgtttctatcggtattcctttatatttatccacattctgtgcattccgccggatcatgtttttcactgatatcatggctcgttctgtcgcttcatacagactgcacccagccaatatttttcccatgaacacagctgagaaaatatctcctgtccctggaaatctgacggggatctcttcaaaatcaattttaaaatattctttcgttttgtcatcataaccgaaaacacatttgcagtcggaatccttgatcttggcacttgtgatcaccacagactttgctcccagttttctaagtgcctcaatgatattttccagttctgcctctgcgactccctcttcgtggtagtcgcagcccgcaagatatgccgcttccgtgtaattaggtacggtataatcagaaacagatatcagttgtctcataagttctactgtttcctcggatattccaccatacagttttccttcatcccccataatcggatctgtaaagattttaattccttcttctgactttttcttgcaaaattctgtgatcagttctgtctgttcttttgaaacaataaatcccgttgatatcgcatcaaaggtaaagcccagttgattccatatatccagcgtatgtttcatatattctgtcgtatcaagaatatcgaatttaccatagtcaagggtattggacacaattgccgttggaaggctgaagatttcatatttcatatgcgaaagtaccgggatcatcgacgacaatgccacttttccataccctgccagatcattgatcaataaaagtttatgattcatcatttgtcaccatcctttttttcaaatagtataccacatttatctgtctgcttttctttacaatcttttctgcgtcctggatcctttcccagtcctttgtcgttttgaaaaaacttccgttttctattgtttttgcctcaagaaccctgggtttttgtgttccgcttttttccagaaccacacctcttatggttgttgttccgatgtcaattcctattgtttgcataaatcttcctattcatcttttagtacaaatgagttttcttctccacaagcttatctccctcatatcttaatttcagtgagaaaaaacgctcctcgccggaaagaagcatatccagaaacactctgtcgccctcccaggtcggaagttctggcacaactgttttatctacccagcaaagttctccctcatcgcattcgatcagttcccctgtgtatccatccgctgtgaacacgcacatcagttccgcttcgcaggtatcgctgataaatgtcaccacaccacggaaccgatacgaggtaagtgtaagcccggtctcttccttcacctcacgcaccagacattcctccgggctttcctgatattccacatgaccgccgacaccgatccattttccctcgttgatatcattcttcttttttactctgtgaagcatcaggtatttgccttcgttttctatgtaacataacgttgtcgttgtcattttctcattctcccgtatttttccattccatattttaaagtatactaatctttctttgcaagttcttccagcacccacgcgaatgcccgggcggtcctcatatccggttctttaaaatggcctccgtgattccattccagtgtacacggtattccttcttctttcagccaggtaaacgtctccctgatgcagtttcccacctgcgctatcaccggattccttgttttttcttctttatcgccaagactcaggtaaatacagtcacttcctacccgtcggctcttcatatcttccaggaatcccggaaaccagaccgagggagatgttgctgcgacacctttgaagcgatctgtctgcatggctgcccacagggcaaataatcctgccatcgaatatccaccgatacagtatttgcggtcattgtccgtacacaattgcaatacttcttccagtgtattttccgcaccgtctccaaaatcttccgttccaaatacagccggagcattccatggtgaaagatcgtgattccagttttccacttttactgccacaaacgcaaactcctgatccgtcagtctgtggatctcccggatctcgttttctattcccggcagatcatgatctcccaccatctgaagcaaagtgatcggtgaatgactgttcccataattatatgtaatcattgctcttcccacacctcattttcctgtctttcgtattgttttcattatacagttttcgtttccggttctcaatgcaaaatattatgaactttttcttttttcttgaatcttacaacaaatagtggtatcatacatcgttggcgcttttttgcgctgcgaagccaaacatatcatacagattggaggacctatgacaaaagaaaatacttctgcccctgcagcagaaaataaaatgggaactatgcccatcggtaaacttttatttaatatgtcgttaccgatgatgatttccatgctcgtgcaggcactttacaacatcgttgacagtatcttcgtggcgaagctttccgagaatgcccttactgctgtttctcttgcctttcctttacagacattactgattgctgttgcaaccggtaccggtgtcggtatgaatgctctgctctccagatcactgggggaacataagtttaaagaagccaataagatcggtgtcaatgcagcttttctgtattttttaagttatcttgtatttttgattctgggatttaccgttgtaaaaccattttatgccagccagatcaaaggtgcggatgctgagatcatggagatgggcatcgaatatcttcgtaccgttatgattttctctttcggtttacttgcacagatttactttgaacgccttctgacctccaccggaaaaacacttttcagcatgacttcccagttatgcggagctcttaccaatatcattctggatccgatcatgatcttcggtctgcttggatgtccggccatgggtgtcaccggtgctgctgtggcaactgtcatcggtcagtgtgtcgctgctgtcgttgcctttacctgcaatcacaaattcaatacagagattaagatccattttcagggatttcgtccggatatcaaaatcatcggaacgatctatgcgatcggtgttccttcgatcatcatgcagtctatcggctctgtgatgacgtactccatgaaccggatcctgattgctttctcatccacagcaaccgctgtgttcggtgtatatttcaagcttcagagtttcttcttcatgccggtgttcggtctgaacaatggtatcacaccgatcatcgccttcaactacggggcacagaacagaaaacgtatgatcaaaacgatcaaactcagcctgatcactgctttctgtctgacctttgtcggattcttatcttttgagctgattccacaggttcttcttggaatgttcaatgcttccgaagatatgctcgccatcggtattcctgcactgcgtatcatcggggttcattatctgatcgcctggttctgtatcatctgtggaacagtattccaggctctcggaaaagcagtatacagcatgatcgtatcgatccttcgtcagctcgtggtcctgatcccggtagcctaccttctttcccggatcggaggactgcatgtggtatggtggtgcttcccgattgcagaggttgcatctcttgttgtttcactgactttcctgttcagtgtcaaccgacagattatttctaaaataccggatggaagtgacattctgtaaaatacatgcatttactatacttgtaaaaaacatcccctttcacaaaaatttttctttcgtgaaaggggatatttttatcctatccggatactatatcgaagaatttgcgcaaatgctcaaggcttgttttgaaacagcataaatccattggtgtcaggcacctttacaccggaaaccttctgcaaagaacgtaatggatgctttagataaggcaattgagatcactgcggattgtccgtacagaagaacttttcattctgatcaagggtgggcttaccaaatgaaagcatattctcatagactaaaagaagaacgtatatttcaaagtatgtcaagaaagggaaactgcctggataactctgtaatggaaaacttctttggactgctcaagcaagaaatttactatggtgttgtttactatagctacgaggaattaaaatctaagatagaacgttttataaaatactacaatgaaaaacgaataaaagagaagttaagatggatgagccctgttcaatacaggcttcatatcctagctacataaagaaaaacgagacgaccgaaatcgtctcgcaaaagtctaactttttggggtcacctcactttccggagaaggaagcgcgttttattaagtttaaatcagccgataacgctttcgagatactcacggcttgctttgatgcttgcgagaggcgaaagaggagtgttgtactcttcttcggtctgacgggcgcagcagtcaagttcaacaataatgtaaggagcatagtcaagctcagttacagttttaacgatttcggggatatccatgataccggtgccaacggtgcagatatcggtcggatttgtacggccgaaaatcttttcgcagtagttctctctggtcagatcggtaacaccctcaatcaggttgatcggatcagcagatttacccatatctttctgatggatcagttttgcacgggaaccgagctttttaatcagttcaacagccttctgtccgccgcgggttgcccagaaagtatcgacttcgaagaaaaccagttcgggatcggtcagttcaaccagccattcataagcggttttgccttcaacctgataaaattcctggcagtggttgtgataatagaaagccatgccgtgtgcttttgccagagcagccatttcattgcaggctgcggcaactgttttgatctcttccattgtggtcatgatacccatcggcaggataatagcttccgaatgcatcttgacgttgtcttctacaatcttaaccatatcttcttgggtagaggtaaaaggatcaaaatgtacgtggcttgcaatagcagtcagaccaagctcttttactttattgccgatttcttcggggctgttgccgggaacatctacatactcaacatacttatagcctgcttttgcaacattctccagagttttgaggtagtcatttgccaactcggtcataaccgagaaaagctgtacgccaactttcagtttcataataaatcgtcctttcttttggtataaaaccatgttgttttttattgtaccaagtcgctagcgcgacgtctagccctaagtacatcaaaccactacttttttttagagaaaaaccaaagaaagtactttatttcctattgattttcaccatttccggaacatccgtgtttctcttcaccacagtgatgctcgccacaggagtgaccatgttcgtgtgtggtacagtgtacttccggattatagtcaaggtttcctttcaaataagcctctatcgctttatctgcatttccttttacgcctccatataaccggattcctgcctctttcagtgctgtctgtgctccaacctttctttgaatgattatttttctgacggattcttcggatcttttacagagtctgttacagcaaaatacattctttccatcacataactgatagtcgccccctgaaatatgtaacttttttccatttaccacactgtctgccagtttataacgtgcggattcatagatctcagtcactgttgtccttgagattcccattcgctctgcacactgttcatgtgtatatttttccaggtcaaccagtcgaatcacttcgtattcatctacggtcatagtaatctcttctcccacagagattccttccggtttaaaactgtcatatgcaggttctgtacagatttttctgcatcttcttggtcgcgccataatttctccttttttatttccgtcatatgtcgataattatcataatcctgttttcgtatagaatcaactaactaagaaatttattagttactttgtttattttctttacaggttttgttcaaacagtttatactctgttgtttttctcatgatgcacatacctcctttcctccgtattctcctgcatcacctcccatacagcggttatgcccgttgtcagtacatctactttttgtttggatttcttacgatgattttccattctgttcggcgtgttggcttccatttgtatatggcggtgtcaacgttacaattgacctctctcagaaatctttctgaatactggcagcttcttcgggggcacaccagccattgccggagtatcttcggtttccacatactactctctgatacagcggtggaatcctgtgttacctttaagccccgaaaggcacccatacagctcattcaattttcaaggttcaataattaaaagtttttaagtatacatttttgtacctatttcgatttaatgccattatatcccccgttactgctaatgtcaatagcatttcatgcgttttaggttcttttttgtactcttttttattgaatttctgccaactcgtgttataatatggacaaatagttattcacttcttgattttactatcttcactggatgtttatcaggactaatgcagaggtgactttatgaattttaatctgaaactaaaaaaaatccggacattccggaaaatgacgcaaaaagaactgtcagagaagatcggactgaccgatcagcataggattgtacaatatgaaaaaggcgttcgtgttccaaaaaaagatttggtcgataaaatggcacaggctcttgatgttaatccttataccctctatgataccgctggacgtgacgcttccgaaatgatggaactgcttttctggctggatgaatttaatccatctgccctgcatctgtttcttcctcggaaatttcccggtgaaaaatgcaatgaagtagcagacacgtccgtttactatcacgacaatgatagctggcctgcccattctcctgtctgtatgtggtttgattatggggttctgaatgattttctgaaagaatgggtggttcgaatgaatgagctgaaatccggtgtaattaccagagatgagtattttgaatggaaaatcaactggccgcagacctgtgatgattgtggaaagtttgaacctaagaaacaatggcgaaaaaacttttaaaactacaaaccggaaatttaaaatggatttccgtatattttaacccataaagtagatacaaaatcccagatgtacaggtgaacagacatgaaaaatatccatagcattgaattttataccggaagcaaggaagaattgcttccaggttttgaaaaagattttccctatatcgcttcgagggcagaacttgacaaatatatagggtgttatgtaccgtggcactggcacaggacagtggaacttttttatatggaaagcggcagcattgaatatgatacgccaggaggaaaaatattgtttccggccggaagcggcggcatgataaatcccaatgtactccatatgacaaaagcaatatcgcagaaagaaaagaatatacaactacttcatattttcgacgtttccttacttgccggagaacagggaagcaggattgaacaaaaatatatttcacctgtcataacagccccgcagcttgagataatcccgctttttccgggcaattcagaagaagatagaattttgaaactgcttgctgcctcatttcgtttgtccagtgatgaatttggatatgaaataaaactgcgggaagccctaacggaaatatggctcatgcttttcgaactttctcgttctatgcgtgaaaagaaaggggaacataacaaaagcaacgataaaataaagctgatgatgatatatattcatgaacattacagagaaaaaatatctattccggaacttgctgcggcagcatatttaagcgaaagagaatgttatagagtgttccatgactgtctgcacatgacacccgtcgagtatataacaacttaccgtttacaagttgcctgtcagatgttggcaaaggggcaggaagctgttactgttatcagtcatgagtgtggtttagggagcagcagttattttggaaagatttttcgggaatacgcacattgttcacctacagaatatagaaaaaaatggcagaatagtgataattaatggcggaaaaaaaatatttttctattacttttgcattataatgatacctgtaaagaaaatcagcaatttacaggagtaaatatttcattataaaggagccaggcattttattttccagccccacccttttgaaaggagttaaaaatggagttgaacattcagaccgcagaactggcattaaaggaagcgtcagagtccaatccgggagcatgggcagatcattcccggtttgtagccgaagcctgtaaaaacattgcatcacattgtaaagatttatcttctgaacaggcatatattttcgggctgttgcatgatattggacgctatgccggagtgagttcggaaaagcatctgatagacggctatcggtactgtatggagcgcggatgggaaaaagccgcacagatatgtatatcccacgcatttatgattcaggatattgccacatctatcggtgtatttgatgtcagtgatgaggattacctgtttatgaaagaatttgttgcaaatgcggtatatgatgattatgaccgtcttgtacagttatgtgacgcattggctatgccgacggggttctgtcttttggaaaagagatttgtagacgtgacaatacggtacggtgttcacacggcgacaatagacaggtggaaaaggattttagagattaaagaacagtttgaaaatcagatcggctgttcaatctattctctgcttccgggtattgtggaaaacagttttcgttaaggggggatattatgtattacgaatccagtgattttttggaaactgcggacagcgatacattaaagcagattgcccgcacaagggaattaacacgggaatattatttttctgattatggagatgtagaaaaacgcacttccattcttcgggaactgttgggtggaataggggaaaatgtggtaatcgacacgccttttcactgtgattatgggaaaaatatatttttgggaaatgatgtgataatcaatatgaattgtacctttgtggataacaaaacgatccgaattggtgacagggtattgatcgcgtcaaatgtgcagatgtatacatcttcgcaccctgtattgccacaggaaaggcttgtgccggattggagggaacgcaagacaacatttttcagaacctatgcacgtccgatagagatagaaaacaatgtctggattggcggcggctgtattcttcttcccggagtcactataggagaaaacagcgtgataggggctggaagcgtagttacccgccctgtccctcctaattgtgttgcagtagggaatccatgcagggtaatacgttattttgatgcggatagggaaaggtagcagcatgaagtatgtcctattatagcatgcagcaaaagaaaatacctcatgaatctctcttatccgctaattctctccgatagtatctgtaaaataaactccccgtcgtacaaacagccacaaaattcgcaatcggctcagccaaaatatgcaaagcaggcaaagataggttcgaagcgatatcacattgctgtttaattctatttttttacttcttttcctgcattgttcctgcatttttaaagatttttcaaaatcagcgaaataccggacagtaccagcaataccgatgtaatcttcttaacattttttccatccatatgattgctgcatttgattcccaaaaacagccccaaaagtgcaaacggaatcagtttcaagacggacagaaccgtatcaaacgtaagtaatccaagtgcactgtataaaataatgcgaaatgtgttgtccacaataaagaccgcgctgatatttgccttaaatgagctgtcctcgtccgtcacgcgattgacgtaagcggccagcaaagcgcccacaccaaagagaccgcacaaacccccggctgccacaccgatgatcgccagcaccagccgggaggaaggtacacgttttttgctgtactctctggaaagcatctccgcacccaatgcgactactaccattccaaataccagcttgatcgctctggcatccacatttttcagcagaaatgctccgggaatactgcctgccagtaccaggactgccaacgggatatacactttcggatccagattttttcggttttcccaggtaagaatcacattggccggataacccaacagcagatcaattggagaaatattggcatttaccgatccaaaactgagaattgctgtaaataccagcgtgttggcaaagccacacaaacctttgataaaataagcgacgactgccgcaagcatccataaatacatcctattatctctttcaggcttttttgaaatatttttttatttttcggaaaaaattacttttcgtcaacgacctggaaaataaaaaattttaaataatacgactcatctgccgcccacaggatcggatgatccggggactgcgtgcggaattccacctggcggagacgtttatgagcgcttcttgcagcttcccgaaccgttttcgcaaggagttcctgggtcataaaatgggaacaggagcaggtggcaaggtagccgccgtctttgaccagtttcagtcctttgatattgatctcgcggtaacctttgatagcgtttttggtggcctggcgggatttggtaaatgcaggaggatccaggatcacgacatcgtatttctctcctgcttctgccaggcgtggaagttcgtcaaatacattcgcacagcggaaggtgaccctgtcttccagtccgtttctttttgcattttccgttgcctgggaaacggcatactcagagatatccagcccggttacctctgtggctccggcaattccggcgttcagggcaaatgttcccatatgggtaaagcagtccagcacccgttttcccttgcagatgcgctgcatcgccagacggttgtacttctgatccaggaagaatccggttttctgtccattttccacatctaccagataatgtactccattttccacaatctccacttccgttttatacggctccccgatccatccttttactttaggaagtccttcttttttccgctcgttggcatcgcttcgctcaaagacaccgtggatgatcacgccgtcttccgccagcacttcttttaacagtttcacgatggtttctttgaatgcttccatgcccagtgccagacactccaccaccagcacatcttcatatttatctacggtcagtcccggaaggaaatccgcctcgccgaagatcagacggcaggaagaagtatccacggtggtcttccggtattcccatgcattttttacacgcattcttaaaaatgcttcatcgatctcctgatgaacgtctctggtcatcatacgaacccggatcttggaattctgattgataaatccgcgtcccatcgggtagccgtcaaaatcgtgcaccagcacgatggaaccgttggtaaatcctccggtaatactctcgatctcattatcaaatacccaggcaccgcccgctttcaggatacgcccttcgccttttttcagtgtaactactgcgtaactcatattgtcttttcctctctttgtctctgtattctctgtctgctgactctcactgttattcctgaaaattttactatgcattgctttttgtgctcggttttacaggatttcttcaatcttcgccttctggttccggaagccttttttccagatcatcacataatattttccttcaatcgaatctctcgatgctacaaacggttcctcccgaaaaatatctgtccggtatccttttgcttcccactctttcgcatagtcctgtgctcgttttctctgctcccggaactgtttttcttcttttccggagaattttcgttccggataggcttttgccgcctgccgtacctgctgcaacaggacttgcgccacttttttgtgtttgcttctgtgaagctgcatggcgatatatcttgtcagtattttcaccggaaacatcgcatacagacgcaccagccgtaacagctgtttatcgccgacttctttcagaagttcttccatcacagccagcgcctgtccggtcggacgccacgcatcgtcccgttctacaagatattctttgctgattgccggataacaggtgtaattcaacggtggaaaatccgccagcgccgcaagcttctgttcgcgcctgttgcaatatctgtcacccagatactcccgtttatcccggagaatggcaaaggtgtactccagctgacgcaggtattcatacccttttacccaaaaatgaccgatttcgccataattgtacaaagaaacttcttcttttaatcctgtaaacagtaacgtacagacagattctccctgatggactgtcagaacatattttttctttctgccttccgttgtctcccgaaatgtttctgttccctcatattcccgcagttctgcctcgatctcaccgtcatactctcgctgatattccccggtcatacgaccgttttccagaacaagaaaactctccacagcatcattcatcagatacaccagacggtatcgatttcctttatttttctctgcttcatcttccagaagttcaaattctccctgatccagcaacagttttaatttttcaaaaggatctgataacaacatactgtcctcttttttcacaatcttatctccttgcagattcattcatttttactcattcccgctcattatagcatatttttcactttctgccttcagaaagtgaaaaaagcgtggaaaagaaccttgtttgttcctttccacgcttttttattcacttcttactgaaatgcagcaatcagttctttggcatcatcgtatccctggttttccagttctttctgataccactcatcgattccgtctacggcattcttgaaggaatcgatatccatatcttcattctttgtaatggttacaccattttcattctgccagcggctcataatctcgtcgtctccggcgcggttgatctcacgttcatagtcggtagcgagttttccgcactcatcgatgacttcctgctgttccggtgtcaggctgttgtagatgtctgcgttgatgcagaagaacaggcagtcatagttggcgttccacagagaacaatatggctgtacttcctgcacactggctgcatcgatggccggcagcggattctcctgtccttctacggttttctgctgcagggccgtataagtttcggaccagttcatgttggtcgcatctgcgccccatctcttataacactccatcagcaggttacttcctgccacacgaatcttcaggtttttcatatcttctacggatctgacttcctgtctgctgttggtcagctggcggaagccgttttctgcaattcccatacaatgcagtccatattcatccaggattgctttcagtttttctcctgcctctccgtcaagctttgcatcggcatcttctacagaatcaaacaggaacggtaaggataccacattaaatctcgggtcaaaagcagaatagatcaggttgctgtgcatggaaatctgtaccgggtctccatcgatcagagcctgaataccttcagactggtttccgttggtcagctgatctgctgcatacacattgactttaattttaccgcctgtcgctttttctaccagttcaccgaattttcttccgccttctgcccaggtactggtttctgtggtggaacaggtgaagttccaggtctgctctgtccaacccagattactgtgatcttccacatcatacgttccggcagaagcacttcccgcattgctggtaaatgcagcgatcagatctgcggcatcctcatatccctgatcttccagctctttctgataccactcatcgataccatctactgcttccttgaaggagtcgatatccatatcttcattctttgtgatcgtcacgccattttcttcctgccagcgagtcatgatctcatcatctccggcacggttgatctcacgttcataatctaccgctttctgtccggcttcatcaacaacggcctgctgttccggtgtcaggctgtcgtagatatctccgttgatacagaagaacagacagtcatagttggcatcccacagtgaacagtacggctgtacttcctgtacacttgctgcatcgattgccggcagcggattttcctgtccctctacggtcttctgctgcagtgcggtgtaggtttcggaccagttcatgttggtcgcatctgcgccccatctcttgtagcattccatcagcaggttacttcctgccacacggatcttcaggttcttcatatcttcgacggattttacttcctgtctgctgttggtcagctgacggaatccgttttctgcaatacccatgcagtgcagattgtattcatccaggattgctttcagtttttctcctgcttctccgtcgagtttcgcatctgcatcttctacagaatcaaacaggaacggtaaagatactacgttaaatctcggatcaaatgcagagtagatcaggttgctgtgcatggaaatctgtaccggatctccgttcatcagtgcctgaataccttcggactggtttccgtttgtcagctgatcggctgcataaacattgactttgatcttaccgccggttgccttctccatcagttctccgaattttcttccaccttctgcccaggtactggtttctgtggtggaacaggtgaagttccaggtctgctcttcccagccaagatcactgtaatctgcgatatcattataggaatcttcggaaccaccggtgctgtcttgtgcattgtctgcactgtcagaagaagccgttaccgttccgctgtaagcaccattttctccggccagtgctttcggcaggaaggtcgaaattccgggaatataggtgatcagtaacagtacaaccacagacgctccgatcatcggcataacagccttggaaatctgctgaatggtaacttccattccttttttcagtttgacagaaatcgcaacaaacaggttgacacctaccggaggagttacctgtccgatggccaggttgaccgttgccacgataccaaatgctacgacatcgtatcccagtgccttacataccggcagcatgatcggaataaagatgtacattgcagagtttgcatcaataaagcatcctgcgatcaggaagatcacattgacgatcagaaggaatacaaactggttatgcgctacgcttccgagcagatcggaagctgcctgtgcgataccgaatttggtacatacgaaagaaaacagggaagcactcgccacgatcagcatgataccaccggttgtcttcgcagagtctaccatcagctcccacaggtctttgatcttgatatctttataaataaatattcccacaaacagaccgtacacaacagacacggctgctgcctcagtcggtgtaaaaatacttccgtagataccgccaaggatgataaccggcatcaggaagccccagaatgcatctttgaacgcatcccatctctctttggcacttgcttttttctgtgtcggctggatgttgtgttttcttgcctccagcataacaacgatcaccagagccacacccatcaggataccaggaacgatacctgcggtaaacatatctgcgatggatacgcctgtgatagacgcatatacgacaaatgcgatactcggcggaatgacgatcgcgatcgaactcgaagtcgccatcagtgccgtggaaaacggtgcggaaaatccgccacgctcgatcatcgccgggatcagtaccatacccagtgcggcaacggttgccggaccggaaccggagattgctccgaagaagcaggctacgataacacacacgattgcgataccacctctggtgtgtcccacgcaggtatcaacgaaacggatcagtcgtttggaaataccggcttttgccatgatgttaccggacaatacgaagaacgggattgccagcaacaggaatttgctgataccggaatacatgttggttgccacgatcgtcagtgaagtaccggagtacaggatcgcacagatcgatgataatcccaggcagataccgatcgggattccaaggatcaggaatacaaaaaacgaaacaaataataccgcactgatcatttttcctgtccctccttatcttttttgctctttacacaatagtcaacaaaatattcaatcatatgaagtaccatgcaggctgctccgatcggcacgaaagaccagaagatccattccggccagttcagtacgaacgttctctttccgttctctaactgagtgataaccttgtccagaccatatttaaacagcactacggtaaatgcaacactcagaactgtgttgatcaccatcagtaccttctgtcctttcgcggacagtctgtccggaaccagtgacagattaaccagctccccgtcacgtgcggccaaagcagcagccatcagcgtgatcagtacaaataccgcaacgacaagttcttcggtaaatgaccaggactggtgaaggagcttacgggataatacattgcccacagtaagcaccacaatcaggatcgtagccaggacaagaatcagcttttccaccatagctacgccgttcatgatttttttgtacgttttcattacacatcctcccttgtttttttgactagccgtatcgtgtccggtttcttttttctttcaggtgattttttgcataacgagaaaaatacgcttcgcgaatttttctcgttgcattgcatatcaataattgatccagtggatcaattttgattattgcggcggtcgcttgcggcatctaccttatacgccgcagtgcgcatcctcgcggatttttttactttacagggaagcaatttcctgtagagtaaaaaaatccgccccgaactcgggacggataaaaatattccgcaaccaccctgtttcctccttgaaacaagcacgaatacaacgcaccagcatacgcggtttctgtaacgggaaacgcccgtgaaagcctattcgatccttctttcgactttccttctcagagatgatcttcaaagcaggaaggttactgtctctcaccaccggcagctctctgaaaacgcttacactgtttctacttcttctcttcactgaatttctttcttatattaccacgttaaagtgattctatcgcattttcgtttgtgcgtcaatatattttatatatattcttttttatttttttattttgcacaaaatatatgtttatcttttat

SEQ ID NO: 2552 - DNA, 2378 bp, Unknown
  gut microbiota DNA sequence
gatgattttcaggtagcggatactgaccggtttcaggtaaatcttgaaaaagaaacagatgacggtgatggtcaactgccggaggatctgaaagcagcagcggttcttgaaaaaggagccagtgcctatcagggagatggaacagagaaaaaaccactgacctatctggtgaaaaaagatggtattgtgaaaggaagctttttcctggaaagaaaagaagatggaaaatattttcgtattgaggttcgggaagaaaatggtgatcttataaaggcgtgggaacagaacggagcagatgaggattttgcatcagatgtgaaagaggacggggaatatctggtggatctgagtaaaaagcaaagtggagagacaccgggagagccaaccgaaccgaccgatccaagtgagccaacaaagccgggagaaagtccggagccacctgaaccatcgaatccggaagaaaagccaaccaaaccatcggtatcgccggaagttactcccggagagaactcggaaccgacaccggaagccggcaatcctcaggaaacggcaggacaggaaaataccgtggatggaatgagcacaaagaaaaacagtgccgctattcgctatctgactgttaccggcgtaatgggaagtgaaagcagaaaagtgatctctaccgatactggttctgatacgacaggatccggtgatgcaggaacttcttatggaggaacagcggcagagattcaacaacagatcaaggacaaagaaaaagaaatcaggggttatcagctggatatgaaagaggccaatcttgagattaaaggtatccagaaaaagctgaataaccagacgattaagagtacattaaatggcgtggtaaaaacagtcggtgatcctgaaaaagaaagcaacgatggaaaaccgctgattcaggtggtcagcagtgaaggactttatgtgcagggaacggtcagcgaatctcaaatgaataaactgaaagtgggagctacactgagcggatacagttatgacaatggtgtcagctttaccgcagaagtacgggaaatttctccgtatccttccaataacggacaggacggagccaatgcatcttcctatccctttaccgcatacattgcagatgcaagcggacttagtaataacagctgggcagaacttacgctgctggatgagggagacggacagggacaaggaatctatctggagaaaccttttgtgcggacagaaaacggccagtattacgttatgaaggacgacggaaccggacatctgaccaaacagatagtacaggttggcggtattcagtatggatccagttatcagatcacaggcggtctgagtatggatgataagatcacatttccttatggaaaagatgtcagagagggtgcaaagacagaagaaggtacgcttgatgacctttataactattaacggcagatgggaggaacaacaatgctagaaaatatcagattggcctttcgggggatatggtctcataagatgcggtcttttttgaccatgctggggattattataggtatcgcttccatcatttccatcgcatctacgattcagggaaccaacgagcagatcaaacagaatctgatcggtgcaggaaacaacaatgtggatgtacggctttaccagggagaaagtgagtactggatggacaatggtctgccggataatatttccgtgatttccgatgaacagaaagaacagattcgcagtcttgaaggggttgagagtgcgactttttataaccgcagagggtatgcggacggaatcacctatcggaacaccagcctggacagtggaagtgtgtacggtgtggatgcggagtttctgaaaacaaaaggttatgtaatacaaaatggaagggattttgtagaacgcgactttaaagagttccggaaagtggtgctgcttgacgatgtggcagtgcagaccttatttccgggagacaatccggtgggaaaaaccatagaactccgtggggaaccatttaccgtggtcggttgtatccgcaagtcagatgctttcgaaccggtgatcaacagtctggaagattactatacgtataatcaaaataccaacggaatcgtgctgattccggacagtacctggccggttgtctataattatgatgagccggaagaagtcagcgtgatggctagtgagacagacctgatgagttctgtaggaaaaaaagtggaggacattatgaatcaggcggtaaccggacagaccggttccggtatgattgattctgaagaggaaatgatggacggtgccggcagcagtggtgctgacagtggcaacgtctcttataaggcggcggatctgttgaaaacagttaagaacct

SEQ ID NO: 2553 - DNA, 9412 bp, Unknown
  gut microbiota DNA sequence
cagtgaaaacaccaacaaacagctgctttggatcgcaagtatctctcttctggtcggaggtatcggtgttatgaatattatgcttgtatccgttacggaacgtaccagtgagatcggtctgaaaaaagcaatcggagcgagaaaaaacagaatcctgtggcagtttcttacagaagctgctgtgctgaccagtatcggaggggttcttggagtaatcgccggagtgatcctgtcacaggtgatatcgaagatgtctcagactccggtggcgatcagcgtacctgtcagtgtactggctgtagtattttctatggcaatcggtattatcttcggtttgcttccatccattaaggcagcaaatctgaatccaatcgatgcacttcgtcacgagtagaaaaaggatacgagtgttcagaattaaattaagaaaaatattagaaattattcacgcgaaattcaccatatcggatggaaaatgggttatactggtaatggaaaactgaaatgaaagggaagaatgtccggtcatttcaaaaaaagatttctatgggggatttatagtagatgaacattttatttttcttaacaccaaaaaatgaagttgcctatgtggaaaatgatgacactctgcgtcaggtacttgaaaaaattgaatatcacaaatatactgctattccgatgttaaataagaacggaaaatatgtgggaactgtaacagagggagatctgctccgatatatcaaggagaaatggtttctgaatatccgggaagcggaggattgcagcatcagcagagtacctctccgatggaagtaccagacagtggatattaactgtaacatggaggatctggtggatacggccatgaagcagaactttgttccggtactggatgatgcggataattttattggtattgtccgcagaagtgatattttgaaatactgttataaacaaagtaaagcaggaagacaaaaacaggaagaagcatagcagatgaaagaaagacagaagtgatccgtggaataaaaacaaacaatcgcttctgtctttctttatgtgggcggggaatctggagcgtgtctgcataaaaacagttgacagaggggcagacagggtgaattcttttagttgaccagcctgtgtgcccgtgataagatataatgagcgttagcgagtgggaacaaacgaagtttgttcatcgggagcggcgaatggcgatcatgatagctgcgaaagcaacgtcaagcaccgaaggtgcgaatcatgatataatgtaatgattctgacaaaggagttttaggaaagtatgaaaacaataatcgaattgatttccaatgaagtaatgaccgcttttaaagaagccggttatgatgaaaatatgggaaaggttacgttatcaaaccgaccggacctgtgtgaatatcagtgtaatggtgctatggcgggtgcaaaagtatatcataaagccccgatcatgattgccaaagatgtagtggaaaaacttgccgacagcaaggtgcttgagatggcagaagctgtcaatccgggatttatcaacctgaaagtatccggcgaatatatggcacagtatctcgaagagatgagaaacagcgagaagatgggtgtggaggaagcaaagaatccacagaccatgatcctcgactacggcggaccgaacgttgcaaaaccactgcatgtcggacatctgcgttctgcgatcatcggtgagagcatcaagagaatgggaagatatctgggacatacagtcatcggtgatgtacatctgggagactggggattacagatgggtctgatcatcacagaactgcataagagaaaaccggaactggtgtatttccaggagaattatgagggagaatacccggcagaagctccgtttaccatcagtgaactggaagaaatctatccggcagccagcggaaaatcaaaagaagatgaggagtacaaggcagaagctctggaagcaacgcatcagttacagatgggcaacagaggatatcgtgcattatggaaacatattctgcaggtatccgttaccgacctgaagaaaaactatgcaaatctgaacgtagactttgatctgtggaacggagaatccagtgtacaggatacgatcgcaccgatggtacagaaactgaaagatcagggactggcttacgaagatcagggtgcgattgtcgtagatgtcaaagaagagagcgataccaaagaagtacctccgtgtatgatcttaaaatcagacggagcagctctgtatacaaccacagaccttgctactatcgtggaacgtatggaaaaatacaatccggatgagatcatgtatgtggtagacaaacgccaggagatgcattttgttcaggtattccgttgtgcaaagaaagcaggcatggtaaaagaagataccaaactgaccttcctcggtttcggtacgatgaacgggaaagacggaaaaccgttcaagacaagagaaggcggcgtgatgcgtctggaaaacctgattcgcgatatcaacgaagagatgtataaaaagatcgtggacaaccgcagcattaaagaagaagatgcgagagcaaccgcaaagatcgtaggactttccgcaatcaaatacggtgacctgtccaaccaggcatccaaagattatatcttcgatatcgagagatttacttcttttgaaggaaataccggtccgtatatcctgtatacaaccgttcgtattaaatccatcctgaacagatacaaagaagaaggcggtaatctggatgtactgaagatcctggcagcaggaagcgacagtgagaaagcactgatgctggaggcatccaaattcaatcaggtcattacaaatgcctatgaggagaaagcaccgcataagatctgttcttatatttatgaactggcaaatgcatttaaccgtttctatcatgagacaaagattctggcagaagaggatcaggcaaagaaagaatcttatctggcacttctgatgctggtaaaaaatattctggaagcatgcatcgatatgctgggatttgaagcaccggaaagaatgtaagtgtgatttccggaaggaggaactattatgaagaaaccttcaggaaacagagtgaatctggcgatcatgatcatcgtgatcgtcgtgctcgctctgggtcttgcagccatcctgggatatggaaaagccagaaagcagatggaacagatgcagcaggcacaacaggaggcaaaagaagtttcggtaacgccgacacagacggtgacaccggaaccgacggaagatccttcggatcctgtcgtacagaaaaagaatctgatcgctgcgattgaaaaggcagtggaagataacaatgtaaaaacgatgacagcagatctccggtatgcggcagaggatggacagatcggaacgtatgagaaagaagatgtggcagcggttcttctgcacctgaaaaagaatcaggatgattatcaggcgtttgtggaaaaactgcaggatgaaagtgtcactgtgggagaagaagacggagtgccgtatcttcttctgacagattccaacctcagaaagatgacagggacggaagaaccagtcgaaacggtagaggcggagatcgtgacacctacgccgacgccggaaggcaatggaaagaaagttgcgattgatgccggtcatcaggcacatggaaacagtgaacaggagccaatcggaccgggagcatcccaaacgaaagcaaaagtggcatccggaacaaccggaagaaccacaggagtgacagaatatcagctgaatctggatgtatcactgaaacttcgcgatgaactggaagcaagaggatatgaagtctatatgattcgtgaggcgaatgatgtggatatcagcaacgcagaacgggcacagcttgcagcagagtccggagcggatattctggttcgtatccatgccaacggttcggacaatacttcggtagccggtgcgctgacgatggcaccgagcactgccaatccatacctgagccaggaactgatcgcagagtgccagaaactgtcccagtgtatcatcacaaccttctgtgcgtccacaggagccaataatcagggcgtatatcagacggatgagatgagcggactgaactggtgcagcatccctgcaacaatcgttgagatgggttatatgaccaacccggacgaagatacccggatgcagacagcggaatatcagcagcagatggtaacgggaatcgcagacggaattgatcagtattttgcatcgtaaacatggtaacagaaagcagcagaaaaaagaaaggaggatctgagaaatgaagaaagtgaaaatgcttggtctcctgatcgtgatgttattgcttgcgggaattttcccggtaaagacatatgcggcgggatggatccagggagacaacggtctgtggtggtatcagcatgaggacgaaagttatacaacgtcgggatgggaaaccatcggaggaaaaaattattactttgatgaggcaggccggatgaaaacgggctggttaaagctggaaaatacatggtattacctgagcatatatggtgatatgcagaccggctggaaaaatatcggcggagcgtggtattatctgaaggaagacggagcgatgctgacaggatggcagaatattggaaataaccggttttatctggatggaagcggagccatgtataccggctggctgaaactgggaaacaactggtattatatgaacaacagcggagccatgttgagaggctggcaaagtatcggcggggcgtggtattatctgaatgatgacggagtgatgctgacaggctggcagaagatcggaaataactggttctatctgaatggaagcggagccatgacaacaggctggcagaacgttggaggaacctggtattatatgaacaacagcggagcgatgctgacgggctggcaggtgatcggcggagcgtggtattacctggacggaagcggagcgatgcacaccggctggatacgactgggagagacctggtattatctgactgcaagcggagcgatggcagcgaacacctggatcggcagctattatgtcgatgagaatggtgaatggataccgggaaaagtcagaagcaagatcattgcgattgatgcaggacatcagagaaaaggaaacagtgcgcaggaaccgatcggaccgggagcttctgcgacaaagccgaaagtagcatccggaacccatggcaatgcctccggactgaatgaatacgagctgactttacaggtttccctgcagcttcgggatgagctggaagcacgcggatatgaagtttatatgatccgtaccacacacgatgtcaatatcagcaatgcagaacgtgcacagatggcggcagcagcaggtgcggatattctggttcgtatccatgccaacggttctgataatacatccatttccggagcactgacgatggcaccgtccaacagcaatccatatctgacgaagagtgtcatcagtgcaagtcagacgttgtccagaaaaattgtggacagtttctgtgcagctaccggagccaaaaatcagggcgtgatgtcaactgatgccatgagcggtatcaactggagtacgattccggtaagtattgttgagatgggttacatgaccaaccgggcagaggatctgaagatggcaagtgcttcttaccaggcaaaaatggttcagggaattgccaacggaatcgatgcctactatggagcaacagcttaaaagaaaagagagcaggacgtaaattatgtcacaagtaatattatttgacctggatggcacattgacggaatccggcgagggcattatcaactgcgttgcatatgcactggaaaagctgggaaagaaagaagagcacccggaaaagttacagtgtttcgtaggaccgcccttaaaagaacagtttatgaaatatgcaggtctgagcgaggaggaggcagaacaggcggtagtgtattaccgggaacggtatacaaccaagggaatgtttgaaaactgtctgtatccaaaagttccggaattactggaactgctgaaaatcaacgacaagatccttggcgttgcttcctcaaaaccggaagtgtatgtgaaacagattctggagcattttcagattgcagactattttacggctattgtcggaagtgagctggacggaagaagaaccgataaagcagaagtcattgaagaggcattaagacggatgcatctggaagaagaacgggacaaagttcttatggtcggagacaggagtcacgatgtgcagggggctgtcagctgtgggcttcagtgtatcggtgtcacatacggatacggaagccgtgaagaactggaatctgcaggtgctgtttatattgcagacagcgtggaagatctggggattctggcaagtccgaatgacgaagagacgacagaaaaggtagagtcggtcagaaaagatacatcaggcagtatgatgcatgtatccgcaaaggcatcgtttgcgaagaaaatgggaccggtggaagaaaacacagaggaagaacgcgagaatgaatatccgaaaaaaacatccggatactccacggtacgtcagatctggagactggtgtatccgttcctgatccattacggcgcgacaatgctggcaacgatagctctgtatctgagttatatctttcaggcaggtggcgtacaggagatcgcaagcgcgggaaagagactgttacagagtaccctgtatgtgactctgatcggagatgtggcggctggtgttattctgtatctgttttacagaaaagatcagcagagacggaaagagggattcagtggaaaccgaaagaatttcgtgtgggcaccgcctgttatctggttcagtgtgattgtccttgcgattgcgataggacagttccttaacgattttatccaggtgattcatctgaatgatctgtttccgggttacagtcaggtttctgagaaagcatttggcggacagtccatgggactgatgaccctggtagtcggtatcatcggaccggtttgtgaagagctgatgttccggggaattatctttcacagactcaaagactggatccggccggaaattgcgattgtggtttccgcagtattgttcggaatctatcatgggaatgttgtacagtttttctatgcgacctgtatgggaatcatgctggcgatcgtctatgataagaccgggacgctgtggacaagcatcgtggcacatgtggctgcaaatctctggagtcttttcgggagtggaccgtggaatgcattgtggcagggaattccggcgggaatgatcttcagtgttgtcatagaaattcttctgtgcgttatcccggtgtactggctgtttggttataaaagaaaataaaagaagcaagaaaatggctgactgaaaaaaaggtcagccatttttcttatggattcggaaaaaatataaaaaaatacttgtaactgaaaaaacgttatgctataatcagcacgatgcataaaacacccatgccgattccgagaaggtgcctgtcagtcaggtctcgaaaagaatgagaagtatggggaagattaaaaccaaaaaaggagattgaaatcatgagcgttatttcaatgaaacagttactggaagccggtgtacattttggacaccagacaagaagatggaaccctaaaatggcagagtacatctacacagaaagaaacggaatctacattatcgacctgcagaaatccgttggaatggtagatgatgcttataaagctgtatctgacatcgctgcagaaggcggcacaatcctgttcgttggtacaaagaaacaggctcaggatgctattaaagttgaagcagagcgttgcggaatgtactatgtaaacgaaagatggttaggtggtatgctgactaacttcaaaactatccagagcagaatcgctagactgaaagagatcgaagctatgcaggaagacggaacattcgatgttctgccgaaaaaagaagttatcgcactgaaaaaagagctggataaactgcagaaaaacctgggcggaatcaaagacatgaagagaatcccggatgctatctttatcgtagacccgaaaaaagagagaatctgtgttcaggaagctcacactctggggatcccgctgatcggtatctgcgataccaactgtgatccggaagaactggattacgttatcccgggtaacgatgacgctatccgtgctgtaaaactgatcgtttccaaaatggcagacgctgttattgaagcaaatcagggagcaacaggcgaagaagaattcgttgaagaagctgttgaagagacagtagaagagtaagactcgatatccattcagctgtcggaggcaacttcggcagctgagtaactgtaaaaactcaattttaggaggaaatcataatggctattacagcagcaatggtaaaagaattaagagaaatcagcggcgctggtatgatggactgtaagaaagctcttacagctaccgaaggtgatatggacaaggctatggaattcctgagagaaaaaggtcttgcaactgcacagaagaaagcaagcagaatcgcagcagaaggtattgtaatgctgaaagttgcagaagattccaaaaaagctgtcgctgtagaagtaaatgctgaaactgacttcgttgctaaaaacgaaaaattccagggatatgttgcacaggttgctgagcaggcactggaaacagaagcagcagatatcgatgcattcctggctgagccatggaaattcgatacaagcaaaactgtaaacgaagctttggctggacaggttgcagtaatcggcgagaacatgaagatccgtcgtttccagaaagtagaagaagaaaacggtttcgtagcttcctatactcatatgggcggaaaaatcggtgttctggttgacgttgtaacagacgttgtaaacgatgaaatcaaagagatggctaagaacgtagctatgcaggtagcagctctgaacccgaaatatacaaacagaaacgaagtaagcgaagagtacatcgctcacgaaaaagaaatcctgatggctcagatccagaacgacccgaaagagtcccagaaaccggaaaaagttatccagggtatgatcagcggacgtatcaacaaagaactgaaagaaatctgcctgctggatcaggtttatgtaaaagcagaagatggaaaacagtccgtagaaaaatacgttgcagaagttgctaaagcaaacggcgcaaacgtaagcatcaaaggcttcgttcgttacgagaccggtgaaggtatcgaaaagaaagaagaagattttgcagcagaagttgcaaaacagatgggaatgtaatttcca

SEQ ID NO: 2554 - DNA, 1838 bp, Unknown
  gut microbiota DNA sequence
ggggttaatatgaaaggaggtatgacttatgaacgaagatttatttggaagtatcaaacagacgatcacagagaccgcaggagctgtgggaaagaaaacagaggaatttgttgagacacagaagatgcgaaacaaagtgcggacactgcaaagagaaattcggaaaaaatatgcggatgtcggtgaaattgtgtataagcgctatgtagacggagataccatggatgaagaactgaccggtcactgtgaagtggtgatgggtctgcagaaagaactggcagagtgtaaagagagcatggctgcaaaacagggaaaaaatgtatgccctgcctgtggaatctccaatccgaaagatgccgtattctgcatgtactgcggtacggaacttccgggggaagaggaagaaaaagaagaggaatggtttacccagggaccggtagaggagacggaagaccaggaagagaaagaaggcgaagagccggaaacagaagttgaagaagaaaccgaagaaccccaggaagaaacaaaagaagaaacagcgccggaacaggatgcagagcaggaagtatgggatgcctgcgcacagaaggaggacggcgatgaagagtgaagaaaaactggatcagtgttatgaagcagtgaaagatcagctcccatttgtaccgaaactggcgctgatccttggatctggtcttggtgattatgcagaccatgtgactgtggaaaaggttattccgtacgagagcatcgaaggatttccgcggtctacggtagtcggacacaaaggacagtttgtatatgcaaaggtagaaggggtaccgaccgttatgatgcaggggcgggtacactattatgaaggctatccgatgcaggatgtggtacttccggtgcgtctgatgaagaaaatgggtgcggagatcctgtttctgaccaatgccgccggtggtgtcaatgagaacttccatgccggggatctgatgatgatcaccgatcagatttcaagttttgtaccgtctccgctgatcggagccaacagagaagatcttggaccgcgttttccggatatgagtgagatttaccggagggagtaccggaagatcatccgggagagcagcaaagcgttgaacattgatcttcaggaaggaacgtatctgcagtttaccggtccggcgtatgagtctccggcagagatccgcatggtacggacactgggggcagatgcagtgggaatgagtaccgcgtgtgaagctgtcgcagccaaccatatgggaatgaagatcctgggaatttcctttatttcgaatctggcagccggcatgagtacacagccgctgtcccacaaagaggtgcaggaagccgccgatcttgccgcaccgaaattccgtgcgctggtaacggaagtgatccgaagaatcggtgaacatgaaaagtcagaatagtatagaaaaaggggagaaaaacggaagtttttcgcccttttttcggttatgatgagagtatctggtgtttggcaaaaacacaaaatgataaatgtaaaagggagagataaaactatggaaaaaagatggtggaaagaaagtatcgtatatcagatttatccgagaagttttaaggacagcaacggagatggaatcggtgatctgaacggtatcacagaaaagatggattatctggaaaaactgggagtgaatgtcgtatggttatcaccggtataccagtctccgaatgatgataatggatacgatatcagcgattatcgtgcgatcatgaccgagttcggaaccatggaagattttgaccggatgctggcagcagcacatgagcatggaatcaaaatc

SEQ ID NO: 2555 - DNA, 4021 bp, Unknown
  gut microbiota DNA sequence
gctactacgaaacacaggatgttacgtacatgatgaacggggtggagaagacccgtacggtaattaaagatggaagcttccagtatctgacagacgatgcgggaaaagcagtcacagaaggggttgccttattcagtggtgacggcgaaagcgggttctttaattacatgtttaatggaattgtcagcgattctgcgattcagatcattgcatttttgctggtagttggtggtgcgttcggtatcatgatccgtacaggagccatcgaagcgggactggtcggactgatccgcaaggcaaaaggggcagaaaagttactgattccggttctttttgtactgttttctcttggcggggctgtttttggaatgggagaggaagcacttccgttcaccatgattttgtgtccgctgtttgttgcggttggatatgatacagtcattgcagttctggttacttatgtggcaacacagatcggttttggtgcttcctggatgaacccgttttctgtgggtatcgcacagggaattgccggcattgatgtgttttccggtgcgggattccgtatggtgatgtgggtggtatttaccgcactcggctgtggaatgaccatgttctatgcagcgaaagtgaaaaaaacaccgacgatctcggttgcttataagacagatcagtatttccgtgagcagaacgagaaaacaggtatcgatgatggccattctttcgggatcggacacattctggttctgctgacactggcggttaccgttgtgtgggtggtctggggtgttatgaaaaaagggtattatatgccggagatcgcaacacagttctttatcatgggtgtcgttgcaggtgtgatcggtgtgatcttccatctgaatgatatgaaaatgaacgatattgccacttctttcaaaaacggagcgaaagatctgatcggtgcggcactggtagtggctatggcacagggaattatgcaggtactcggtggttccgatccgacgacaccaacggtgatcaatacgatcatgtatggaatctcaaaagcactggcaggactttccggtgcggcagcagctgtattgatgtatctgttccagtccgtatttaatttctttgtggtatccggatccggacaggcagcagttacgatgccgatcatggctccgctggcagatctgctgggagttacccgtcagacttcagtacttgccttccagctgggagatgcatttactaatctgatcgttccgacatccggatgtctgatcggttctcttgcaattgcaagaatcgagtggtccagctggatcaagttcatgtggaaatacctgggtatactgatgatcggggcagtaataacgattttaattgcggttggaatcggattctgatgcaggcgatcagtggaaactgattgaagagaaaataaatctattgtagaataaggcgtgtagatgaaaaatgacttttttcgtatacacgccttatttacgcgaacaacgaaccaaagtccgtgcttgcacgagatcctggcaactggtggagtatacggattggataaaggagaagagaaaatgaaattaataaaaaatattgatgtatatgcgccggagcctctggggaaaaaggatgtgcttattctgggtgataaaatcgcaaagatagaggaggcaggcgggatgccggagattccgtttcttttaccggaggatgtgatcgatggaagcgacaggattcttacaccgggatttattgattgtcatgtgcatgtgcttggcggaggcggcgagggaggatttgccaatcgaacaccggaagcgacagtggaagggatgacaagattcggagtgacgacagttgtcggatgccttggaaccgatgggatcggccgggatatgtgtgcactggtggcaaaaacaaaagggttaaatgaacagggaatgtcggcttactgttataccggaagttatcagattccggttcgcacactgacagacagtgttacgaaagatattatgatgatccaggagattatcggaaccggagagatcgccatctcggatcatcgatcttctcagcccacgtatgaagaatttgtccgggtggtggcagataccagacttggcggtgtcctttcgggaaaggcgggagttgttaatgtccatctgggagacagtccaagatgtatggatctgatcgaacgggttgtggaggaaacagagataccggcatcgcagattctcccaacccatgtcaaccggaatgaaaaacttttctgtaaggcgatcgagtatgcattaaagggcggaaatgttgattttaccggaaatgaagatatcgactactgggagaccgtctgtgatgaagtacgggtgtgcagcggcatccgacggatgatgcaggcaggtgtggatccgaaacacatcactatatcttcggacggacagggaagtctgccgctgtataacgaaaaaggagaattccttggaatgggtgtcggccagtccagctgtcttttgaaagaggtaaaagagtgtgtacagaaagcagatattcctctggaaatcgccatatccaccatcacttccaatccggcgcggattcttgaactgaagggaaaaggaagaattcaggaaggatatgatgcagacttgtgtatcctgagttcggaactggaacttatggaagtgatcgcaaaggggattgtcagataggaagaagagtttgtcagagcaactctccacttgcaggaactttcataaagtgctatagtggataagcacgaaataaaggagtttaggaaaaatgagaacagcagatttttattatgatcttccgcaggagttgatcgcacaggatccactggaagaccgttcttcctccagactgatgcacctggacaaagagaccggagcactggagcatacagattttaaacatattgtaaattatctgaaaccgggcgactgtctggtggtaaatgatacaaaagtcattccggccagactgtacggccataaaaaagagaccggagcagtcattgagatccttctgttaaaacgccgggaaaacgatatctgggaatgtctggtaaaaccgggaaagaaagcccgtccgggagcagtcattgattttggtgacggattactgaccggagagatcatcgatgtagtagacgaaggaaaccgtctgatccagttccattatgaaggtatctttgaggaaattctggatcagctgggagagatgccgctgccgccgtatatcactcacaaactgcaggataaaaaccgttatcagactgtatatgcgaaaaatgagggatctgcggctgcaccgacggcagggcttcatttcacgccggaactgttagagcaggtaaaagagatgggtgtgcagatcgcccatgtaacccttcatgtgggcctgggaactttccgtccggtaaaagtggacgatgtggaaaagcatcatatgcattcggaattctatatcgtagaagaagatcaggcaaaactgattaatgatacgaaaaagaatggtggacgggtgatcgctgtaggaaccacaagctgtcgtacactggaatcagctacgggagaagatggtatcgtaaaagcaaccagcggctggaccgagatctttatctatccgggctatcagttcaagtgtatcgatgccctgatcacaaacttccatctgccggagtctacactgctgatgctggtgtccgcactggccggaaaagaaaaaatcatgcatgcatatgaagtggcagtgcaggaaaaatatcggttctttagttttggggatgcgatgatgattttgtagagtgattcactacaaaatagcgatacaacagattatggagatatgaagaaagccaggggtgattaaacctctggcttttctttgtagatgaacgtatgagataatccgttgcggaatgtaatagagtgaacggctccgtctttgaaaacgatgttgtctatgatgctgctgagaaaagaatcaa

SEQ ID NO: 2556 - DNA, 2043 bp, Unknown
  gut microbiota DNA sequence
agttacgagcgcaattattacagaatggcgcacgtatcggaagaaatgtcagtagaagaaattgcagcagcacttctaggtacactggaaatccggttcacttgccacccgtataaatattcatacgacggcgaaagaacactgacactcacaaaaacgacaagcattttcaatacagaaggctttacggcttatccgtacatgaaaatctatgcgacgggtgcggttacgttgtatatcaacgaccgcgcccatacattcaaggaaatagaagactatatcgaagtagacagcgcgttattaaatgcgtacaaaggggacacgctacaaaataacaaaatgactacgacattatttccgaaactggtagcgggcgaaaataaaatacgttgggcgggcaatgtgaagaaaattgacattgtgccgcgttggtgctgtctgtgataccgattctatatgatccccttgaaacacaatttgattcaaacggaatcggacttctgacggacgcgatatcttgcattgtagaggaagaaagaaacggatcttttgaactgactttacaatatccacaagaagggcgactggcgaaatacatcacagaagatgcagtaatcaaagcaaaaccaaacgacaaagacggcgatcagctattcaggatctataaatcaggaaagccgatcggtggcgtgaacacctactacgccgaacacatcagttacgaattgaacatgaatccggtatgccgtccgaaaatatccgggaaaaacgcacaagaagcgatcgcgcagctattagaagaagctgtgatcggaaacaactatacggcgtggtcggatatcacgaccagaaacagcactcagatagacgacgtgttaagcgtcagaaacattctgggcggtacagaaggatcaatccttgacgtctggggtggggaatttcaattcgataactttacagtaaagctgcataaatcccgcggatcagataccggggcaacgatccggtacggaaagaacctgatttcggcagaacaggaaagaaacatcggagacgtgataacggcgatatttccatattgttattacacaccggaaaaagaggacggagcaacagaagaacccgatccggttttcgtgtcacttcctgaaaagtttatcaacacgccgaacgcggacaaatacgcccgcccaaaatgcgcgcctatggatttttcggacgaattcgaagacggcgtgatcgtaacagaagaaatgcttcgcaaggtcgcgaagacctacaccgaaagcggaatcgacgaaccgaaaatatcgatcaaagcgacattccaaaatctgaaaaagacaaaggactatgaaaatatacaggcacttgaaacgatcggaatttgcgacactgtaacggtcatgatcgaaaaactgggaatcgaagtcaaagcaaagatcgttaaatactcatacgacagcatcaaagagcgattcgacagtgtagagattggagaaccaaaaacaaacctgacaaaagcgatcacggccgcacagaaggaacagaaagaacagatcgtaaaatccgccacccgcgcggaaatcatacagaaacgtatagaacagaccataaaggacgtgacggcggcaatcacgggcaattctggcggccatgtgcttttatacccggcggagaatccgcaggaaatctatatcatggatacggattcaacagcaacggcgaaaaacgtatggcggtggaatctggcaggacttggacattcaagtaacggaatcggcggaccgtatgaaacggcgatcacggcagcaggtcagatcgtggccgattttatcgcagtcggaaagttaaacggcgcactgattgaagccgggaccattaacgcggaatccctgtcggtagagtataaacagagtgttaagaagtacacagacgacggcgacgcgaaactgctatcggaaatgaagtcgcgattcgaagtaacaggagaatcgatcacggcagaagtggaaagagcgcaggcggcagaaaagaccatat

SEQ ID NO: 2557 - DNA, 7791 bp, Unknown
  gut microbiota DNA sequence
aaagataatctgaagttcttcttgaacaagatcggatgggatgaagatgtggattgtttttcgattgttccggtgaaaggaaaaaagattgttgcgaaagtatggggaagaccaacaaatgccagtattgggatatacaaactacagggaacgccccggcttttagatttcctgtactctgcaggacttggaagccgcagatcggaaggccatgggaaatgggaaatcgtctggtagagagaggtgatattttatggaaaaatatgcaattacgccaggtgattttctgaaaaacgccggaatcgtcgggatgaaatatatactggattgcgcaaaggcgcaggaaggtgttgactttggcatatcggaagacggtcaggagatgtggctgaactgcgaatttattcaaaatgcggactggaccagtctgtatttccaggcatgtgtgcaaaattttggaaggtttactgtttaccaaggcgtaatggagaaaatcaagtgctgtatcgggaaaattcagaatgaaaaatggaatccgggaaagaacgaaaaggatgatttgaaatttatcaatgacaaactgctctcgaacagttaccaggccggctttgaaaatatcaaagatcagatcgaacatccggaagtttatataacactgaaaaaagaaaaactgattgataaaatgacagcggaagaattactggaaaggctttcgaaattacaggtgtttctggagcaggagaaatgcaaagagacgtttattatgaaaagtgtagtctacaactatatcaatcgtttctgggatggaaaaagttttctgcttcgctcgaatgcaaaaaaagatatgagggaacagtttgaaaaagatttttcagaaccattccgaaaatactttatgacagatcatacaaaagcaaaggatctgtgtattgactgtggagaacctgtaaccacaaaagagaaagtgtccatcgcatttatgaaggaagtcggggacgattttacaagaaaacggtctgcgttctggaattgtaatgtggatgcgttcctgtgtccggtctgtacgtttctgtatgcagcaagtccgcttgggttccgactgtttgccaataaatttgtgtttgtcaataataacagtgatatgttcactctgctggcagcaaattccaaaaacaggaaaagcagtctggaaggagaaaaagaagagaatcagagatattcccagtggtttgcggaaactctgaatatcatattgaatgagaaaagacaggaactttccaatattcaggtgatcctgcgtggaaccggggataaggacagatataaactttctattatcaacaaggatatactgaatatcctgaaaagggaagatgtagaaaaagcattgaaaaatcttggtcagtatccgttcacaaagatcagaaatgattttgtaaatgtgcatgaacaggctgttatgaacctgttgggccatcagaatcagtatattttgttagattccctgctgagagaagccattgcagggaatgctgcatcaaactttcatatacattgggtatatgagattcagaagggaacagagatcagttacaaaaaagaagaagagaaggaggttcttatgtattgcatcagtatgaaaaagagcggttcggaattacgaaaagcgatcatgaccgcaaaaaaagacacgaccggagatagtctgcgtggtatcgagtatcagctgcttaatgcgctgtcggtaaaaaatacagagaaatttatggatatcgttgcgagactgtacagttcctatggatcggaaaaactcctgataccgaatggaatgattcggatgttacaggacaaagaaaaattttcggagtatggatacgcatttgttttaggactgattggatgttatgaaggaaagaaagaggtagaacaatgagaagagaaggattgacagtaactatggtttttcttgcggaaagtgccaattacggagagggaatcggaaatatttctacattaaagaaaatgtcaagaggaaaccacgagcagtattcgtatatttccaggcaggcgatgcgttataacattgtccggcaggcaaactgggatcagactccggtggacggaaaaagcggtgtggttcagtttgcaccgtctgcaacgattgcggaatatccggaaatcgatctgttcggctatatgaagacagcggcaaaggatggcgatcagaaaggcggagcgtctacaagaagcgctgtagtgagactgagtaatgctattgcactggagccgtttttgggtaatctggagttcttaactaacatgggactggcagcaagaggaaagctggagaatggaattgcacagagcgaaattcagcggtcattttatacttataccataacggtcgatctggaccgggtagggattgacggagaagtgcagatcacaggagaagaaaaagcaaatcgtgtgaaaacacttctggataccgtgcagtatttgtatcgggatatcaaaggcagaagggaaaatctgagtccgttgtttgtgatcggtggcagatatgaacggagaaatccattctttgaaaacaggatccggatagaaaatgatcagatcaatgtagaaactctggcagaactgttagaggatgacgcgattcgtacccacacatttaccggtgtcgtaacaggaacttttgacaatgaaaatgagatccggggaaaattatccggagaatccgtaggtgcagcattcaggcatttaaaagaggaagtggaacagtattatggagaaagcaattagagttcagtgttttcagaacctggtaaattatcgaaaaccgagcagctttatcataaaagagacattcccgcttcctccgtattctacggtgcttggaatgatccatgcggcctgcggataccaggaatttcatccgatgaaactgtgtattcagggaacaaacagcggaatggtgtcggaactgtataccagatattccttttcttctggtacgaagtatgaagagggaagacatcagctgtgtgtggatggaaaatatggtgtgtttaaggggatcgcgaatgtagaactggtctgtgataatcacatggtgattcatattattccggcagaggaagattttgcacatgtatatcaatctcttctatatccgggcaggtatttatccctgggaagatatgaggatctcctggatatcgaacgggttgacattgtgaaaattcatcaggaagaggaagtagatctcaagcgggatatgtacataccggtagcgatggcagagacactggggattgagaaaagtcgtatgacggtataccatctgacaaaggaatatgagattaccaaacagggtctgcggcggtggaaaaaggaaaatggaagagtcaatgctttttattatcctgcagaaaatacactggggcagggtgcctacgtggacgatttcgaggaagatgcagcgttagtgttctgttaaagaaggtcagaaaggcgtgggaatgaaatactatgcaaaatcgaagaaaaagggattatccgataaagagcgggggaaacagataaaagaaccggaagaagaacaaaaaacactgaatagccatcaggaagatattgtgcggtgtgctgaagcgttttttgaagaatatggccggtatttttctgaaaaagagaaacggctggtcatagaagcctgctgcattcatgattgggggaaggcgaatctggtctttcaggcaatgataaatccagaacttgccggagaacggaagttaaatgtgaaatctatcagtcagatccctcatggacaccttagcgcagttactctgtcacaaaacgaattctttgcaatggacgatagttttacgaaagatgattttggggcttttgccacggcagtctatcatcaccatacgagaaaagaccaggaagacagttcggagcttcgtacatatggaaagaaatattatctggaagagatcagtgattatcttggacagaccagaacaaaactgtactgtagcaacttgaaccatcttctgtttcacaataacggatatagtgggaagttcctatgtgatcctgcagtctggaatgaatatcttctcataaaaggattgctgaataagtttgattatacggtcagtgccggatatgagagtgcggaactggcgtgtgatatcagggaaaaaaggttgaaaaaagaagtggagagttttctggaaggaaaggatttacggtctgcccaacagttcatgaaagagcatacagatgataaccttgttgttattgcacctaccggatccggaaagacagaagccgctttgttatggcttgacggggagaaaggattttatacgctgcctttgaaagtttcttccaatgcaatttattccagaataaaaagcggatatggttatgaacatgcggcgattctgcattcggacagcatggcgatgtatctgaaagaaaatccgggatctgcctgggaaaaacaggaacaggcaaagttgttagcgaatcctgttactgtgtgtacgattgaccagttgtttacgtttgtttacagggcgctggggacagagatctttgcagcaactttgaagtattccaagctgatcatagatgaaatacagtcttatgatccaagaagtattgctacgatcttatacggtctgaaaaccatccagcaaatgggcggcagatatgcgattattacggcaacttttccacctgtactgaaagattttatggagcaatacggattggcagatcattgtttgtttgcagactttacagaagatccgggtattctcattcgtcataaggtaagcatccagtattcggaaatgtatctggaagagattgcaaagcaggggaaaaccaaaaaagtactggtgatttgtaataccgtttccagggcgcaggaggtttatgaaaaactgcgggaaaggaacgattctgtgtggctgttacattcccgttttattcgcagagaccgtaatttactggaacaaaagattatggagttttcagaatcggatgaagcggggatctgggtcaccacgcagatcgttgaagccagtctggatatcgattttgatattctgcacacggaaatgtgtacagcagacagcttgttgcagcgtatgggaagatgtaaccggaagggaagaaggattcctgaactttccaatatttttgtatatgataacaaaaatggaagcggaagtatttacgaggagaacttgtatcagcgatcgctggaaaaactgaaaaagtatgaagatatccttttttcagaaaaacagaagacgaaatatatgaatgaagtgtatcggacagaagcgatacggaatacagaatattacaggaaaattcaagactgtatggataaattctcggagatccatccggcggaatatactctatcggaagcgaaggtgcgcgatatcaagagcattacggtcattccggataccatctatgaagaaaatcaagaactgtttgaagaagtagaagacagatatctatcaaaagagagaaagcaggagattcggacaaagttgcaggatttaaccatgggaatcaatctgaggacctgttttggacatccggatggaatagataaggcagcaattggctcgacagacatccatcgaacacagtttgtttatgagtttgattgtgaaacactgcaaggacgaggtcttttgcttggagagaaggcagatagtatctttttataggaggtacgacgtgaaagaaaatataactggtatgatggtatattattacttcgtctgcaaacgaaaactctggtacttctgtcatgaaatcacaatggagacggagaacgaagatgtgttactcggaaaactgttggacgagagcagttacaaaaagaatgacaaacacatttctattgatcagataatcaacattgattttatgaaagaattcggagagctgcatgaggtgaaaaagagtaagtctgtagaagaagcagggatttggcagatgaaatactatctgtattacctgcagcagcgtggtgtgaccggaatgaaaggaaaaatcgattacccattattaaaaaagacaatgagtgtggagcttacagatgaagactgcggggaaatagaaaaaatcatctgtgaaattacacagataaaaaaaaggaatataccaccggatgattgtaataagaaaatatgcaagaaatgtgcgtattatgatttgtgctttatataatacgaggtgagtgatatgaaacaaagtttttatgtttataataacggggacttaaaacgaaaagataacacacttcagtttacgaatcgcgatggagaaaagagagatataccggttgaacggatttctgatatttatgtgatgtcggaaatgtctttcaatacagcttttatcaattatatttcacaatatgggattccgatgcattttttcaattactataatttttatacgggaagttattatccgagggaaacattgctggcagggagattgctggtaagacaggttgaacattacacggattatgagaaaaggattgtgttggcgaggaaatttatcgaggctgcggcggataatatttatcgtaatctcagatattataatggaagagggaaagatgtttctgtttatatgaaagaagtggattcgtttcgaaaacagattggcagtacgactacaatcgaatcgttgatgggtgtggaaggtaatatccgaaaacaatattatgctgcgtggaatattatcattaatcaggaaatatcgtttgaaaagcgtgtgatgcatcccccggataatatgatcaattcattgatctctttcgtaaatacgctgatctataccaaggtgctgggagaactctaccgtactcagctaaatcccaccattagttacctgcatgaaccgggggagagaagattttctttaagtcttgatcttgcagaagtgtttaagccactgattggtgaccggctgattttttccctgttgaatcggaatcagatcacggaaaacagttttacgaaagaactgaattttcttcatctgaaaaaagatgcctccaaacttatcgtgtcggaactggaaagtcggctcaagaaaacggtgatgcataaagaactgggaagacaggtctcctatcagtacctgattcgtctggaagcatataaattaattaagcatctgattgacgaaaaagagtatgagggatttcgaatatggtggtgaagtatgtatatcgtattagtatatgatgtaagtcaggaagaccatggaactaagcgatggtcaaaaatattcaagacatgtaaaagatatttaacacacatccagaactctgtatttgaaggggagataagcagagcgcagctggcaagcctgcagcgggaactgaaacagtatatcgatccggagttggattctgttattctcttcaaatcacgtcaggaaaaatggatggacaaggaattctggggcagaaaagatgacctgaccagtttcatcttgtgattgtcgacctgagatagagataaaattacgagaggtcgacaaacgtgaaaaacataagcaaaatagtgcttccggtgaaccgtgttatatcgaaataaataaaaagataaaaaaataccatggtcgacaaaatatggtataatatggaagaattagtcggtggttcagaggagcggatattaatagaaacatattggaatgtaaaggagcctgtttgagcgccag

SEQ ID NO: 2558 - DNA, 5451 bp, Unknown
  gut microbiota DNA sequence
taccatggtgccagatcattcagatattcgctgtaactggtcagccagtggatcgccgggaaatgtctcgcgtaagccagtgatttgtccagtccccagaaacagcggacgaaacgtttggtgttcatcgtaaccggttcggagaaatcgccgccctgcggggatacggcaccgatgatcgatacgcttccctcggttccgttcaggttttccatcatgccggctctctcatagaaagcggacagacgggaagccagataagccgggaaaccttcctcggcaggcatttcttccagacgtccggaaagctcacgcagcgcctctgcccaacgggaggtggagtctgccatgatcgcgacatcgtaacccatgtcacggtaatattctgccagtgtcagaccggtgtagattgaagcctcacgggcagcaaccggcatgttggaagtgttggcgatcagagcggtacggttcatcagcggatgcccggttttcggatccaccagttccccgaactcttcgagtacctgtgtcatctcgttcccacgctcgccgcagccgatatagatgatgatatccgcatcggaccacttggcgatctggtgctgcgtcatggtttttccggtaccgaaaccacccgggacagcggcagtgccgccttttgcgatcgggaacatggtatccaggatacgctgaccggtgatcagcggtttggatgccgggaaacgtcttttggtcggacgcgggacacggatcggccatttctggcacagcgtcagttcttttgtggttccgtcatcaagttccagtgtgacgatcggatccaggatcgtgtaagcgccgtcagcggctgctttgataacggttccctccacatccggaggaaccatggatttgtgaaggatacttgcagtttcctgggtttctgcgatgacggttccgccggtcacatgatcgccctcggagacggtcacatgaacatcccatttttttgcggtgtccagagagtcgacgctgacaccacgggtgatgtatttgccggaacgggcggcgatctcacttaacggacgctcgataccgtcgaaaatgttgttcagaatcccgggtcccagtgttacggagatggcatctccggttccgacaacttctgcgccgggtttcagaccggtggtctcctcgaagacctgtacggtggtggctttctttgacagggagatgacttcccctaccagatgctcctcgccgacatgtaccatctcagacatacgaagaccagtatttcccttcaggtaaataactggtccgttgattccataaatgattccttttttattcatctgtcatacctccggcaaagacaaattcttcttttgcttccctgagtaaagtagcaaatgagttgtctatcaatatatttttggagcggatcacggcgcgcataccgcccatgaaagcttctctggatactaccggggcaaagccgaagcgtgcggcaagttccgggatccagttctggtctgcgggatcaagataaaccacaagggcatcttctccggcaaagtcgcgggcttcctggatccgctgggagagatattccagatattccggtgtggagcgaaactgtgcaagacgctccgccacatcgtgaaacagttgctgcttgatctcttcggtcttatcggaaagaagacggcggtattccagttgtctggcagagacggttttgttgatctcgcgtttgagattgtccgtttccgcctgaatatgagactgaatctgccgttctttggtctctttatgttcctggaaaatcttatccagggcttcctgatgctgtgtctgcacctgctgtgcctccagcatggcactgtcgatggaggctgtataaaaatgctgtaatttttcttcgatagtcaatgtattcaccctctttgatttatagttacagttttagtccaatggcttcgttgacataagaggtgataaaatccggtttccggccggtaccgtgacggtcggggatctccacgatcagaggtaccttgtgatggagcttcacctcatccacaatttccgggaattctctgccgaacttttctgtcagcagaagaatcccgatttctttatcggccagagccgtttccagagcggtgcgcagttcttctctttcgtgcaccaccacaccgtccaccccggcgagccgcatgcccgtctgggtgtcgatgttgtcactgatcagatacattttcataaagcaaaacctctttgtaaggattaaagtttacctaagatcatgaaggaaatgatcagaccatacagagcaataccttctgccatggctacgaagatcatggatttaccgaacagggaaccgtcttcactgatagcacccagggctgcacttgcagaacttgctacggcgataccggaaccgataccggacaggccggttacgagagcggcaccgagataaccaagaccggttgcaagaccacttccggctgcatcagtagcagcctgtacgttctgcgcaccggcgaacatggcgatggttcctacaaggagtgtgccaaagaagaagaaacagttgactgccagagactttttgtaacgttttttgtttctctcgcccagaagaaatgcgcctcccgggatgatgatgctgagaatcagtgctacggcggtaagaatttcgataatagttgacataataatatcctcctgcttatttatttttggatttttttaaaaatggctgaaaagctcttccgcttcctttatagaaacggctgaacatctcataatattcgagacggagtacctggatacctacgataagaccctccatcgcggtaacgaaaatatttccaaggatcacgacgatccagttcgggcttccggcttctgcaccggcaagcatcagtacgacttccatcatagcggcatggctgacggcgaaagcgccgatacggacgaaagaaagggtgttggacagataacttaacatgacttcgaagagttcaaaaaagctctgtacaaaatacatgcccttgcttccctcgatgacgggactttcttttttcaccattcttgccagaggctccttcagcataatgatcactaacggaataccgaacatcacgccgagaaccgcacctgcgggaagggtgtgacctgtcataaacaggaagatcacagcgaccagggaaccgtagaacaccagtcctgccacagcattctggtcaaaccaaatgccttctacatctttcatgcgaacggcattaataatatgaaagatcattgtaatcaggatcaggaacataccgaaagcgattgcaacgacaaataccgtatttaacgtgccaaggaacggcagattggacatcgcctccaccggacgcagccagagcgcggggatcacatcttcaaaaccgaagatgctgccgaacatcagaccgaagaaagtggagaaaatacctgcagtaccgatgatggccgccagatccatcttcttaaacttatacagaagaaatccaccgatcaccaggcagactccctggccggcatcaccgaacatcgcaccgaagataaacatataggtcagtgccacgaagatcgtaggatccatctcgtgataggacggcagaccgtacattttcacaaacatctcaaaaggacggaagatcttcggattctttaacttggtcggcggttcgccgtgtgctgtggaatacggatctgtctctacgaaacagtagagattctgatcatccgcgatttctttctgaaaagctgtggcatctgtgacagacatccagccgcacaggatataaaagacttcccggttatcttctttggtgcaggcggcaagccggcggatatcgaagttgcgggactgactttccagtttccgtgtggctgcatagagtttttcaccctgcttttgcagcagttcggcaatggtatcctgtagttttgtcagctctttttctgtctgctgcaactgtccggttaactgtacctgtacctgagaaggaatgccgtaaagcttttcaggaacatccagctgttcaaaatgcatggatgcgtagactgcatcgatccggtcagtcactttggtcgggcagaaataaaagccccagatataccggtcatttttatgacatgggtagaagagtgtctcttcactgccatagacatacgtttcaaatttgttgtaatattccctgctgatacgaccaaaccggcaggtcatatagcggaactgcagaaaacgggaaatatcaaagtcaagtgagaggaaaggttccagctgtgtcaggagttcttccagctcttttttctgatcttccagctcttttttctgttcgttgattcgggtcagctgttgatcgaaggattcgatcagtgcgaccgcctcatccagcgtcatggtgagattcgtctggatgtttccggagtccaaaagcttttcgtattccagtgcttttgccagaagtcctttgtagggattgatctgcagataaggagtcagtgtttttaacgtctgcagctgtgcaagagcattttccagatggatctcgtatcgggaaagatactgatccaccacccggtcaatatcggcttttggtccggtgatgcttacaaattgcattttttcaatcataattacatcccccggtgctttttttacttacgatttcgagatatagcgcatggtgtcttccggtgggatactgtaacgaatacattcgagtaccgttgtcagccggtcgatctcatgttctttgtggtagaggtagcagtagattgtggataccgaataaggatccgctttgctttctccggaaaggacatgtttcatgatgctgctgtacatctcttcaagcgtatgtgagttcagtttttcgtaacgtcgtccatagtaggtccggtcaagaagtgattcgaatgctgtcatcgtctcagcttctaccagagcagcgatatcttttttatgcagcttgtaattcacaggaatcagcagagcatagatatcggcagcggtcatatggtaatactgtttggaacggtagatccactgaagattcagcagatcaaatttgtttccgtaggctttggtgatctcttccaggttctttttggagagaatcttgtcttttgtcttccatatggcagaaaaataagaaagatccagtgccatctcgtagtcaaaaagcgttggtgtttccagaccggacagtgcggtcagtggctggtaataactggttccccgcagatgactgacaaattcttcaatggactgagacgcggtcagcaggttgatatccagctgtgagtgcttatcgaagaatggtttgaataaagaaagatccagatttacatctctgtggtcaaagatcttattcagacattatttcatgatggacacttcgtatcgtccgaaataaagat

SEQ ID NO: 2559 - DNA, 6552 bp, Unknown
  gut microbiota DNA sequence
gctataattggcgataacagaggggaaaaaattaccgggcacggagtgaacagtaacgggaaatgagtataaaaacaggggtgagagaattgaaaaaaagaaaatataaatatctggcaggggcactgttgtgtcttgcagcagtgaacatacaggcgccggacaccgtctgggcaggcagctggcagcaggaagggagcagctggtggtatcaggaagatgacgggatctggccggcgtggcagtggaaagaaatcgataacaaatggtattatttcgatgaaaacggctaccgggttaccggctggcggaaaatcgacgataactggtatgattttggcgaggacggtgtattgcagaccggacgctgggtcgatgagtattatgtgggaaccgatggcaggatgcttgcggacacctgggctggcagatactgggtagacagcgagggcaagaaggacacttcgataaaaaaagaaaaggaactgccgttagagagtctgacattaaataaagaatccattaccctgctgcagggcgagacggcaaatcttctgacacagtggcagccgcaggacaccacgcgatggaaatacatgcagtggacgagttccgatcccggtgtggctgaggtttccagaggaaaaataacggctgtgggagaaggaaccgcaaccatcacagccagcatgggaacgaaagaagcgacctgcacggtgacagtaacggacagtgcggtatgcaagacagccctgacactgcaggatgctcagtacatctggggcggcaacggtccgcaggatggcggcgtggactgttcgggacttctgatgtatgcctatacacagaatggctatgatttcggtgccgatctgaacgccaacaactttgcccggtacgggcaggagatcagccgcgaagaactgcagccgggagatgcgatctgtacctgttataacggggaaagatatcagcatattttattatatattggaaatgatatggtggttgcctccgagtgcggcggaccgaccgtatgctctctgggattgaactgcgagcagcatgtaaagggcacaaaatgtaactgccgtacctggaaacgcccgttaaatgaaaacgatcttgtgaacgcaaaattcgtccggatggaccgttataagacctgagagtacgaaaggtcagaggattggaaaaagaagaacggatgagaaatgccggggattttcaaaaatatatttgatataagcaaaaataaaatatataagatacagcaggaggagaaaaaatgaaaattggatttatcggatgtggaaatatggcttccgcgatgatcggcggaatcattaaaaatcaggtgacagcaccggcggatatccttgcttccgcaaaaacagctgccagtcgggaaaagaaaaaagaagaactcgggattgccctgaccgcagacaaccgggaagtggcagcctttgccgatgtgctgatcctggcggtaaaaccattttattatgaagaggtgatcaaagagatccgggatgtcgtatccgaagataccatcgttgtctctatcgcaccgggaaagaagctggcatggatggaaggactgtttgagaaacctttaaagatcgtccgtaccatgccgaatacaccggcactggtgggtgagggtatgagctgtgtctgcggcaatgaaaaatgcagcagcgaagatgtggaaacggtctgccggatctttgcgggatttggaaagacagagatcgtggaggaagacatgatcgatgtggtggttggcgtaagcggaagttcaccggcgtatgtatttatgtttattgaagcgatggcagatgcagccgtggcagacggaatgccgagagcacaggcgtaccgttttgcagcgcaggcggtacttggaagtgcgaagatggttcttgagaccggcaaacatccgggagaactcaaagacatggtctgctctccgaaaggaacgacgatcgaagccgtccgggtgctggaggagaaaggactgcgaagcgcggtatttgaagcgatgaaagcatgtgtgaaaaaaggaagagaagtataagaaacggagaagaacgatgagtaaagtatatgtatttcttgcagatggatttgaagagattgagggactgaccgtagtggatctgttacggcgtgccggagaagaagtggaaaccgtatcgatcatgggaagaaaacagatcgaaggctcccataagattaaagtggaagccgatgcactttttgaaaaaacggattttaccgagggcaaaatgctggttctgccaggtggaatgccgggaaccaaacatctgggcgcatacaaaccgctgaccgatatgctgtgtgactgggatgcaagaggaaaacagctggcagcgatctgtgctgcaccgagcgtcttcggggatctgggtatcttaaagggaaaagaagccgtatgctatccgggatttgaagagcgtctgaccggagcaaccatcggggaaggaaccgtggcagttaccgatcatgtgatcacaagccgcggcatgggaaccgcgatcgactttgcagcagcgctgatcgcacggctgcaggacgagaaaaaagcagaagaaatcaagacttctattatctacagacagtaatgccgtggtggaagcatgagcgtttctgagagaaattgtgcaaagagtggcgaaaatcaggaaaaagccctcaaaaccgcaaaaaaagctggcgtttttaaagggcttatgatatactactcaaatgtatgagtatggaaaaatctatgcaaatgtgcaggaaacaaaaaagggagcctgcagttagcaataatacagttagaaaatgatttccataagaaattgaaggaggaactatagaacatgagcgtagcagtagaaaaactggaaaagaacatggcgaaactgacaatcgaagtttccgctgaagaactggaaaaagcaattcagggtgcataccagaaacagaaaaacagaatcaacatcccgggattccgtaaaggaaaagctcctcgtaagatgattgaaaaaatgtacggtgtaggcgtattttatgaagatgcagccaatgctctgattccggaagcatactccaaagcactggatgagtgtgaagaaacaatcgtatctcagccgtctatcgctgttacacagctggaaagcggaaaaccgttcatcttcacagcagaagttgctctgaaaccggaagtaactctgggtgagtacaaaggactggaagttccgaaagcagatctggaagtaacagaagaagagatcgcaggcgaactgagaaaagaacaggaagaaaactccagagtcctggatgttgatgacagagccgttgcagacggagataaagtaacactggatttcgaaggtttcgttgatggcgaagcatttgacggtggtaaaggaacagattatccgctgaccatcggatccggatctttcattccaggatttgaagagcagctggtaggtgcaaacatcggtgaagaaaaagaagtaaacgttactttcccggaagattatcaggcagctgaactggctggaaaacctgcagtattcaaatgcaccgttaagaaaatcgaagtaaaagaactgccggaactggacgatgagttcgcaaaagatgtttccgagttcgatacactggaagagtacaaagcagacatcaagaaaaacctggaagagaaaaaagctgatgcagcaaaacgtgcaaaagaagacgcagctgtagacgcagcagtagcaaacgctaccatggagattccggacgctatgctggatacccaggtaaatcagatgatcgatgatttcgcaagaagaatgcagtctcagggactgaccatggatcagtatctgcagttcacaggaaccactctggcttctctgcaggaacagatgaaaccacaggctctgaagagaattcagacaagactggttctggagaagatcgcagaagctgaagcaatcgagatcgctgatgaaaagatcgacgaagagatcgctaagatggctgaaatgtacaaaatggaagctgacaaactgaaagagatgctgggtgacgctgagaaagaacagatgaagaaagatatggctgttcaggaagcagttactattctggcagaagctgcaaaagaagtagaaaaaacagaagagtaagaagtaaaaacccgcgtccattctaagaatagaaggaaggcctgaatatgagtttagtaccttacgttgttgaacagacaagccgtggagagagaagttatgacatctactcccgtctgctgaaagaccgtattattttcctcggagaagaggtaacggatgtgagcgccaatttgatcgccgcacagatgttatttctggaatccgaagatccgggaaaagatatccagctgtatattaacagcccgggtggatccgtaactgccggtatgatgatttacgatacgatgcagtacatcaagtgtgatgtatctactatctgtatgggacttgctgccagcatgggagcgttcctgctgtccggtggaacaaaaggaaaacgtctggccctgccaaacgccgagattatgatccatcagccctcaggtggagccagaggacaggctacagagattcagatcgtagcagatcagattctgaagacaagacacagactgaatacgattctggcagctaacacaggtcagccgctggaaaagatcgcattggataccgaacgtgataactatatgaccgctgaagaagcaaaagcatatggtctgatcgatgatgtgatcacaaaaagataaaaaaagtaaagataagagggggctgcctgtacaggtggcgccctcttataagtatcagaaaggaaataggaaacctatggcaataaaaaacggggattataaaattcgttgctctttttgcggaaagacagaagaccaggtacgcaagctgatcgcaggtccggacggatcttatatctgtgatgagtgtgtggaaatctgctcagagatcattgaggaagaagtttccagagaccgtatgtccggaagtgatatcaatctgatgacaccgatggagatgaaagaggtcctggatgaatatgtagtcggtcaggatgaggcaaaaaaggtgctggcagtctctgtatacaaccattataagagaatcctctcaggcagaaaaaatgatgtggaactgcagaaaagtaatattctgatgcttggacctaccggttccggtaaaactttcctggcgcagaacctggcgagaatgttgaatgttccatttgcgattgcagatgcgaccactctgacagaggccggttatgtcggcgaagatgtggaaaatattctgctgaagatcattcaggctgccgattatgatatcgagcgtgcgcagcagggaatcatctacatcgatgaaatcgacaagatcacaagaaaatccgaaaatacatccatcaccagagacgtatccggtgaaggtgtacagcaggcgctgttaaagatcgtggaaggaacgattgcttccgtgccgccacagggtggaagaaaacatccgcagcaggaatttatccagatcgataccaccaacattttgtttatctgcggcggtgccttcgaaggtctggaaaaaattattgagggtcgtatggataccaagacgatcggatttaacggttctcttggcatgaaacacgagaaaaatgtaggggagatcctgaaagaagtgatgcctcaggactttatcaagttcggtctgatcccggaatttatcggtcgtgtgccggtagtcgtatccctggatgcgctggatgaggacgcactggtacggatcctgcaggagccgaaaaactctctggtaaaacagtacaaggcactgatggatatggacggcgtggatctggaatttgagccggatgcacttcgcgaagtggcaaagacagccatggagagaaagaccggagccagaggtctgcgttctgtcattgaaaagactatgatggatgtgatgtatgaagccccgtccaatgaaaatatgaaaaaatgcgtaattaccaaagatgcggtaacaggtaagggaaaaccggttgtgaccatcgaagaaaatccggagaaaaagccggcgcgttcctctaaaagaagaggcgcaaagcgaccaggaagaccggagaccgcctgacgggaggtaacagatgacaaatgaaacacaggtaatgccggcggttgccttgcgtggaatcacgattttaccggatatgatcgtccattttgacgtgagccggaaaaaatccatccgggcaatcgaggaggcaatgaccaaggaccagaggatctttctgatcacacagaaggatccgaaagtggaagatccttccgaagatgatctgtacaagatcggtacggttgccatgatcaagcaggtggcaaaagtgccgaaggatatgctccgcgtgctggtagagggaatggaacgggcagaactgatccagttagaagacggtctgtcttatctggaagcggaagtg

SEQ ID NO: 2560 - DNA, 13671 bp, Unknown
  gut microbiota DNA sequence
tcatactctgctgtcagattctgcatttcaccagcctgcgccaacagggtttccggatctaatataattctggatgccattcttctcctcctgtccttacaaatgtactcccggagtctttctgagagtacattacagtttcaagcttgccagctcaatcacggaagacaacttaaaatcttctggtccgcctgatttgcaaatcggcattaccccttccgggagattacttgtcctgtttccggctccgatcggccggatcgaaagtatggatccaatcatactttcgacactggtaaacatttctgatatatttttctcatctgtcgtaaagttctctgcaactattttcatgacatttgcaaaatttccagatttctcactgattttcaaaatctcccgggcattcgaatgggtgtaatcattgatagcatccctctctttgcaattccagttattatgttccgtgatggaagtcagaattcttgcagcctcctccacttctccataagcatttgcaatggtctgtgcaatttccgtaatcgtctgtggattcacatctataatcatcttctcatctcctagcatcccctgatagcacttgcaccttcctgatctcttgatgcaaattttgtcctggcagcctccatataggagataaattcctgtaaaagttctttcatctgccctgctttttgcattctctctgtcataatattaatatacgccgtgcttgcctctccctcccaggaagaagcaatctgtgccaaaagtgactgcgtccgcgcattcaaagaatccagttcattcacataagctctcatagaggaaatattattctgcaatccatctgtgtcgattctgatattagccatgtcgaatccctccactctaaaccatattttgtgatgccataatcgccttaagcatttcatcctttgccttatacacagcaagcacatggcgaatataatttgttgtttcttccagattattatcgagcctttgaatctggttgatcagttcctgagatttatcataaatagcctgtgccgtctggcctttcgaatttgccccttctgtctgcgctgctctcaggctctgcagtgcattttgcaggatagcctgtgcccgctcgatttttctgatatcctctccggccgcgacatcatcaatcgttatttttccattttcatctctgtatgccattttttcagtctcctgtcagaatcttttttacctgctcacaaacgacatttttttcaaccaggcgaagtatcttttcctctgcctgttccgaatccatttcatagaaatatccgcctttttctgcgtaaaaataaagacaggtatcctttccaatatgagtacctttcagaatgatacttctttctgcctggtcagtcgcgatatatgcttcttttttctccgtctgcacattgttttccaaaaggggagaaagcatcctttctatcccctctttgtcctgcaccctgatccggtactcctgtgaccggcactctacggatgtgatccgattctccatatgatgaaatttataatgtacagattctccggcctcttcccgcaagatcagttccgattcatacattccctgataaagaggctgtaatatttctatacatgccggctctacttccagattgcccaggaaatcctcctgggcatatccctttctttcaagactatccagaatttcctgttgttttattttcccccgttttccaatatccttcatagcggcaatataatcataatccaaatattttccgccgcttacttttccgatataatagatttcttccggggacagtagtaattccttcattctttccatcgctcattccttactgacccatggatgctgcaagtcctccgtcagtttcctccatagtattggcagcggtatccagcttttgtgcaaagctttccagaagttctccaaaagccgtaaactgaccattgtagctttcaaaatttgatacataagctgctgcagcctcaccttcaaatacgccactcatactgtttacgattgtacgcatgctgctgatacactgttcaaaattagctttttcactgcgaagacttgttgcgttgcttctcatttcctctggagttacaataattttcatttgatttccacctttctttgatacgtcatttctgacttttttattcttaaaaaacctgtaaggtttttaagctcctgtcatttgctgatttctttattccggatacattattctatttgtatccctgtatttccaggatatctccattccatacacactcttccagtaaagaattctccgggtttaatcttctacctgttcttttgtccataaagctgaccttttccgggtcaaaccaggacaatggatccagtccttccagcgaatctgaaatatcctgcatcagatctttgattttctgatgaacaggaagttccaaatcatattcttttttctgatttattcttattgtgactatgattcgattcatctccctgcctcctgactgtctatgcacttgattttcctgccgccattatctgcaaaaaagattccaaaccctttctccagctctgcatttctctggctttgcgcaaaattatttttataaaagccttcgtaatgcactgccgtatcagacaacgccagagcagttccggaagatttgagatccacgccgagctgatcctgcgtataaaaattgaaaagatcgccctgccggattccgcatagaaccagcacaccatagcctttcgtctttgtcatgatccggtgcagctgcatctgtatatcatccggtaagctgttacattcttttatgtcatcaataagcaggatgatccagggttctttctcgatttccgtcgcagcttcttttcttctctgcatacgactcatcaattcctttaaaatctgagcgaatacatcctgtactttctcgacttctgacaatcgcgcataagcagttcctttctcctgcagcttcgccagagattttttctctgtatccagacaatataaaagtgtattttcatccacttccaataccatctgccctattctctgaagcattgtgctctttccacatccaactcttccggtaacagccattgccgttgtttctcccggttttacataaaccgcttctatgctctctgtatccagtccaacggctatcccctgctcgctgccgctgagatctgccatgcttttcaccgaaatactttccggaagaaccggtatcttcaaagccggctttcctctccaagcttctgtcatgctttctgcttctgctttcagcgccatttcccgctctttatcattttctcccggttcgtacattgccttctggaaattgatcagttcctgatttactttgatcagagcgttacccactctattcggtaatcttgtgtccctcacctgtcctatcaaagtgctgtattcactccggtcagcctgcatgaaagaaattgccccggaaacattggctgtcagcttataaggcacgcctgtattatttacacctgtataaacaaaatagattccttttgatggtccctcactgaaaagacgaacaaatacgtctttataatcctggtttgactccagaatgccactgaagcggtcgatcaaaacaaagacagccggcatctcttcactgaccagttcccggtaagctttcagagaatccactctctcctgattgaaaatttttcttctctcctccagaaaactgatcagcatatttatgagcttgccaagcttttcttcctgtccggatcccacaacgcctcctacctgcgggaaagcctccataccggccatatctgcaatgatataaagatgtatatcccggggagaatacatgcggcataaagatgttgcaattgtccgaagcagagatgtcttccctgtctgggagcttccaaagaccccaaaattgccttccttcaggaagtccatatactgtactccctgcatctgaagctccggcctgtcaaatataccaaccggcaccgataaccatggagcctctgtcatctcccatttttctccgtcaaagctgccttccaccggcagcttcttccagctgaagagatccggaagttctgttttccacggtgatggctgtttctctatacctgccgcttgggctgttttcgctatataagctatcacagcctcaatttctttcttatccgaaacaaatcgtgtatgattttcttctactgttttgatgcgcgaaccatccatggttacataacgcacttccaaagcaccctgttctttattttcccgataaggagcaccggaccaggcggattgaatcagtgcgaaggtttctgccttttcggaggttccaacccttatataagctcttcctgcctgtgtgatcatggccgcatccggttcatgaatcatcaccttactggcggcagcgttttgcaccttcatacagatctgatactgggtattattccaggttccctcatctaccgcatctgcaggactctgggtagccagaatcagatgtactcccagagagcttccctttgcagctatggaatcaaccattttcttgacaaccggtctttccttgatcagctctttaaattcgtcaaacacaatcagaagccttggtacagcttcctgaaattctcccttgtgatgcccttttatgtactccttgatatccttggcacctaccgaagcaaaaatgtcttctcttcgcctcagctcgtgctccagagattgcatacatctgtcaatgccactgccaacatctgtaataatcccacaaacatgtggcagttcttcaagagcatatgccgtactcccgcctttataatcaatcactacaaatgaaacatcttccggatgataattgcaggcaatggacaaaagccatgaaataagtaattcactctttcctgatcctgtcatacctgccacaagcccatgagagcagtgtctgtgaagggataaggaaaacagcttgccaccctctccttctcctaaaggtgccgtgatattcacagcactgtcattctttttccatctctccagtacgttcagatcccgcaccctgtttacatccatgcattgcaggaaggtaagcgaagatgggatctgtcccctggcagcggcatcttcagcctcgatcgccgacatctgtctgcaaaacgcatcaaactttctctgcgaaatcggcggatccatagtaaaccacattttttcatctgctctgtatttgtaaaaagcagtagccgtcctgtcatcataaggatcgtctacatttacgatatactgacaaaagttcggcagataatactgttcatcatataaaaagattgttgagatacccattgcaggatcattttcggaaagcataggcagaaagcactccgtttttttcctggaagcaaaaagaaaaatataatgtggaaccggactcatcccgtttttccattttgcctgaaaatccggatcttttcgttccgcaaggatactgtttaccttttcccggaatttcgcataagaatccacatggtctttttctccgcttagtgtggcgctctcgaaagattctgcagtaagtggatcaaaactcaagtatctcgtctgtaattcatcatcccagatatgcggaagccagcgcatagatttccattcttcctcttcttccggatcaaaaacgcctacgatacgaacgtctctgaagaagtgtagtgtggaaagtgaaaccagcagattcttcagtaagtctgttaccttgcgtctgtttccgatcacacccacagaactatactttaggagatccagtcttgcaggaacatcatctaccagatgcgtctcctgtataatccgatccgttaattcctccagttcatccctttccatatgaaaatcgttgacatccgtaggaggctttacctctacgcaaagaggggcatacccggctcccatcctgacttgtaaaaagtctgagtctgtcgctgttctctcccataaagaagtcgacatcttatttaaaattgtttcacagatttccggcgcaggattctcctgattcgtgatttctctttgcttttctccaatggcacgaatatgtgctttttctccggcaatatagtccgcatatttccggaagcgttcttcttcttcgaccataagcatcttacgtgcttttttattactgtttccaatcaaactcccaacaggagaaatcatcatcgccgcgcgcatagcaagcatagcaggagaaaaagtcgacatggcaattgatgctcccgccatggcaccgctgcttaaaagtggcaaaaagttcgcttttctgatagaaaatttttgtggtttattgggtaaatgcgataatctcacctcatccacaggcaaagactctctgattctcggcgagcgatggtatataggatatcctttccgcgtagagacaatatccgtcgccatcccggggtgattgatctccttctgatatttgaattccggtgtttcatgaaggttataaaaatatagtctgttctccttgcagatcatacgcagatcacaaatgtcaatttcatccccggatttcagcattgcttttttcacgggacttccattcagataggtgccatatgtactctccagatcctctattcgaattctgcctttttcggctgtgataagcaggtgatttctgctcacataggactcattcagaacaatatcattctttttagatcttccaatatgaatctgacactcataaggaatagcatatgattccggatattctcctgtatcccttgtaaaacttacttctatcttcggatatccgcaaatgtgaactaatctggcttcttcgttaatttcctttactgacagagggattgtctttgcagttaacttcaatacttgttttttttcgttaaaacacatcccaagctgcccatctataccaagctctgacatcggaaataaatctttttttccggatccaagggtatattttattccgccttctatattcactcgatataagtatttttcagttaaaattgtaactacatagttcatattgttctttcgattccttcctgcaggtacaagatatcttctctctgttgtaactgttcagtaccttcacagttacgtgccaaaatgcatttaaaatcaccttcggtgatggcattttggcttgtatgtctcgcgggatactacctgccgaatagttatccgacatcttttcatatcaggttcagcagaacttcaagcttcctgtttttcgggaacgccggtgttccatcttttttcataatttgccaaaccatggaatagataccttcgatcggtggagttgcaaattccactttgacggagatcctttcaccaggcataacacgttttttgaatggtacacataattctctttttgcgtatgaaaagttatccccattgatacactctaaataatactcattccatatagttgttcctgtattttcaatgatccatgtatgcgaatgcagctttcccgagatacttgtgaccggatgccggggtatttcttctattaccttataattcccgccattttttaccctggatattttctcatcttccaaatccaataccatgaaatgtaatcctagtcctaatctatccggaaaagcctcattaccattaccatctttcattttccagttcataacataagttccaggtgtttccggtgcataaaacgatacactgggagacaccttatcccccgggtaaacaatttgggggagatgaaggattctgtttttttcgtctaattcaatcacagactggttgcattcgtaataacgattttcccataaaatattacccacatttttcattacccacgtatgatttattatttctcccggagatacaatgcccatatccggtgggtattcatattgaaataaaatgccgtctttctctgttgaactattactatcctcttcttccttaaaatgtatattatgttcccgattatatatatactgtacataaatctgattaatttcttttgggaaaatggccaaaaggacataaaacgtcaggacgttttcccattttgttttcaggcggttcgcctcagtatcaaacaaatattttctgagatttctggaaatctcaacttcttcttcatctataatctgcaaaaatctgtcattcatgcactcttcagaaatctgaccggataaaagagtcttcgcttttccttctattcttgaaatagtccatggatgttcaaacaaatatgtacgcaattctgcaatataccgtgcttcttttttgcaatctgaaaggaatctgcttcttctcgctttgtcattccagattttataattaagccatcgtatttctatcggaagaagttcttcaaaaaactcttttttcgaacgatatttgggaggaaccttccaaacggatgggagttttccacatttacctggataaaaaatctcataaacttcttttaaattcattccggctgccctctctttattatcagtaaacgcgatggtgctgagcgatagttgtattctatcattataaggttgtatttgcattgctttttaagttgtaaaaattatttgttctttggctttattctccggaatcccatattaaatctcagccattcacaggtttcaaaaagagtcctccaaagttctttccagttcatttttgttgcctgcatcatatacagcagaatacatggaatcagatatgtaaactatgatgccgggaaatgaatagatctcttacctttgtaagtctcagatccgccggaatttctttcacttctcctgcacgccgcagcccgacacagcatgtgctaaaaaccattccattccggtcaactaaaagaatactatgtttttaaacaaaaaaacgttgtatctcttgaatcccagtaaattcaagaaatacaacgttttttgtttctgatagctcctttaaagaaaatcttttttatgcaacccgattatccggcctctcatatcattgagcacaccattctgcacaccgtaattccttagttttcacaagttatcagataataatcggaaaactcatctcaacgataaactcattttcctctatctttgcaccaatctctccattcatacgtctgacaaattctcttgcaatagataaccccagtccggtagatgttttacttcttgctgcatccgctttgtaaaatctgtcaaatacatgttctatatcaatctgttctgaagctgtcacctgattactgattcgcaataccgcctggttctgctctcgttttaacacaatgcgtattttcttttctccatgatccagaccattttttattacattctgaataatccggctcagcccctgtttatttccatctatatacaactgttcttccgtaatctgaatgtccggctggatctcccttctcacccaatcatcataatacgaaaaaacagtttctttcagaatccggttgatacaacaggatgtcagttccagacgataggattcattttttaattttgtgaacatgaaaagttcttccagcatttcattcagactgtgtattctttcatgaataatattcagataacgtctctgctcttcgacattttcacatgcttccataagctggaaatacccgtccagagatgtcagtggcgtccggatatcatgagaaagattcgtataagtatcagcaatcagagtttctttctcctgatagtactgtttctctttcctacgcaattccagaagatcattcagcctgtctgaaagcattccgattcctcccagatcaaactcacgatgaatcaacatattactgtcatgtttcataagaaacgccaactggcggcagatgtctttcacctgccgctgatatttccacataataattgattgtaaaataataattcctgccagtatcccaattatgatatacatccgttaaatatccctcttttgaaaaacaacactgcttgcagatatcattataataatgaatacgcatgccacaccaagtgccaaaaaacaatcctttccacttggattcataggaagaagtgatattttcccagtgatcgtatacttatacatctggaaattatgaattcccattttccgaactgcgctgtttactaatccgtatacaatactcattatattcattgtcagacaaatagaaatgaccatgctgatcacattatttttcaaaacaatcgcaatcgccatacagatcaatacgagcgcataatgaagtaccagctcagtcaggaagtaagagcaggcggcctttggatcgccccactccaagtctccgaagacaatatagttcgccactgcctgcagtataaatgcccctgtcattgtcagtgccataaaaactgccagggcaatggatctggagaaaatcaaagctcctcttttttgaacctgaccgccaatatttttaatataaccacttcctatatctgctgttgaaaacagaacagcaaaaatcaccaaaaacaatgcgtaaaattttccctgagaatttgcataaaaaatgtcgtatactgtaatcttttctccaggttctgtaggcaatgtcaccatcattcccacattaatattctctgcagtcggctcagtaaactgctcctgctgcgcagcatcctctttgttcaatgaatcataatctgttttacacataaatgttgtaaacaatactgccactgccagcacgatccagactatatacatactttttgtccgaaacatccggtacaaatccatttttatcatattaagcatggctgacgcctcctgtcagattcaggaaataagcttccaattcttcactggttatagaaatcccttttaccggaattccggccttcgcaagctccatattcaatgatgcactttcactcagacgttcaaaaatgtgaatatgctctttatctgttacctgataactcgtaaatcccatggcatccaaaaccggaattgcccgcttcggatcatccagtgtcaattccatccgttcactacatcttctcattaattcatctcttgtaagttcctgcaataagcttccattgtgaatgattccataatcagtagcaatcttcgataattcctccagaatatgactggaaatacaaatcgtcatatttctctctttctgaagcctctgaatcgtatcgcgaacctctgcaatcccctgtggatccagcccattgattggctcatcaagaactaataagtccggttctccaactaaggcaaggccgattcccagacgctgtttcattccaagtgaaaagtgttttgtcttttttcttcccacctgctccagacctactgttttcaatatctcttccacataatctgctttctttattcccaacagcttgcatttgatattcagattttcatatgcggtcatatttccatacaacccgggcgcttcaatcagacatcccacccgtgagcggactttttgcaaatcctttcctttgcatccaaagatttcgatttctccactggtcggtttggaaagtccactgatcatcttcaggcaggttgtcttccccgctccattccgtcctataaatccataaatggcgccctttttaatatgcatactgacactgtccacagccttatggtgaccatactgcttcgtcaatcctcttgtttccaataacatctcactcaattttttcatctccttttcttatctgcatttataataaaagaggaatcctaatcaaacgcaaataaacagtaaaaaaagagtaaagattatgcatgaagacgataaccgattccccatactgtctcgatgtattcatctgaaatcacttgtttgattttcttgcggatattgctgatatgcacatccaaggtcttcgtctcacccatataaggctcatcccaggcatattcgaaaatatcctctttgctaaaaacctgttttggatttctgagcagtaattctaaaattgcgaactcctgttttgtgatcttagaaagtattcttccatcaattctgacctgaaacgtatctctgttcaataccatatctttaaatgaaagatcacattctatacccgtttctttttcttctttgcgacgaagctgtacctggactcttgccagcacttctctgatttcaaatggtttcgttatataatcatcagctccgctggttaaaatttctaccttttcatccagactgtcttttgcagtcagaacaataaccggaagatttcccttttttcgtatttcctccagaaccgcttctcctgggattccgggcagcatcagatccagcaacaccagttcataaccatgctcctgcatatttaagagcaattttgcttcggttcctgaaaaagcctgttcacaggaatatccttctttggataatgcctcctgaagcaaattattgatattggtatcatcttctacgatcagtattttttgcatgcttgtccactcctctgttttatactgtgaaaacattatatttttgtattatatcacagaatttatgctaatcgcataaattcgcgtggtatgtctgggttttctgtgaccttcgctcacaaaaaacaccttgctggatattatcagtaaacagtaacgaaaaaacagtctgcctttatagaaaatatttccataaagacagactgttcttcatattcacactaattatattttctgagcataattatcttgcgaaaatctcagataactccggtgtggactgcgttccatgacacgcaaagactgttattagaggcttacgcttccggcggtagctcattcttcttaatgacagctatgacttccacatccatgctcaccacatgtatgtccttccccgtggctgtgctcatggtgagagcacttaacatccggattataatccagtgttttattgataaaagcttctactgcttcatccgcatctccggaaactcctccaaaaagcttaatgccggctgccgctaacgctgtctgtgcgccgcctccgattcctccacagatcaaaacatctgcattcaatgcattaagaactcccgccaatgcgccatgtccacttccattcgtatctactacttctgaatgtactacttttccttcctccacatcgtaaatcttaaatgtctctgtgtgtccaaagtgctggaaaatctgtccgttttcatatgttactgctattctcatgataccttctcctttttctgctgcatattttttgtaaatttcctgtttgtaacagcctccaaagctacagttgctgctctgaccgtcacagattctgaaatccccaccctcgatcctgagtggatgtccatcaatgagtgcatttgctattttcttcctagcaatctcgtaaattcgttgaacagttgttcttgcgacttgcatagatgctgcacactgctcctgactataacctttcttgtccaaaagacgaattgtctcatactcatctaccgtcagaacaataggggtttttttctccgtattatctgcaggaagaaattctaaaatttggggaaaatgacagacttttctgcattttact

SEQ ID NO: 2561 - DNA, 2832 bp, Unknown
  gut microbiota DNA sequence
gtgtgccagccatccggtctgcatagcaccgctggatgcgaagtagtaccagttgttatcgtgagcagcccagccagtctccatccatccggcagcgtcaaagccaaaccaggaattgccgatcttgcgtaattcatttgccggataggtaccatcgctgtagcgataccaccatctggatccggagtgaacccatgcaccggttctgcgtgcattacatctggtacagatatcattctgaaaatcatgtccaaaagctttggcaccggctacggtttttgtctgtgctttaaatgcggcattggtaaatactgcacgatatgtgatgcttccgtctttggtacaggtcggatctgtcacttcttttgttgtttccactgtctctgtttcgtaagttccatctgtctcacacagccgttttgcggttacggagctgtaatcagcagcccattcataagtcggctctccgtagacaggagcagattcatcataagaagtcgcagacatcgggtaggcagtgacaaaatcggatgcggtatagtctgcgtttcggtcatggtcgaaaaaatcatccatatttttcagaaaataatcatacggatctctgccggcatcccaggtgctgtccaggttataataactgccgttgatctttacaatgttccatgcgtgatttccaccgcctgctacaccggcgatgactctggcatccagtccggcttcgagcgccagtcgataaaataaggttgcgtatccctgacacacggaagttttgttgatcagtgcggcataagcagaaaattttaacgtatagttcggatcattcagattcttataatcataagtgatattggaacacatataatcatagattgcttttgctttctgatactcgttttttcctgaaagattcagagaactgatcagactggaaactgcctgatccatctgtgcttcctgagaagcgtcggacagataatacatggtaaaggtaagatccatgttatatccggaaggagccgaagagtaggatgcaccaagcgtccatccttcgcagtgccagcgaaggtaatcgccctcttttccgtttccggtatgagccactgcaagattaaaaagctgatcagacagctggtccaaggaattctgagtaattgcagtattggaatgatagtacagatagatcgtggttgtccggttcagcatctgttgccgtaaggttgctgccagctgctgtacatcatctgtatacgaaacattctgtggagtttccaggctgtaaggtgttactgcttccggaagtgcatccgacagaacgtctttgtagaccggattgatataggtgtacggttccagtgtggtttccgcctgtacatttacgttgccgccgaataggaaaaacagcatcgcaaagacaagcgaaagaaaaaatgattttcttttcatataatggtatcctccctcttttgatatgaaatattatatttattcaaatatatcatgtggagagaaaattagcaatgaaaagaaaggtcgatcagctgattggagaaaacagctgatacgtatcgtccccatcccagctatccgtagtttccgtagtccactgcgtaatccggtaatatccgtcctggcagtcggaaggcgccggaagtgtcagagccaccgagagctgctggctctcactgacaggaacctgaaaggtcagagttccttcgccttttgtaaaatccaccgtaaacgcagaaactctgtccacagaacaattctctaatttttccgttacttctttctggtaatcggcggtgtccgcggattctgcaccgctgtcggtgtgagcatcagaaagaatcgtatcaatctgatcgagtgcttcttccgccagtgaagatgcctgataatatgtctggatccggtcggcggactgctggctgagtgtccggttgttttttgcactggacaaagaaagcagtgcgaaagtaaacagacacagcaccagaaaaatcatcagcaaggacggtgcacccatatgaataaaagaaaaggatgtcttcttgtacttcatagtcagtccctcctttgcagatgatgtttgacaggcagttgatagaaaacatctgcgtcgacgccggatgtcagttttgcgacatccagctgcacatccagaagttgtccgttcagcgaccaggttccggataactgccaggcagccgtcttctgagaacagggagcaaaatcagaatcatagaagaccgtgaaatcctctgacgagatttccaccgaatcgctgtaggtatcttccagaagatttttcatatcatccagagaagtagaagcggtgatcagttctgccacatcttctgctctccgggaagcctgcgtcagatcgtgtgcctcagtgctgagcgtatgggattttacaaaaacctgtacgcagacagcacttgccaccgaaaaaaacagaatggcaaagatcagctccagcaaaaaaagactggatggattggcggttggttttcgtttcataggtttctcctttatatacacatactccgaaagtacatagacttaacgggaggaagagcggatcgcatagaccgcgcttgcggtgtccccggaagtatcggtgcagtggaaggtgatcacctgatcggcgctttcttccacagaaaattctttgacagggaggatgctctttccggcagaaggagagagtgttgtcccttctttcacatacagttcccggagttgtccgtcccaggcgtacagataagtaaggtaggaagcgtcatccgtttcctgcagcaggacaaccgcctgcgtgccgtccag

SEQ ID NO: 2562 - DNA, 859 bp, Unknown
  gut microbiota DNA sequence
ctttcctgcagatattcttttacttcacatactcccgcataagaatcttcccaattctgaaactgaaacaagtttgcgataccagcactacctgttatatctgcacttaatttttcgaaatcagaatcgttgatgatcagtgttttatctgcaaaggtcggattttgattaaacagtatctttacatctgttccaacagactgcagctttctgtccccggaaatcgttacagtagatactggctgtatgttatgttcatacccatcttccagattgtactgaaacaaattcaaaaactcgccttcctgaatctgataatcacatccaaaatcccggtttatttctgtcacaggaaggtaattaaaaacatcatctctgatatagggaagctgaatgacctgttctacagtaacaccatttttctccaatatatgaaggacatcctgtactgaaacctgattcattccatagatttctgagtacaccatgtcatagggagaataactttttgcatcctgtagaaaagccggatataaagtcacacatacccccgtaagcataacagataccgctattatgagagaggctaaaacatacctacatccccattctttcttgtgtctgcggacaaatgaccattccaccagatgaaacctcatgtagttgggtgcaagtctgcataagaacgtaccgatctttcctgttttttctgcccgatattgtgcttttagcagggttccgattttatccagcataagtctcccggcattcaggataaaggcaactgccaccactactgtatatagaactgctgtaagcttatatgcttccgggcaaaactgccattgcactccgtgaa

SEQ ID NO: 2563 - DNA, 7032 bp, Unknown
  gut microbiota DNA sequence
catacaagccaaaatgccatcaccgaaggtgattttaaatgcattttggctcgtaactgtgaaggtactgaacagttacatgaaaatgagaaaaagagagggttatcgaatggacaaattattgtatggggtggcatattatgatgagtatatgccgtgtgaccggttagataaagacgtggaaatgatgaaagcggcagggatcaatctggtccgtatcgcggagtcaacctggagcacctgtgaaccgcaggaaggtgtatttgatttcagccatgtgacgcgcgtgctggatgcgatggaaggggcgggaatctctgtcattatcggaacgccgacgtacgcaattccgacctggatggtaaaatcctacccggatgtactggcaaccacaaagaagggaccgggtatctacggggcgcgtcagattatggatatcacgcacccggtatatcgctattatggtgagcgcgtgatccgcaagctgatggaagtgtctgcacacagaaaatgtgtgatcggcttccagctggataatgagacgaaatattatgacactgcgggaaaaaatgtgcaggagcagtttgtaaaatatctgaggacgaaatttaacgacgatctggacgcgatgaatcaggcgtttggactggattactggagcaaccggatcaatgcgtgggaggattttccggatgtgcgcggaacgatcaatggaagtctcggtgcggaattccagaagttccagagaacactggtggatgattatctgcaatggcaggcggatattgtgaaagagtatgcgagggaagaccagtttatcacgcataactttgattttgactggagagggtattcctacggggtacagccgatggtggatcacaagcatgcggcgagggcgctgacggtagcaggtgtggatatttatcatccgacacaggacgagctgaccggtgcggagatttcctatggcggggacagtacccgttcgctgaaagaggataattattttgtcctggagacagaagcgcagggattcccgggatgggttccgtatgacggacagcttcgtctgcaggcattcagccatctggcttccggagcaaatatggtggaatactggcactggcattcgattcataactcatttgaaacttactggaagggactgttgagtcatgattttaaggaaaatgatacctaccgttctgcgaaagtgatcggtaaggaatttgcggagctgggaagtcatctggtgaatctgaaaaagcacaataaggttggtttcctggtgagcaacgaagcgcagacggctctggactggttcccgattgacggaaccgcaggcggtggcggtgcatgcaagtacaacgatgtagttcgttatgtctatgatcagttatataaactgaatgtggaatgtgatttcctgtggccggagacagagagctttgatcagtatgatctgctggtagtaccggctctgtatgcagcgccggaatctctgcttcagaagatcaatgattatgtggcagcgggcggtcatctgtttacgacatttaagaccggttttacggatgagaatctgaaggtgttccacgacagccagccgcatattttggatcggtgtcttggtatttcctacagtcattttacgttcccgaagcaggtgaagctgtctggagagacgtatcactgcgaagataatgagttaaagaactttatggaactggtgaacccggaaggggcgcaggtgctggcttcttatgatcattataactggaagcggtatgcggcagtgacgagaaatgtctatggaaagggaacggctacttatctgggatgctggacgagtgatgcgatgctgcgggagattcttgcggatgtgctgaaagatgcagggctgtggggctctgagcaggaagtggagttcccggtgattatcaagaaggggacaaatgatcttggaaaagaagtggtttattatctgaattattcaccggaagtgcggaacgtggtttatcatggcactgctggagaggaattgtttggaaaagctgcagttgctgatggagaggttttggaaatcggtgcctgggatctgaagattgtggaacggtaaggaaaggggagctgtccttcatggatgaaaactatggagggcggctttctttttattttgtctatcccccggatgaggatataaaagggaaaaaaggcagaaaaagcgtgaaaatatcggttgaaaaaaagataaaaatataaccccgcagggggcttgcggggaaaagaaagacaggttatgataggcacacaacagaaataggttgtaagttcgctcagaccgtactgcctcctccgcatctaaaagcagtatgggttggaaagcaaataatgtcagaagtgaggaaagaaatctgggaaagattcctttcctttctttttacggaaatcagaaaggggaaacatatgaagaagaaaatggttgcggtattgctcgctgcaggtctggtaatatcgttggcggcctgtgggggtgcgtcagaaacaggtaacaccggggaagcgaagacggagaatgaggaaacagcaggtgatgaaccggcagaagaagcaggaaatacagaaaatacagaagaatccacactgacatacggatccggagattatacacggatcaatccggcgatggacgaacactgtgagattaatgtactgttgtttaatggtctgaccgctcatgatgcggatgatcaggtggtgcctgggcttgcagaaagctgggattatgatgaagatacttatacctatacattccacatcagagatggaattaaatggcatgatggggaaccatttacggcagacgatgtaaaatttacaatagaagcgatcatggatccggacaacggatcggagaatgcaccaaattatgaagatgtgcaggaaattacagtcacggatgaccggacgatcgcctttaaactggcagaaccaaatgtggcatttctggaatatatgacaatggcgattttgccaaaacatcttctggatggagaagatatgcaggagtcggatttcttccgtcatccgataggaacaggtccatataaactggaaagttgggatgcaggacagtcaattgtcatggtgaaaaatgaagattactaccttggcagtccgaaaatcgataaagtaatctttaagattgtagaggatgacaatacacaggcagtacagttacagtccggtgagattgatatggcgctgttagatccgaaaaatgcacagagttttaaggatgcagaagattatacttgctatgatatgacgacttcggattatcgtggtattatgtttaattttggcaacgattactggacggaaaataaagatattattccggcagtatgttatggtattgaccggcaggcaattattgatgcagtgcttctgggacagggaatgccggcttatggtccattgcagagaaatatctacaatgatgagaatgtggaacattatgattataatccggaaaaggcaaaagagattcttgagaatgcaggatgtaccatgggtgatgatggcttctatgaaagaaacggggaagagatcggttttgtgatcagtgttatgtcaggcgaacaggatcgaatcgatatcgcccaggcagcggcacagcagttgcaggaaattggcatcaactgtacagtagatatcccggcgcagatggactggggtggacagatggcatgtctgatcggatggggaagcccgtttgatgcagatgaccatacctataaggtttttggtacagataagggggctaattattccggttattccaatgaaaaagtggatgaatatctgactctggcgagacagtatgaagatcaggaaacccgtgcgaaatattatgatttgttccaggaagaactggcaaaggatccggcatatgcatttatctgttatattgatgccaattatgtggcggattcggatatcaaaggaatttcggagcagaccgtacttggacatcatggagttggtattttctggaatattcaggactgggaaattacggaataaaaaggaaagatgagagttgcaaagagactggaaacagtctctttatgcagttctgagaggttagcaatgagtgagttactgaagacagaacatctgtcggtaagcttttttacagatgccggtgaagtggaggcggttcgggatgtaagttttactgtgcgaaaaggggaagttctggcaattgtgggagaatccggatgcgggaaaagtgcattatgcaagagcattatgaaattactcccgaagacggcaaaaatcaagtccgggaaaatactggtgaacggagtggatattacagattatacggaaaaaaatatgtcgaggctgcggggagaactgttctctatggtttttcaggatccgatgacatctctgaatccgacgatcacagtcggaaaacagatcggggaggcggtgaggatccataataaaaaaatgtcgagaggacagatcagaaaaagagttatagaactgatgcagttggtggaaatagacagaccggaagaaaggatccgtcagtatccccatgaattttccgggggtatgcgtcagagagctgttatggcaattgcacttgccggtaatccgaagattctgtttgccgatgagcctacgactgcgctggatgtgacgattcaggcacagattctggatgtgtttcggcggatccagaaaaaactggagatggcaactgtgtttatcagccatgatctaggggttgtagccggagtggcagaccgtgtggcggttatgtatgcgggaaaaattgtggaaatcggaacggcggaggagattttttatgatccaaggcatccatatacctggggactgttacagtcactccccattctgtcagaaggaaaagaatggctcccgacactgccgggcatgccgcctaccctgattcatccgccaaagggtgatgcatttgcggagagaaacgtatatgcaatgagaatagactatgaaaaagagcctcctatgtttcggattacagatacccattatgcagctacctggctgctggatgagcgggcaccgaaggtgaaggttccgacgggaggacgaagaggtggaaaatgatattttactggatgtgcagcatctttcgcatgtgttccgtccgaatcgaaaaatgaaagtaaaagcagtaaacgatgtttcttttcagataaagaaaggggaaatttacggtctggtaggagaatccggatccgggaaatccacagtggcacgctgtattatgaatatatacaaaccatccggaggagaaatctattataaagggatccctgtctgtaaaaacggggaattcaaaaaaaacaggaaaatgttgcagttgacacggcagatgatttttcaggactcggcttccagtctgaatccgggaatgaaagtcggagatatcgtggcagagccactgcgtattcagtcgcggaaaatccgtacagataaaaaggaaatagaaaaacagctggagatggtaggacttgacggaagctatctggaaaaacatccatatgaactgtccggcgggcaacgacagcgggtagcgattgcgcgcgcgttgtttgtaaagccggatctgatcgtagcagatgagccgattgcatcactggatgtctctatccaggcacagatgatcaatctgttccggaaattgcagaaagagcagggattttcgtttctctttattgcacatgatctttcgatggtgaagtttttgtgcaatcgaaccggggttatgtatcatggaaaacttgtggaggaaggaaccacggaggatgtgttttcacatccggaccatgagtatacaaaagcattgctggcagcaattcccgtaccggatccgaggaaagaacgaaacagaagggtgatgaagtgctatgaggggtgagcggatattatattatgggaaaaaggtgcttattttcataatcagcgtatgggtactgtctcttgtaacattttatgtatccagacttgcaccgggggatccactggtttcttattatggagaacgcgtggaaaagatgggtccggaagaaagggaatgggcggaagagaaacttggtctgaatgataaaatatctgtacagtatgccagatggatccgacaggcatttcatgggaattttggaatttcatataaatataaaatggatgttctggaggtactcaaaagcagaatcggcaatacactggtcctcggtggcattggttttttgatcatattttttgggtcgttgcttctgggcattgtatgtgcatggaaagaaggcggatggacagaccgtatgatctgtaaagtgggaaccgtaatcagctgtgtaccggagttctggctggcgctggtactgattcttgtgttttctgtttctcttcgatggctgccaagctcaggagcatatgcggtggggcaggaaaacaatctttccgatcgtatcgtgcatatgattcttccattagcggttatcgtgacagaacatctctggtattatggctatatggtccgaaacaaaatgctggatgaagtccgtgcggattacgtgctgctggcgaaggcaaagggaatgaaaaaatcacggatcatgatcacacattgtctgagaaatgttatgccgtcgtatctgagtattatggcaatttccgtagcacatattatgggtggaacgtatgtggtggagactgttttttcctatccgggaatcggcacgctggcatatgaaagtgctcgctataaggactataatctgctgatggtggtcagtctgctgtccgggatcatagtgattgtctgtaatatggcagcacagattctcaatgagcgaatcgatccgcgcatccgcatcagcagacatccggatatacaggaggtgagggaacatgaatgatccgtttgaaattgtcggtgtaagaccggaacttctggaacgtcag

SEQ ID NO: 2564 - DNA, 2531 bp, Unknown
  gut microbiota DNA sequence
cgatcttcgtcgtacattcctgcagtgcctcccgtacttcttctgaagtaacggtggccgttttgggaagacctgtgatcacatttcttcccttcacttccatcgtctctgcctgcggccgtttgcataccgttccgatcttcatcttcaccgcttctgcggtctgttctccgataaacaggttatgtgctttccgtacatgacggatgatcgcttcgtcaaaatcgtttcccgccactttgatcgaggaggaaacgaccacgccaccgagagagatcaccgcgatatccgtggttcctcctccgatatcgacaaccatgttgccgaatggcttcgtgatatcgatacccgcaccgatggctgctgcaatcggttcttcaatgatgtaaacctctctcgctcccgcctgatatgtggcttcttccaccgccttgcgctctacttctgtcacgccgcttggcacgcagatactgatgcgcggcttgcgaaaggcctttctccccatggctttctgtataaaatgcttcagcatcttttctgtaatcgtataatccgagattactccctgccgcagcggacggatcgccataatgttgcccggtgttcttccgatcatctgacgggcttcctccccgatggctttcaccttgtctgcatctttatcatacgctactacggaaggctcttttaacacgattccttttccttttgtatagaccagaatactggaagtacccagatcgattccgatatctgctgatgccataataatcccctttcctgttcactgcctgtcctttttccggtgaagcttctgtacttcttcatcctgtgacaggctttcagtttattataatcaattccagatgaaatgaaaagttttttttagaggtatttttcgacatactttccggtatacgagatcgggctttttgcgatttcttccggtgttcccttcgcgatcaccgtaccgccccggtcgccgccctccggtccgatatcgataatataatctgcggttttgatcacatccagattatgttcgatgacaaccaccgtgtttccgccttccgacaagcgctgtaagatctcgatcagcttgtgtacatccgcaaaatgcagaccggtcgtcggttcatccagaatgtagatcgtctttcctgtgcttcttctcgacaactccgtagccagtttcacacgctgcgcttccccgccggagagcgtcgtggaaggctgtcccagacggatgtaggaaagtcccacatcgtaaagtgtctcgatttttcttcggatggacggaacattttcaaagaacttcaccgcttcttccaccgtcatatcgagcacatcatagatgctttttcctttatatttcacttccagtgtttcccggttatagcgttttccctggcagacttcacacggaacataaacatccggtaaaaagtgcatctcgatcttgatgataccgtcaccgctgcacgcctcacaccgtccgccttttacattaaagctgaatcttccctttttatagcctctggctttcgcatccgcagttgccgcaaacaggtcacggatctggtcaaagacaccggtataggtagccggattcgaccgcggcgttcttccgatcggtgactggtcgatattaatgactttatccagctgttctatgccgagaatctctttgtgttctcccggaatcgtccgcgcacggttgagcttctttgccaggctcttatacaggatctcgttgaccagcgagctttttcccgaaccggacacaccggtcacacaggtaaagacacccagcggaaacttcacatcgatgtttttcagattgttctgttttgcgccttttaccgtcagccatccggtcggctttttgcgctcggccggcaccggaatcttgatcttaccgctcagataagcacctgtgatggaattttcattcttcatcagctcttccgccgtaccgattcccaccagttgtccaccgtgttccccggctcccggtccgatatccacgatacagtccgctgcccgcatcgtatcctcatcatgttccaccacgatcagcgtgtttccgagatcccgcagatgacataaggtctttaacagcttgtcattatctctctggtgcagtccgatgctcggctcatccaggatataggcaacgcccaccagtccggaaccgatctgtgtggcaagacgaattcgctgtgcctctccgccggaaagggttcccgtcgcacgcgccagtgtcagatagtccagtcccacatccaccagaaaacccagacgggcacggatctcttttaacacctgttcgccgatcagtttctgtgttttggaaagttccagttctctcataaaccggttcagattctcaatggacatttccgtgatctgagaaatgtttttctctccgaccgtcaccgccagtgcttccggtttcagacgctgtcccttgcaggcacgacacggtgtgatctgcataaaggtctcatattcctgtttgctgctttccg

SEQ ID NO: 2565 - DNA, 182 bp, Unknown
  gut microbiota DNA sequence
ttttcttctgcaaggtctgccagttcacggaacacttttccgaactcttcgtatgcggattctaccggttttccttcccatgctcctgcaaaggtgcttacatgggtagctccgaatttttcagcagtgcagatcaccttttccagtgtctttctgtgctctgcgtactggatcgggttaca

SEQ ID NO: 2566 - DNA, 8288 bp, Unknown
  gut microbiota DNA sequence
atatgtataaaatatgatataataatcggaaagtacaaaaagtattcgtataaaacaattcaaaacattttgaggaggaattggcgatggcaaattatgtgattgcggatatccatggggaatatgatgcgtttgaggaacttctggcgaaaatatcatttggagacgaggatacgctgtatattctgggggatgttttggacaaaggaccaaatcccatcaaagtgatgcggaagctgatgacaatgccaaatgcgatctgtattgcaggaaaccatgaagtaatggcactggagtgtctggagtttctgttgcaggaaatctcagataaagcgatcgaaaatctggatcaggtgacgttggataagctggttacctggcaatataatggtgcttctactacgattaatgaattcagaaaattaagcgtatcggaacgcgaggatgtgattgcatttatccaggatttttctgcttatgaagaagtgtcagtcggagagaaagagtatctcctggtacatgccggactgggtaatttttcactggagaaagatctgagtgagtatacgattcacgatcttgtatgggacagaggcgttctgggagaaaaatattttgatgatgtcattaccatcacaggacatacgccgaccatggggataccaggaaatccacatcctggatacatattcaaattaaataatcggatttatattgactgcggagcctgttttccgggtggacggcttgctgcgttctgtctggataccggggaagaattttattcgtcaactcacaggtaaatgccagaagaaaaagaagccattgaaattcctactcgtatcaagtataataaagcattgtcggtaactgcgcatggtttgctcagttacattgcttatgaaaacaacgatgtgactgcaccctaagaaacaggagaaaaccgcagttatgaaaggatgaaaataaagatggaaaataagaaagaaaccctcactgctgccgaagaacagaaacgccagcagcagtttattgaaaaagcccgtgtctatgtcagagaaaaatcagaagaactggggcgcccgctgtatgcatgtacgactacgtttgggtgtcagatgaacgcccgcgattccgaaaaactggatggtattctggaagcggtcgggtatatcaagacggaaaaagaagacgaagcagattttgttatttataacacctgcaccgtccgtgaaaatgccaaccagcgtgtctacggccgtctgggatatcttggcagcatgaaaaagaaaaaaccgcatatgatgatcgctctgtgtggctgtatgatgcaggaagctcacgtagtggaaaagctgaaaaagagttatcggttcgtggatctgatcttcggaacccataatattttcaaattcccggaactgctgtgctatgcgatggaatctgaccgcatgatcattgatgtctggaaagataccgatcagatcgtggaagatctgccggtggatcgaaaatataagttcaaatccggtgtcaacattatgtttggatgcaataatttctgtagttactgtatcgtaccgtatgtccgcggtcgtgagagaagccggaatccggaagatattgtgagagagatcgaacatctggtagcagatggtgttgtggaagtcatgctgctcggtcagaatgtcaattcctatggaaagaacctggagcatccgattacctttgcacagctgttaaaagagattgagaagatcgaaggtctgaaacggatccgttttatgacttctcatccgaaggatctgtccgatgagctgatcgaagtgatggctgagagcaaaaagatctgtccgcatctgcacctgccgctgcagtccggaagcagccgtgtgttaaaagagatgaaccgccggtacacaaaagagtcctacctggctctggttgaccggatccgtgcaaagatgccggacatttccctgacaaccgatattatcgtcggtttcccgggagagacggaagaagatttcctggagacgatggatgtagtcggaaaagtgggatatgacagtgcatttacctttatctattccaaaagaagcggaacacctgctgcctccaaagaagatcaggttccggaagatgtggtaaaagaccgttttgaccgcctgttggctctggtacaggagatcgcaagagaacgttcttcccgttttgagggaacggtacaggaagttctggtagagagtgtcaacgatcaggatgcatctctggtaaccggacgaatgggcaataatcttctggtacatttcccgggagatgcttctatgattggcacattcaaacagattcatctggacgtatgcaagggattctactatatgggaacgcctgcagaatagaaaatgttactgttcactctgacttttacctcaacatcatagaatagtatcaaaacagaatagtaatgtcatggaaaaagtaacatttcagtagtaaaatactggctaaaagcagacagtatttggagagtactgtttagacatcaggaggtaacataatgggtaagaacacgacaaatgatatgacgcagggaaactgcatgcgtttgctggtacagttttttctgccgatcctggcaggaaatctgtttcagcagttatacagctttgcagactccatggtggtgggaaaaggaattggcgatacagcacttgcggcggttggaaacaccagttccgtacattttctgatcattggtttcgcaattgggctgacaggaggattgggaatctgtatttctcagtcttttggaagtggcaattatgaaaaacttcgtaaagagctggcaatgtctgtctggatctgtctggccgttgggattgtgatcacagtggtaagtctggccttcatgcggcaattatttacatttcttcatacaccggaagatctgatgacggaaacactgcaatatttcggaacaattcttgcgggaaccaccattacaatttttaataattttgccatgacacttctgcgttccgtcggaaacagccgggtgcctctggttgcaatgataatttccgccattgctaatgttctgatggatctgttattcgttttcccgttgcatatgggtgtttttggtgcagcgttagccactgttctggcacaggttctgtctgcgctttactgctgttactacataggaaaggaaaaaaatctgatcccgaaaaaaacggactggaaaccacagggtgtgatcatcaaaaaactgacattaaaaggcctgccggttgccgttatgaattctgtcactgcagtgggtggaatggtgttgcagacatttgtcaacaatatgggaacaagctatgtggctgcctatgcggcatgctccaagatcctcggtctttttgaacagccggcaaatacggtgggtttggcacttcttacttttgtgggacagaattatggtgccggaaaaaaggagcggatacgtaccggtatccgggaaggagttatcctgacgatcctgataaatattccactggctctgatgttgctgtgtattcctgagtttctgacttctttcatgttgaatgatgcgtcgattatttcttacacaagagattttctgacggttacaggcatctgtctgtttcctctgggatggctgtttgtgttccgcaacgggtgtcagggcatggggcatacgtttgttccgatgctttcaggagtcctggaagtgtctcttcgagtggtcatggtaaagctgctgactccatatctggcttttcgtggtgttgctctggcagaagtatctgcctggatcggcgcctggatcatgttgatgatcacttactggatctatcaggaaaaaacggattcttttcggtaagtctgaggagaacatcctaccttggtgcgaaactgtcgattgaaatttgaaaggttatgaaatccggtatcgaaagcaatgtcggagatattgcgatccgtattgcgcagaaggtcgcatgctgatcggatacgtacctgattcagatattcaatggctccgagaccgaaattctgtttgaaacagctcataaagtaactgctgctcatatgagcgatctttgccagctgctctatggtaacagattcggaatgatgtttctgtatataagtgagaacaggccgaagtgtttcggtcagccgggattctgtcgaagccgtgtgttcggtgcagagtcccggtgtcgatgccagcagataaaataagcggagcagttcgcttttcagcaacagatccgacgtcgcaagatttttgtgcgcacactgcataatagtccggaccgaatcatggagctcatgataccccggggtttcctgagatacaggaaccagaactcttcgtctggaagaaaagattggcagcagaatatctgtataacaacggtcgtcgtaacttcccaccagcatattctgatgaaaaacaatggtatcatagaaaaaagagctgtgttcatccgacatgatagcatgaaggacgttgggctggatcagaaagatgtctcccggtttggcagagatggtctgatcctcgtatttgaaaaaaccatttccagattttatgtaatttaattccatttcactgtgccagtgcagcggtacactcgtaaaataatccggtataccgcagtcatagtaactgtatggaacctgaatggatccgtgctggcatttttcttttatcgcataaagattcataacatacgcctccgtaaaataaatatctccggcagaataattaaaatcatagaatagtattgcaaagaatactgtttccggaaaatataaaagaatcagttgtaatatatcatataatgatacgtgttgcaacggaaaacagagaagggtatgatgttgcagaatgaaaatctgtggcatcaggaaccctttttttgctgtgcaaaatgatataaattattttttgaaaatgaaatacaggataaaaataaccaaaaaatatatatagataagaagaaacacaagaacattatacaaaaatcatagaatagtatcagaaataaatagtatattgtttgaaatctaagaaaataaatagtattctggtaagcgaaggtagttgttatagagaaacgagacaacatcagaaagaaagagggttttacaaaatgtcaaaatggttagatgatgcaattttttatgaaatctatccgcagtcatttaaagatactaacggggacggcatcggagattttcagggtattatcgaaaaattagattatatcagagaacttggatgtaacgctttatggatcaatccatgtttcttctctccatttggagatgccggatacgatgtggctgattactgccgcgtagctccgcgttacggaacaaatgaagatctgaaacagttgtttgaggaagctcacaaaaaaggtatccatgtactgcttgacctggtaccgggacatacttctgtagaacatccatggttcatcgaatccatgaaagcagataaaaacccatacaccgatcgttatatctggacggataaagtatgggagtcaccggatgtaagctttggcggatctctgagaggtatctccgagcgtgacggtgcggtggccgtcaacttcttctccaatcagccggcattaaactatggtttctatcagccggatccggagaaaccgtggcagcagtcgatcgacgatgaaggaccacaggcaactatcgcagcaatggaagatgtaatgagattctggctgggtatgggctgtgatggcttccgggtagatatggcagagtctctggtgaaaaatgatccggagaaaaaaggaaccatccgcgtatggaaacagatcagagaattcctggataaagaatttccggatgcagcaatggtatctgaatggggtgatccacagagatctctggagggaggattccacatggactttctgctggagtttggtacttcacactccaacgatctgttccgctgcaaagagccgtatttttcatcccgtgcaaaaggaaatatctatgatttcgtagaatcttataaagaaaactgtgaaaaaacagccggcaagggtctgatgtgtatgttctccggaaaccatgatgtagaccgtctggcacgccatcttcatggtgatgaattgaaagtggcttttgcatttatcctgtctatgccaggtgcgccatttatctattatggcgatgaaatcggtatgcgttatgtagaaggactgaaatctgtagaaggcggttacaaccgtaccggttcccgttctccgatgcagtgggatgacagcaccaacgcaggattctccagcgcaccggcaagcagcctgtatattgcgatggatccggacaaagaccgtccgaccgcgaagaaagagatggcagatccgaattctctgtacaacgaagtaaagaaactgatccggatccgtcagagccacaaagctctgcagagccgaggaaagatcacttttgtctatgcagaaaagaatgcatatccactagcatacatccgtgaagccggtgatgagaagatcctcgtgatcatcaatgcagccgcagaggcaaaaacatttgcatgcgatgcagagccaaaagaagcaatctataactttggcgcagccgcagaggctaaaaatggaaaaataactgttccggcacagtcagtaggattttaccggatctgagaaaacataagatagttgacagctgttcgcaaagatttatgcgattcgtataaattctgtacatcgcgaagcgtgttactgggcacagagtgaacagtaacgttatgataattatatatggaggtgtaaaatgagggaaaacaaagtagtttacggactgatcggatatggcggaatgggaagatggcataccgagatcctttccaatgtttcggaagctgtaatcggtggtatctatgacattaaggaagaaaagagagaagaagcgaaggaaaagggcttttttgtatatgaaacagaagaagccatgctggcagatccggatatcgatgtggttctgatcgctaccccgaatgactgccacaaacctatcgccatccgtgccatgcatgcagggaagaatgtaatatcggaaaaaccggtgacattatcttccgctgatctgctggaaatggaacatgcagccaaagagacaggaaaattacttactgtacaccagaacagacggtgggatgatgattttctgatcatcaaaaagctggtagaggagcagaaactgggacatgtcttccggatcgagagccgtgtccatggttcaagaggtatcccgggcgactggagaaaagaaaaggtccatggtggcggaatggtcctggactggggcgtacatctgctggatcagatcctatatatgtatggtgacagaaagatcgagaccgtgtacgcatcacttaccaatgtcactaaccaggaagtggacgatggcttcactgccattctgacatttgaaggtggaacggaagtcctggtggaagtcggcaccaacaattatatttccctgccgagatggtatgtactgggagaagacggtaccgcagtgatccgggactggcagttaaacggtgagatcatccgtaagaccggtaggacggaagagacggtagtaccggttaagacagcagccggtctgacaaagaccatggcaccgagacgggaagataccattgtgaaagaagacttgccaaaggtatccggagatattgcagacttccacagaaatgtagttgcagtgatccgggacggagcagaacctgagatcaaactgttccaggtgatgcgtgtcatgaaactgatggaagcaatcttccggtcagcggagacaaaccaggtgatcgaatttcaggatcaggtgtaacagggaagagcctgaacaattataagtagaaaccataaataaaaattaaaaataaatgggagaaaacaggaggaaataagtatgaaacagattaaaatcggaacctgcgtgccgggtacaaaggcggaagaatggttgaagggatttgtaggaaaaggctttgaaacattttccatcaatttccatatgtcactggaaggaacagatcttgacaaactggcactgaccacagacaaactccttgcaggtacagattccaaggtcactacactcggatattactgtaacccgatccagtacgcagagcacagaaagacactggaaaaggtgatctgcactgctgaaaaattcggagctaccca

SEQ ID NO: 2567 - DNA, 2575 bp, Unknown
  gut microbiota DNA sequence
atacgatacgccgatttatcttttacaggaacttttacaggaaggcgaaaacggcaatccgcaggatgctcatctggcattccagggtgaggacgggatcgcgacggatgaactgtggagtacggcgcagatccggcagatggcagtgcatggctgggagatgctgatggagtattccgggctgggcgcatgcggatggctggagcgcggagaaaattgaaaaaggaggcagagtatatgaaaacggagattctcatggtcggactggatctggacggaacggtatttaataacaacaaagagattacagcacataccagaaacgttctggaagaggcaatccgtcagggatgcgttgtgcttcctgccaccggaagaccggaaatcggacttccgaaagcttttttggagatccccggtgtggaatatgcgctgacttctaatggtgcccgtattatccggatcccttccggggagacggtgtatgaagaactgattccctgggatgtcacgttacaggtgatcgaagtgatgaaacagtgggcgggagaatcatgcaactgggaaacatattttggcggaaagatttatgtagaggaagagacgtatcattttgtgcgacacgaatcgatgagtcccgcaatggaacagtatatccgaagcacccggacacgccagaaacatctgacagagaaaatccgggaggaaaagatcgggatggaaaaactgcatctgatctttgccgatacaaaagagcgggatcgcagagaaaaggaattgcagcagatgtttccgaatctgagtatctgccatgcgacaccgtttaacatggagatcatttccggcaaggccggaaaaggaaacggtctggtggcactgggaaagatcctcggcatcaaaaagaaagagatcatggcatgcggcgacgcgccaaatgactggaacatgctcgagatggcgggacttccggtggtgatggcgaatgcggatgaggagacgaagaaaaaggcagcatttatcacgaagtcgaatgaggaagacggcgttgcgtatgcgatcgagcgatttgtgttaaaaaatgaatgacgtatttacctgaatgtcggaaaacagatgggatttgatacaggtatggcaacagggagaaaaaggaaaagcgaagaaaatgagaagaaactgcacagacggaaaaggaaaggagtttatgcatgactttgaaacaacaacttggaaagctgaaatggaagaattttctcttcctcacgattgccggtatggtgaatgccttcggagtcacgatgtttatagccccggtagatctgtatgacagcggaatctccggaacatcgatcctgttgtcacagctgacaccggaatggctgtcactgtccctctttttgctagtattgaacattccgctgtttttatacggactccggaaacagggtatcgtatttaccatctatgcgatctacacggtggcggtctattcgttcggagcatggctgatcacggatgtacttccggtggatgtaagcatcgtatcgccgcttgccggatcggatctgcttctctgcgctatttttggcggactgatctccggtatcggaagcggtatggcgattcggttcggaggagcgatggacggtatcgaagtgctcgccgtcatctttgcaaaacggctggggattacggttggtacgtttgtgatggcgtataacctggtgctgtatatcatctgcggatttgtgatccacagctggatcttgccgctgtactcgatcgtaacctacggggcggcactgaagacggtggactttattgtggaaggtctggatcgatccaaagcggctaccatcgtaacggttcacccggatgaggtctgcgcggcactctccgaagcctttgagtgcggcatgacgatcaccgaggcgaaaggatattattccgattccccgaagacggtggcgtacatcgtggtaaaccgttttcaggtaggaaaaatgaaagaactggtccgtgaaaatgaccgctccgcctatatatcgatcgcagagatcgcggatgtgtacggggcaaatacggataaagcctgaaacgacaaaaatataattaagaagaaagtgagtaactattcagtaggaaatattccgcgaggtgttttgacatgaacatgccaaaatcccgagacatacaagtcaaaatgtcatcaccgaaggtgattttaaatacattttggctcgtaactgtgaaggtactgaacagttacaaaagtgaaaaagatatggatggaaacattcttttatggatacaggatcaccttcgctgggagggcatgaactggttctggaaagggatcacttccctgggaaacggcggatggttctggatcgtattatgtatcctgatggttgtatttgcaaaaacgctcggagaaaaatatccgataaaaaatggcaactgctcctgggcggtgattggaaaagccggatggtatggtctgctgtcgatgggagtcggcgcgctgatcaccaatgtgtgtctgaaaaatctggtagcacgcacacggccgtat

SEQ ID NO: 2568 - DNA, 31264 bp, Unknown
  gut microbiota DNA sequence
aagcttgcttgcaggaagatttctgaacttgggacccgccaaaaacatgagtaagtagccatttttcgaagaaaaatgagaaagacagaaagaaccccgacaacggagaaattttccgatgccggggttctttctattatttattgttcaaaccaatcagacactggctttccggtagatcgtgtacgagatcacagcagtgattgcctcacagatccagaacgcatgccagacgccggtcggtccaacgatgcggctcagaagaaatgccagaggaaggatcaggatcgtataacggcagagcgaaatcatcagagacggtacgccttttcccagaccttcgagtgccccgcaggaagtgatggataccgaagatacgataaatcccagactgatgatacgaagtgccgtgcttccggctgcgatcgtctgcgggttggtggtaaagagtccaagtaaagtacccgggatgatcatgcagagcaaagttcccgcaagcatgattccggcagacagatacagtgtgtaggagtaaagtttgtgtacacgtttctgctcaccggcaccgtaattgtatccgatcagcggacgcattccctggatgattccgtttgccggaagatacaggaaggtctgcaatttataatacacgccgaggatcatcacatacatctgtccgtaggcagcgaggatcgcgttgagggaagaaatcagcagggaagacagtgccatattcagtgtagccggaattccgacggcgtagattttctttaaaagtgcccggtcgaatttcaggtttttcagagaaatttttaccggcagcggacggatccatgcgaaaaacagatacgctgcaagagtaagcagctgtccaagaccggtagcccacgcagcaccccggatacccatccgcggaacaggtccgagtccgaagatcatgatcggatccaggataatgttcaggatacagccgctcatcatacagaacatcgtggtcttcatccgtcctacagactggaaaatcttttcataagcaattcccagagaaataataatggagaaaccaaatgtgatccgggagtaggtaattcccatggagagcacttcctgatcttttgtaaacatggaaagaaacgttggcataatggcaatcgtcccgatggtcaaaagcacgccgtggagaaacgaacaggcaacgccgagtgtggcactggtatccgctttttcctgtttctgcgcgcccagaaaataagcaattgtcgcattgataccgatgccgaagccgacacccacggcagtgatcagattctgaaccgggaagaccagagagagcgcagtcatcgcattttcattgatctttgccacgaaataactgtcgataatgttgtacagagagttcaccatcatcgagagcaccatgggaagtgccatggataaaagcaatggcaggatcggtttttctttcatgtaagtttgttccataaaatacatcctccttgaatttgcaatcttgataccggatggttccgaccttttgcccctggtatcataaaaaaagccacataaccgtaactgccgaagcagaaaggttatgtggcgaaaaatagatgcagcctgaaaccaggatacatccagaaaaatccacatgggttttggatgtcgtttaagacagtcgtattctatgggaaaatgaaggatttgtcaatggatttaaaaaaatttataaaatttttcagaaaaaggtaggcaaacacacggaaaccagatatagttatttaacagtaaagaaacaaaagatcagagaaaataaaggagaaacgatggaacatttggcatggtatgaactgctgctgttgttttttgcagcgtcctttctgggctgggtgctggagaccgcagcggcagatatcaaacagaaaaaattcgtaaaccgtggtcttgtgaccggtccgttctgcgtgatgtatggtattactacggtacttctgacggtgggactcggagaactgcgtggcgtctggctgtttttattttccgcaatctacgcgactgtagtggaatggatcggcggtcatctgatcgagcggttatttcaccagcgctggtgggactattccggaaagaaatggaatctggacggctatatctgcctgagtgcttcggcgttctggggcgctctgggccttgtaatggtaacctggggaaatgacctgcttttccgagtgatgggactgctgccactgctgctgataaaaatcttacttctggtactggcagggctcctggtggtagatattctggcttcgtatattctgcttcgcggctatggaaaaaatatccgtcagtgggaagaggcagataaccggatccgcaaaatcacactgcggttacagcactggatcggagcgatcattgcacgacgaatccgaaaggcatatccgaaagcagcggagacaaaaatcgaagagaaagaggcagcgaaagtgacctccacggtatttgccgccggatgcagtttttataaaattgttcttttatttttctgcggagcctttctgggtgatctgacagaaaccgttttctgcaggatcactgccggtgtctggatgagtcgcagcagtgtagtctggggaccgttcagcatcgtgtggggactggcaatcgcgttggtcactgccctgctatacaaatacaaagatcgttccgattccttccttttcggtatgggaagctttcttggtggcgcttatgagtatctgtgcagcgtctttacggaactggtattcggtaaagtattctgggattacagtgagatcccgttcaacctgggcggcaggatcaatctgttatactgctttttctggggcatcgctgcggtggtctggttcaaactcctgtatccgcgtttgtctgactggatcgaaaagattccgatgaaaccgggaaaaatcatcacctgggcactgatcctcttcatgtgctgcaacatcgtgatgtcctgcatggcactgatccggtacgacgcaaggggaaaaggcgtgtctgcagaaaatacactggaagaatggctcgacaaacactacgacgatgcccggatgcagcggatctatccgaatgcgatcaccgcatcatgagcagtgaatggagatgaatgtgcatattgaataaaaaataaagaccaaaaactctgtctccagtggcatcaaccaccagccgaaaaacccgcgctcccgccccggtttcttggcgtccgcgtagccaataaataagaaagctcaagaattttcccctttcagcgcctgtgtaatccccttcaccgaagaagcatacttcatcggcgccatccccgtagccttcttaaactgctttgaaaaataaggcagtgaactataagacaaaaaccccgcgatctccgtcagattcttccggccatcccggatcatatccttcgcccgctggatcttcatccgattaaaaaactccatcggtccacagcctttttccttctgaaacaacttctggatcgaagaacggctcagcgaaaaatgctcgcagagttcatccagcgaaagctgctcacagatccgaaactccataaactccgtgatctcctgtaaccgcttctcccgcgtccccgaaagttccaccggacttacaaacgtccccgtgatccgacgacgcggagaaacatccggctttgcctcattttgaagcaccgtgacaagaaacaactccagatacagcaaaaccatctgctgcgaaccaatcggtgcatccgtgcgaagttccacctgctccaccgaaggaacattcatcggtgtggataacacctcccgggcggcgttcagaatgtgggaaaccagtgtccgttcttccatatttaacgtcatcttttttccgcggaactcatccattgcaggagaatgactgacgaaagagaccgcgacaagattcggtgaagaactgccaacggaacggatcgcatgaaactcgttcggttcatgaaaaataatatccccggcatgaagggtaaactgctgctccccgccctgaacgatcacactgcccttatctacatacataaattcccagaaatcatgaaattccccgcggaatacaaaatcccgcatatactcaaaataatgaatcgtgatgatcgaatcaatcacaatctcacgtttcagcttcgtttcaatataagtcataagcgaaaacacacctccgaatatccctattttaccagagaacagggtaagctacaacaaaaggatcagcctgctttcgtgcaaaataagcgctttaatatggtaaaacgctaaaaaacatacgtaatcagacaataagagtacataataagacaactcaaaaacaggaaaactagttataatagataaatcaaaagacaactgtctgagagacaaagacggacagttgacaaacgaaaagaaataaagaggcaaacacctatgatgaaaattgaaaaaggaaatacgaaagtctgtctctgtcaggaaaccttggcggtgactgtagaaaagggtcagacccgttgggaatggaccgaaggctttcagccggaactgctctgcaaagaaggaagctttcattttctggatgcaaaaaacatcacccatgaagcctatacgatgggcgtgggaaccggaatccggagctgcttcgaaggatttgaaaaagacggcgtgacttacccgtatgcttttgagacactgatctggatcgaagatacgaccgaacaggtatacttcgaatgggttccgttaaaagaggaaggacttcaggtagaaaaagtgctctggccgggacagatggctttcgaagaaaagaaagacagctggtatacactgctgacacatcagcagggcatcctgatcccgaatgactgggagacaccgttatccgcgattccatttgccggatttttcgagactgccggcggatacatgccatggttcggacaggtgaaagacagacagggttacatcgcaatctgcaccacaccgtggaacgcaggatactatgccgagcatccggcaggcggtccgtacactcatgtcggtgtatactttgaaccgagtcttggaaagatggattatcgcagagtgatgcgatataccttcttagatgactgtgattacaatgatctgtgtaaagaataccggtcttatgtaaatgagcagggaagattaagaaccctggaagaaaaggcggcaagaaatccttccgtcaacgatctgatcggatgtgctttcgttcacaagggaatcaaaacccaggtgcagcacaactccgatttctttgatccggagaatccggaaaagaacaatcatctgacaacttttgcacaacgtacaaaagaaatcagagaacttcatgagcagggagtggaaaagctgtatcttcatctggatggctgggcacagccgggatatgacaaccagcatcctgattacctgccggcgtgtaaagaggccggtggctggcaagatatgaaagaactggcagataccatgcacgaatgtggttacatgtttggtatccatgatcagtacagagatttttataaagctgctccaagttttgatgaaaattatgcctgcagattaccggatggaagtattccggagcaccagagatgggcgggaggtccacagtcgtatctgtgtgcaacacaggcaccgtattatgtgaagcgcaattttaccgagatcaaaaaacacggaatccggctggatggtgcttatctggatgtattcacctgtaacgaaggagatgaatgtgacaatccggaacatcgcatgacacgtagagaatgttatgaattcagaggaagatgctttgagtatctgctctcccagggtatcctgccaagttcggaagaagtaagcgactgggcagtcccgagtctggttttctgtcattacgcaccgtatgattttatgatgaaaaaaccgggtacaccgaaagaaggcgttccggtaccgttatacaatctggtatatcatgactgtgtgattcagccatggatgatggataaagtaagcgacgaggaagattacatgctgtacgccctgttaaacggcggcgcgccctatctgatccgtgacgcggcttatccgaatatcgacggagcttttgacgataacgtaacactgagtcgaaaagaagaaatcgaacgcagcaaggcagtgacagaattacataaacaggtggcaaaatgcgagatgctgcatcatgagatggtaaatggagattatatggtacaggagacaacattctccgatggaaccagcgtgcaggtagatttcagaaaacaaacgtaccagattttccataaatagaacgattcaatacgaaaagacaacgagagggagccaaagcgggcatatgtacagggagactgtgcatacccgcttttcccgtatcaggctgagaaaattatggcattttcaaaaaaagatgttataatgatgcagaataaatagaaacaaatacgtatgtaagtgggtaacccttttggctagtacaatgtaagcacggaacagttactcattttcataatagagtaacccgacaatgaatattccaacaaagggaaaaggagagaaaagtcatgaaaaatatgaaaaaaattgcagcactgggtatgtctgctgtcatggtagcaggtatgatggccggatgcggaagcagcagtgattcttccagcagtgacagcaagggaagttccaaatccggtgacaaagtagaactgacactgggtatctgggatgaaaatcagagagatgccatgcagaaaatgatcgatgcatatgaagcagaaaatgataacgtatccatcagcatccagctgacaccatataaaggtggagaatactggacaaaactggaagcatctgcaggcggcggaacagctcctgacgtattctggctgaatgttctgcatctggattcttacgtggaaggtggtatcctggatgacatgaccgatgcaatcgcttcttctgacatcaaagataacttctcggatactctggtaaacaactatgttcgtgacggtaaaaactatgcagtaccgaaagacttcgataccaacgctctgtggtacaacaaagacctgttcgatcaggctggtgtggaatatccgaccgatgatatgacttatgatgatctggttgctctggcaactgaactgaaagacaaactgccggatggtgtatatccgttcgcctgcccggttgacttccagacatggtattatcagactgtatacgcaaacggcggctggattctgaacgatgacgctaccgaaacaggatacggtgatgcaaaaacacaggaaggtatccagtgctggatcgacatgatcgatgccggtctgtcaccaagtgcctctactctgtctgagacaggttccgatgccatgttcgaaggcgagcagatcgctatgacactggctggctcttacatggttccggaatatgcttccaacgataccatcaaagataaaatcgactgtgtagaagttcctacattcaatggtgtagaagacaactgtatcaacggtctgggattcgcagtatacgaaggatccaaacagaaagaagaagctgagaaatttgcaatctggatgggaagctctgaagcacagaagatccagggtgaaactggtgttgtaatctcagcaagaagtgatgcacagcagtatttcgcaaaagcaaatgagcagtacaacctggcagcctataccaatcactctgatgaagcttatccactgccggtatgcagcaaagcagcagaactgtatgatatggaatctacctggttaacaaaagcttatacgggcgaaatgtcactggcagatgcctgctccggcctgaaagaagaagcagacgctctgttagcaaagtaataaagtaggtgaaagaatggctgacgtgaaagcaaaagtaaagacgccgaagaaaaaagcgtcgaaaagagagaaaaaagactggattgccgcatatatcctgattgcacccgttaccctgggtctgctggtgttttatatctggccgtttatccagaatgtctggttcagttttaatgatgtaaacaaatttaatatgtctacttttgtaggtcttgcgaactacaaagaaatgatcggtgacaaagaagtatggagaaccttcggcaataccctgaaatacgttatcgtaaccgtaccggtagggctggcgttatccactttccttgcagctttactgaatgcaaagatcaaaggaaaatccatttaccgtaccctgtatttccttccttcggttaccatgtctgcagctgtggccatggtctggaaatggatctacaatgaacagatgggtatcctgaacagcgctatcaaagccatgggaggaaccggtcataactggctgactgattccaagacagcattgtttatgattatgatcgtaggtctctggatgacggttggttataacatgattatcctgttggcaggtatgcagggaatcaacagtgtgtattacgaagcagccgctatcgacggtgcaagcgaaattactcagtttttcaaaatcacggtaccgatgctgacaccgacagtcttcttcgttatgattacatccatcatcagtggtttccaggtttttgatactgtttacatgatgatcggcaaagcaagtccggcattcgaggcaacacagaccgttgtggcactgttttaccggacagcgttcgactatggttataaaggatatgcagcagctatttctattctgatcttcgcagcgattatgatcgtgaccgtgatccagatgatcggacagaagaaatgggtgaactacgactaaggaggagtgagaacatgaaaggtaaatttaagctaaatcacctgatcgtccatctgatcctcctggtcggagtgatcgtggttgtatttccatttgcatggatgatcctgacatcatttaaaacatccggtgaggcgatgaagattccgccgacaattttcccggaaaaattcgttacaacggcataccataccattgtgacttctgcaattccgtttgtaactgtttatatgaatacgatcattaacaccgtggttaccacactggtacagatcgtattctgttccatggcaggttatgcgttcggacgtatcgaatttccatttaaaaatgcaatcttcattctggtgttatcggtactgatggtacctggacagattttccttctgccacagtatcagatcgttcagaaactgggactgctggatacgattccggcactgtttctgccaaacctgttcagcgcgttcggtactttcctactgagacagttcttcatgtctctgccgaaagaactcgaagaagcagccattgtggacggatgcggacgtttccgtatcttcgcacagatcatgctgccgctgatcaaaccgggtatcgtggcaatgtccatctttaccatcaagtttgcatggaatgactttatgtggcctctgattgtcaacacttctatgaataagatgacactgggacctgcactgtctaccttacagggacagtacaccacagagtatccgatgcagatggccggtgcggttctcgccgtactgccgctggtagtgatgttcttcatcttccagaaacagttcatcgaaggtgttgcacagtccggtatcaaaggctgatgttcaacctattgacaatgtaggaaaacgcatgctactataatccacagaattgtggagtttcaaataagacaaaaagatttcgggactttcagttcccggaatcttttttcgctttatagaaaagtatgaaaaacagggagagaaaaacaatggaaatgaccatacaggaagtaaaacagctggacaaagacagttaccagatcatcgatatccgtgatgaaaatgagatcgctcacggagccattccgggagccgttgcgatgaaggcagaagagattgcggagagtccgttgctcgataagaacaagaaactggtaatctgctgcagcagaggaaaatacagccaggaagtggtaccgggactgatcgaaaaaggatttgacgcagtcagcttaaagggcggttatattgcatggctgatggatctgatgcgggaagaccaggagaaagatatcagtgccgatgtggaaaaaagtatccgtaaaaagttcagaaaatcgatctggtgtaaattcacaaaagctattaatcagtacgaactggtcaaagagggagactgtatcgctgtctgtatctccggtggaaaagattccatgctgatggcaaagctgttccaggaattaaagctgcataataaattttcttttgatgtgaaattcctggtgatggatccgggatacagcccggaaaaccgcaaagtcattgaggaaaatgcaagaaaactgaatgtgccgatcacgatttacgaatccgatattttcgaggcagtcttccatgtggatcagtctccgtgttatctgtgtgcgagaatgagaagaggtcatctctatcactatgcacaggaacttggctgtaataagatcgccctcggccaccattatgacgacgtgatcgagacgatcctgatgggtatgttgtatggggctcaggtacagaccatgatgccgaagctgcacagcaccaatttcggcgggatggaactgatccgtccgatgtatctgatccgcgaggacagcattaaggcttggagagattataacgacctgcattttatccagtgtgcatgtaaatttaccgatacctgtaccacctgtaataatgaagagacaaaatccaaacgtatggagatcaaacagctgatccagacgctgaaaaagacgaatccatttatcgagagtaatattttcaagagcgtggagaatgtcaatctggatacggtcgttggctataaacagtatggagaacgtcattatttcctggaaaattatgacaagatgggcgagttgaagaaagaggaactggcgaagaaagaggcagcgcagaaagaagcggaagctgcggaggcagaaaagaacggagagaacgtgccagaacagaaagccgtagaagaataatcaaaattgctccactggaccaattgttgatatgcaatgcaaaaaaatttgtaacagtaggacagacagaatctgaggtgagcatatggcagcaacactggaaaagatctatgaggtagcgcttcatcattatcatatgaaactggtcgcaggtcggggaggactctcgaacctggtggactgggtgcatgtggtggaagaagtggattatgtgcattttttaaaaggacgggaactgatcgtggcgaccggcatcaaagaaccggacgatgcggggctgttggaatttacccggcgggtgcatgcgacgggagcaagcggactggtgtttaatgttggacggtatattaaacatgtgccaaaagaagtacaggaatttggcgagacgctgcttcctccaccggaataccgtcacctaccatctgaaaaagatcagtgagattaccggaaagaacctcggtgagacgagaaatcggacgcagtgggaactggcatatctgatccggaatctgcggaagctgctggagtaagcaagaaccagaaccggcaggaatgagacataaaggaggaagcaggcttgcagtggcgatcctggtgtccatcttcattaccgtgatcaatgttctgggagcaaagacagcagcagtgttacagacggtactgaccgtgatcatcggtggtgttggtatccttctgatcgcatctcctgttgtgaccggtgatgtggcgaatctgcagccgcagctgtttgtcggtgattccgcttccacgatattaaaatctatttttagtgtggcagttgtgacaccgttcttcttcatcggttttgatgttatccgcaggcagcggaagagatcaacgttccgttaaaaaagattggtaagattctgattctttcgattgtcctggcagttatcttctacgcactgatcatctttggcgttggttatgtgatgaacccgtccgatatcgaaacctctctggcaggaagtggtctggtaactgcggatgcgatggcaaaagcatttaacagcagtatcatgtcgaaggttctgatcgtcggtgtgatcgccgtactgatgtccgggttcatggtagcaatgtatattatccctggttccggtaaagtaaagaaagttggggaactgacgaaaccgtatggcaagaaagcactgatcgtcaccggacgaagcagtgcaaagaaatccggtatctacgataaagtgaaaaacagcctggaggcagcaggacttacgacggtactgtacgataaagtcagccagaatccgctgacaacgactgccgaagatggcgcagcatttgcaaaggaaaatcactgtgatgtggtagttgccatcggtggcggaagcatcatggactgtgcgaaagcgattgccttcttaagtaaaaataagggcgatatcagcgattatatttacaaccggttacgaagtgacgaggcacttcctctggttctgatcccgaccacctgtggtaccggatcggaaggaaacggatttgcggtactgacgaacccggaaaacggcgacaaaaaatccctgcgctgcaacgcgatcgtcgcaaaagtatccatcgtcgatccggagtgcatgatgacgatgccgaagaaagtcctggcttccgttgccttcaatgcactgtgccataacattgaggcgtatacatcgagaatcgcacagccgtttaccgatgcgctgagcttatatgcgatcgatctgattgccaacaacctggtcgatgtctataacggaaccgcaggcaaggacggatgggagaagatcacgctggcgagcaccatcggcggtatggtgatcaacaccgcaggcgttaccctggcacacggcatggaacatccggcgagtggtctgaaaaacatcgttcacggacagggacttgccgcactgactctggtaatcatcgaggcatcctacaaaggaaaccgtgaaaaattcagcaagatcgcaagaatcatgggcggcatgaccgcagaagactgtgcaaccaagatccgtaccctgttgagaaaactggatctggagtgtaccctgtctgatcttggaatcaaagaagaagacatcccgtggatgacagaaaactgcatgaaagtatctgccgctggtgtcatgaataacccggttgtattctcgaaagaggagattgcggagatttacagaaaagcactgtaaaagaatagttctctgaaaaaagataaaaagaaagatacagaaagaatccaaaacaggagaatttctgtatctttctttttttaacattctacatggatcattcgtttgcgcagataacgaatcacaatctgtgtctgcacggagtctgaaaaaccgtcatatgagtatagtttcctgcaattactgtgtcacatatgtcttcagcagctcaaacgtattccgcaccccatccatatgagagcgttcataattatgagacgcatagacacccggaccgatcaggccgtgacggatgtcgtagccggcgcgaagggttgcttccacatcggatccgtaatgcggatagacgtcgatggcataatcaagtccctgttcttttgcaatcgtggaaagagccgttaccaggtcataattgtaaggtccgccggaatctttggcgcagatggataccatccgctcggtacagccaaggtcggcaccgacacagcccatatcgacggaaatcatttcttcggtgtcttctgctacgaaacttccaccgtgtccgacttcttcgtagacggtaaataataaagagactttccggttcagtttcagtccgtcttctttgacagcatgtgccagtccgagcaggatcgctgcggagagtttgtcatccaggaaacggctcttgatgtagccgctttcggtgactaccgtgcgcggatccatggcgatgatatcaccggtctggatgccgagcgcgagcgtgccttctctggaatccacattctcatccagcagaatctccatatgcttctcgatctgctccactttctgatctgcaacatgggcggatggttctgtgttcaggacaacgccggtatacactttgccgtcgcgggtgtggatcgtacagttttccccgtctgcggtggaccactgatgtccgccaagggttgtcgggcgaagacgtccgttctctttgatggagcgcaccatagcgcccagcgtatctacatgggcagccagcacgagcggagatccggatcctcccagtgtgacaaaaacatttccctttctggaacgctccggagtaaagccaagagcggtcagttcggataacagataatctgtcgctttctttgtaaagccggaagggcttggaatcgcagtcagtgcatacagctgttctttgataaaatccatatgagaactcatgttgttcctcctgattaaaaaaatatgaaatacgtttttcattgtaaacaccggaagaaaaaaggtcaaccagaaaaaataaagatagaaagaagaaacggtaacataaagagaaacaaaccggcataaaatagcagttatagaattgaaacgattcaaaaaacggataaaaaagggattccctctaatggggacatttatcaataagtgtccgctgtacacatacatgtgtgcgaaaaataaaaacaaattgcgggatttttcttgacattaccacgttaaagtgagtataatatcacatattgtcgacaatttacaatcgacaggagagatgaaaaagagaggaaaggtgtagaaaatgacaaaatacacagttcgaagagtctgtatggcatttgttacgctgttgcttgttgcctgtattacgttctttctgatgaatgcgattccgggtaatccgtggttatcagaaaaaacgccatctgaggcaaccatccaggcactgaatgcaaaatacggactggatcagccaaagtatattcagcttggcaaatacctgaaaaaccttgcacagggagattttggtacttctattaagatgcagaagaaccgtccggtcatcgagattatcaaagagatgttcccggtttccgcaaaagtcggaagtcttgctctgttatgggcagtaatcgtgggcgttccgctgggatgtcttgcagcgttcaagagaggaacctgggtggacagcttcctgcgtgtgctgtgcaccatcggtatctccatgccgggattcgtagtggcaaccctgctgttacataccctctgcggcggtatcgaaggagtaaaagtatttccggcactgtttgacggaacaccggcaagttatgtactgccgtgtgcggcacttggattctatccgatgtgttatctgtccagacagaccagaacggccatgctcgacgccatcaatcaggaatatatcaagacagcaagagcaaaaggtctgaaaaacagcaagatcatcttcaaacatgcgcttcgtaacgcgctgatcccggttatcacttacctgggaccgcagatcgcatttaccctgtgtggtggtcttgtcgtagagactgtattttctatcccgggactgggacgttactttgtacaggcgattcagaaccgtgattatccgctgatcatgggaaccaccattttcctggcagcatttattattatcatgaacctggtggttgacctgtgttataaactggtagatccgcgaattaatctggtgaagggaggaaattaaggttatgtccgataagaaaagatttaacaaaccgggctcacttcagccaaatatcgaggatattctgcagtggaacgatctgccggcagatgcatttgatccggcaacatcagaggaaaaagaaaactttattcaggaccgcagaagcgtatcttactggaaggatgcatggagacgtcttcgtaaaaacacggttgcgatggtggcactggtgatcatcatcctgctttctgtttttgctttcgtgggaccgtctgtcgttccttatacttacaaacagcagatccgtggttctgaatctttacatccatggcactacagcctggaagatcaggacaagatcaacgcctacatggaagaacataacggtgcgggaaacctgacaccggacgaagcggtagaacaggcacgccaggaagcagaagccaaaggcgagactttaagccgtgtagatgaagcaaagatccgtgcgaaagcaaatgtatctcagcagtctgctgacgaagaggcagtgacagaagaggaagctgccaaagcactgggaatcaaacacagcatatttggatactccaacaaagagctggaacgcaaagcagcaggggaaaatgtattcccgcatgtattcggtacagacgatcaggggcgtgatatcatggtccgtgttatggtcggtgcacgggtatccatcattgtaggtatctgtgcagcaatcctggtactgatcatcggtgcgctgtacggttccatatccgggtactgtggtggtatggtcgacaacgtgatgcagcgtatcgtagagatcatctactccatcccggagatgctgatcatcctgctgttatccgcaaccttaaaaccggcactggaacagttccagaactccggtaacggtgtgttccagaaactggtaacactccttggaccgaacctgatctctatgttcatcgctttcggtcttctgtactgggtaaccatgagccgtatcatccgtggacagatcctgcagttaaaacagcaggaatatgtaaccgcagcgagagcgcttggtgcaaagggcggacgtatcatcagcaaacatctgcttccgaactgtatcggacagatcgttaccacaacgttcctgcagatcccgtcagcgatcttcctggaatctttcttatccttcctgggtgtcggtgtatccgcaccgctgaccagtctgggatccatgtgttccgaagcactgagcggactgaaaacttatccgtaccgactgttcatcccggcagcgatcctgagtgttatgatcctgtccctgaacctgtttggtgacggtcttcgcgatgcattagatccgaagctgaaaaaataagaaagggagagacacaatggaacagaataaaaaagctgacaagctgttggaagtcagagatctccaggtctctttcttcactccggcaggagaagtaaaagcagtaaacggcatcagttacgatgtaaattataatgaagttatgggtgttgtaggagagtccggatccggaaagagtgtggaagcatattcgatcatcggcctgttacagaatccaggaaaagtaatcggtggttctatcaccttcgagggtcaggatgtcctggcgaagacaccggcggagatggtaaacttccgtggaaatgaagtagccatgatcttccagaacccgatgacctgtctgaatccggtatacaccatcggtaatcagctggtggaggcactgaaagcccatgataaaaatatcagtaaagaagaagcacagaaacgtgcgatggagatgcttgaggaagtaggaatcaataacgtggaaaaacgtatgaaacagtatcctcacgaactttccggtggtatgcgtcagcgtgtcatgatcgctatgggtctgatctgtcatccgaaacttctgatcgcagatgaaccgacaactgcccttgacgtaaccattcaggcacagattctggaactgatgaagaaacttcagaagtccaatcagatgggtattattttcatcacacataacctgggtgttgtggctgaaatctgtgacaaggtatcggttatgtatgcaggtaagatggtggagcagggtccggtagatgatatcttctatgcaccaggtcatccgtataccagaggacttcttcgttccatgccgcgtgtggatgcggaaagttacgaacgtctgatcccaatcgaaggaacaccggtcgatatgctgaatccgccggagggatgtccgtttgcaccgcgttgtgaaagcgccatgaagatctgtctgcagaagatgccgccgtatgtggaacttggggataatcatcgtgccgcatgctggctgtgtgtacaggaacagatgaaagcacagaaagcagcagagaaaaataatgaaaaaacggaggcaggcagccatgagtgagaaaaatgataccctcgttcaggttgaacacctgaaaaaatatttcccgatcaaaggtgtgaagggaccgggtgtacaggctgtggaagatatctccattgagattaaaagaggagaaacccttggtctggtaggagagtccggttgtggtaagacgactttcggacgcacggtattacagctgtataatccgacttccggaaagatcatctatgacggcaaaactatttttgaaggaaaagacccgtggcagagagacgaaaacggtattctgcgccaggtgaaagttccgaaagcaaaacaggtgaatatgcttccttaccgccggaagatgcagatcatcttccaggatccgtccgccagcctggatccacgtatgaccgttggcgagatcatcggtgaggcgctggatattcacaaattatataagagtaaacaggacagaaccgaccggatcaaggaactgcttggacatgtaggactgaatacagagcatgccaaccggtatccgcatgagttctccggcggacagcagcagcgtgtcggtattgcccgtgcactggcagtcaatccggaattcatcgtctgcgacgagccgatctccgcactggatgtttctatccagtcccaggtagtcaacatgctcgaagacatgcagcatgagatgggactgacctatctgttcatcgcacatgatctgtccgttgtaagacatatttcccaccgtatcggtgtgatgtatctgggaactatggtggaacttgcggaaagttatgaactgaaccgccatccactgcatccatatactaagacgctgctctccgctgttccggttccggatccgcaggtgagcagaagcagacagcgaatcgtgctcgaaggagacattccgtctccgatgaatccgccaagcggatgccggttccatacccgctgcccgtatgcgacagaaaaatgtaaacaggtcgtaccgacattcaaagagtacgaaaaaggccactgggtggcatgccatctgctggaacagtagatgagaagacaactggataatacaggggattcgctggcagaatcaccttgtttatcaataaaaggaaaaggagagaggataatatgaagaaaaaagttttatccatcctgttagctgcaacatttaccgtatctatgtttgcaggttgcggaaacagcaacactacagcaaaagacgacaacgcagctaaaacagaagacactgctgatgacgcagcagaggaagaaaccaaagatgacgccgcaacagaggacacagcaagcgacggtgactttaacattactgtaaacctggcttctgaacctatgactatggacccggcgctgaacagttctgtagacggtggtattatggccctgcatctgtttgaaggtctgatgaaatgggaagacagcggagaagctgccaatggttctgatggaacagctgacagcggaaaactggttccgggacaggctgaaagctatgaaaaaacagagaacgaggacggaacagtaacttatactttcaaattgcgtgacggcatcaaatggtctgacggaaaagatgtaacagcaggtgattttgagtactcctggaaacgtctggtaaatccggaaacagcagcagactacaactacatgctggatggcgtggtaaatgccactgagatcatggcaggtgaaaaagatcctgatgaactggctgcgaaagcattagacgacaaaacatttgaagtaactctggtaaacgacctgaactactttgaagaactgtgtgcattcccggctatgatgcctgtacgtgaagatatgatcgaaaaagcaggtgaccagtggacatttgacacagcaacttatatctccaatggtgcttacaaactgaaagagtggacacataactctcagatcgtagtagagaaaaatgaaaactactatgatgtagaaaaccttggaccggaaaccatcaccttcaaactgatggatgaccagaacgctatgctgtccggtttcaactccggtgaacttgatttcatcgaagatgtaccgcaggcagagatcgctaacctgatcgcttccggagatatgaagatcgtagactatatcggaacttactatgtatgcttccagacacagaaagcacctttcgacgatccgagagttcgtaaagcattctctctggcaatcgaccgtacttacatcgtaaaccaggtaacacagtccggacaggtagaagccggtggatttgttccatccggtgtatatgatgcagacggtgcagatggcgacgatttccgtacagtaggcggagattactataaaccgaccgatgcggattatgaagcaaactgtgacgaagcaagacagcttctggcagatgcaggatatccgaacggtgaaggattcccggttgtagaatacctgtacaacaccagtgatgctcacaaagctgtagcagaagctctgcagttcatgtgggaagaagaactgggcgtaaaagtaaccctgaacaaccaggagtgggcagcattcctgcagacacgtaaagacggagactactccatcgcacgtaacggctggatcgcagactacaacgacccgatctccttcctggatatgtggatgacaggtggcggaaacaacgatgcacagtatgcaaacgatgattacgacgctctgatcaaacaggcaaagacaacaacagataacgcagaacgtatggatctgctgcaccaggcagaagacaaactgatcggtgaagacagcgtactggctccactgtacttctatacacagaaatatatgctggctgacggcattgaaggtatgtactactgcccactgggatatttcttcttcggatatacccatcaggcataaataaatgcaatgcaacgatacagcccggataagcagtccgggctgtatttttctaaaagaaaaagggaaaacgcagggagaaaaaaagatgaaagcctatgaacgcttactgaaatatgttaccgtatggacgaccagcgacgaagacagcacaacggttccaactacaaaaagacagctcgacctggggaatcttctggtagaagagatgaaagagatgggactttcggatgtgtcgatggatgaatatggatatgtttacggatatcttccggccacggagggaatggaagatgtgacaccgcttggtctgatcgcgcatctggataccgcaccggactttaacggacagaatgtgaaaccacagattattccggattataacggagaagacgtggtgctcggaacttccggcagagttctggcagtaaaagattttccgagactgaaagggtataagggaagaacgctgatcacaaccgacggaacttctcttctgggagccgatgacaaggccgggattgcagagatcctgacagcagcagaagacctgatgcgggaaaagacaccacacggaaaaatctgcatcgcatttaccccggatgaagaggtgggtggcggtgcacagtatctgaaaatcaaagaatttggcgcaatgtacggatatacgttagacggaagccatgaaggtgagatccagtttgaaaactttaacgcggcaggcgcggaggtcactgttcatggtgtcaatgtgcatccggggagtgcaaaagatatcatgaaaaatgcacagaccatcgcgatggaaatccacggacttcttccaaaagatgcgtgcccggagaagacggaagggtatgaaggattctatcacatgaccgaattcaacggcaatgtggaacaggcagtgatgcgttacatcatccgtgactttgatccggtcacatttgtggaaaaacaggagaaactccgtcaggcggtcgcacagatcaacgaaacctacggcgagggaaccgcggaagtaaagatcgaagaatcttaccgcaacatgcgtgagaagatcgagccgtgcatgcagctgatcgattacgcaaaagaggcgtgcaaagaagcaggcgtggaaccggatatcgccccgatccgcggaggcacagatggtgcacggttaagctttgtcggtctgccatgtccgaacctgggtaccggcggagatggcttccatggtccgtttgaacacatcacggtggaaggcatggatctgtccgtggaaatcatcaaaaacattattaagaaaatgtgataccgaatggtttggcggattgcgggagtacgaagtacggagcaatctggtgttgtcaaatagaaaagaagtaactgttcagtagccactgtaccgcgaggtgttttggcatgaatatgccaaaatcccgaggcatacaagccaaaatgccatcaccgaaggtgattttaaatgcattttggctcgtaactgtgaaggtactgaacagttacgaaaagaaatattttacagtgcccggaaattcagataaaatatttcgtggtaagataataaagtaagacaggaagatacatgagcgaattattataccaaacattaagagaaagcgtagtgaatgcgattcggaccaagatcatgaatcatcagctccgtccgggagaacgaattgtggaactggaactggcgcaggaatttcagaccagccgtggaccgatccgagaagcgcttcgccagctggagaacgaagggattgtagaatataccagaaatgtgggatgttccgtgcggacattttctttctgggattcctatgaagtatatctgctgcgtacgaactatgaagctgtcagtgtacggctcctgaacggaaaagtaccggaagagacgatacagaagatggaagagattctggaaagcatgcggaaaattccggcggaagagttcgagagtgtttttgaatatgacaaccgttttcatgaacaactcgtactgatgtcgaaacttccaagacttgccaaagcatggaaagagctgtattatggaaatctgctggcaggatatgagctggtaagagaaaaagaacagatcctggcacgccagtatgacaaccatatagcgattctgaatgcctgcaaggaaggtgatccggagaaaatctgccgggaagtgaaaaaacactactggaagacgattttccgtatgatgcaggaacagaagatcgaagatccgaacctggaacaggcatggatgatggcaatctaaagaaggagaaacggcatggaagaattatatcaggcaattgaagaaaagatcaaagcttccggatatccaagagaaatttccggggagcgtgtctacgatgatatctgtgatcagattgagggaaaagagaacggaacgtacctggtactttccaaattcgaggaagatgtggtatttgaatatcatatcactgtttccgatgataactttaatctgggaatcctgacgatgaagacaccggaaggtgttttcgaagcagactttgacaaataaaaagcaaacaaaaaaccgggcggttcgtttgaagaaccagcccggttttttgttgtattgcatatcaataatgttggagtcaaaaagtattttgacctctttgataccggattgttccgtacttcgtactctcacaatcctcaaaaacattcgcaattcgctcatttttcttcgaaaaatggctacttactcatgtttctgaacttgggaccttggtatcatatcaataaaattatttcataattttacggaacagatctttcagatcttccacacttgcgtctttcgggttacccggtgcgcaggcatctgcgtgagcggattctgcaaggaactgcagatcctcttctttgacagcgtcgagaacagatgggattccgacatcagcggacagtttcttgacagcatcgatggctgcttttctgtattcttcctgtgtcatatcatcgacacctttcacacccatagcacgtgcgatctcacgatatttctcgccggtgcattcctggttgtattccataacgatcggcagcatcattgcgcaggcaacaccgtgcggggtatcataaacagcacccagggtatgagccatggaatgagcgattcccagacctacgttggagaatcccatacctgcgatatactgaccaagagccattccctcacggccttcttttgtattttccacagcaccgcgaagagatctggagatgatctcgatggctttcaggtggaacatatctgtcatttcccatgcagcctttgtggtgtaaccttcgatggcatgggtcagagcatccataccggtggaagcggtcagtccttttggcatggaagccatcatctccggatcgacaattgcgatgatcggcatgtcgtgtgggtcaacgcatacgaatttacgttttctttccacatcggtaacgacatagttgatggttacttccgcagcagttccggctgtggtaggtacagcgatgatcggtacgcaaggtttcttagtcggagccacaccctcgaggcttctgacatcttcaaattccgggtttgcgatgatgataccgatggctttggaagtatccatggaagaacctccgccgatagcgatcagataatcagcaccggaatccttgaaggactgtacgccgtgctgtacattttcgatggttggattcggtttgatgtcgctgtaaagttcatagtccagaccgttttcttttaacaggtctgttactttggaagttacattgaattttaccagatccgggtcggagcatacgaacgcttttttaaatccatgtgcctttgcttcatttacgatttcctgaatagcacctgctccgtgataagaagtctgatttaacatgatacgatttgccataatacaaacactccttttctcttagggaatcaccgctttccggctgttccgttcttttgtgattatattaacaatgtttttccgaaaaagaaagttacagaattcggcaaatgtaacattttgatggaaaaatttttttttattccgtcagaacgccgaaagaagcaaaaagatccgccagtttggctggcatggcttccaccatcaggcgtgccagggcttccggggagtttgtcatgccggagagtacccattcgatcgtcatggagatcgatccgtggcagtacatttcaagaagaaaccggatatcctcagatgccggagcgccggtctttaactggatcagatcctgataaaaccggaagatcagatgaaaatcgtgttcccgcagtgagttctgccggtcataacggaaggcggcacggaaaaattctttttcttctgcgatataggaaaattttaactgcaaaccttcctgaaccgtttttccctgtcccatgtattcaaaggatttgatcagtagtttatcaaagtaccagttgatcagagcaaatttgtccataaagtttcggtaaaaagtctgtctggtcagaccgcagttctctgtgatctggcggacggtgattgcgtctaccggagtgtggcacatacattccttcatggattccgccagacggtattttgttttctctccccgggtgagggaagaggtttcggttgtcagggtcataataagtacctgctttctttaaagatttccgtactctttatcataccacagaaaaaagaaaacagaagaggaaaatagaattgcgaaagcagggggaatgagataaaatgactgtatgacaacgagggggatgaattatgacagagacatacgttttgaagcagatggtcagcctggcacacacaccgtttcagattgtgaaccgggatggaagtgtggaactgggagtagggatgagaaatgtggaacggctgttttacgaaaaaaatcaccagatgatagcggtcgccagagagagagcaagagaatatccggtgatctttgcggaaaaacggctgttatttgccgtatttccggaagatcctgtgacgggtcagatcctgcttgcgggaccggtggtgtccagagctttgtcgagggagcagctgatcgaagtgcgccgggaatggaacatgggaaaaacagattatcagccacctgtaacgagcatcaaaaaaatggtttcgatgatgcttctgctgcactggcagagcaccggtgttacgatgagcgtggatgaattctggaaaaaaaacaggaaaaattatcagtccgggcaggagtttgaacggcgcttatcgagagagctgttccagtatcaggaaaatgtaggacttcacaacccttatgaacaggaactgcgtgagatgaacagcattaccaacggagacatggaagcattgagccggagtatgtccgaaacctatgagggagagatcggaattctggcgaaagatccgctgcgctcagcgaaaaatgtggcaatcggaaatattacgctggcatccagagcggcgatccgcggaggaatgagtacagaaaaatcgttttccctggcagacagcttcagccagcaggtggaagaaatcgaaaatcttccggaggtggaggcttttaagcgggaaatcaagtttacctatgcacgcatggtgaaagaagagaaaaataatgagatcgtggagagggaaaatcaggtgaatccgctgatcgcacaggtcaaagactatgtatttcatcatctgcacggggcgatacaggtacaggatattgcacaggcgctgcaggtgaatccggattatctctcgcatctattcagcaccagtgagaatatcacgatgattgaatatatccggcaggaaaaggtgcgaagaggagagaacctgttaaaatactccgattaccgggtgcaggatatcgcgttttacctcggtttcagctcccagagccattttgccagaatctttcagaagaccacaggcatgaatccgaatgagtaccggaagaactttggaaataagaaaaagtggaaaacaaaagcatctgagagtacacagaagaaccaggaggagaaaaagtgattgcattattgctgatgcagcagattgctgtattatttctgattatgggactgggattcctgatcgtaaagctggggattgtggagacagaggacagccgggtgctttcgatggtgacgatttatctggtgctgccctgcgtgacgattcatgcttttcagatcgaatattccacaaagataagaaatggatttctgcttgcagtcgtcgcggcgatcctgatccatgtaatattgtttatagtctgcgggattctgagaaagctgctaaacatggatgaggtggagacggcttcgctgatctattcaaatgcgggcaatctgatcctgccactggtgacgtcgatcctgggagaagaatgggtgatctatgccagcggctttctgtgtgtacagacgatcatcgtgtggacgcacggacagtccctgatgcagggacagcgccaggtgaactggaaaaagatcgtgcagaacatcaatctgatcgcgatccttgtgggactggtgtttttcctgtgcaacatccatctgccgaagattctcgattctatgacttcctcccttgctggcatgatcggtccgatcagtatggtgatgatcggcatgcttttagcgggtgtggactggaaacaggtctttggaaaacggagaatctatgggattgtatttttgaaaatgatcgtggtgccggggatcattaccctgtgcctgaaactggcggcaccgctgattccgatggagaatgcaaaaacgatcctgttgatcagcctgctggcagtaattgccccgacagcggtaacgatcacacagatggcacagctttacaagagggatgcggcatatgcaagttcgatcaatgtatttaccacgttggtgtgcatcgtgacgatgccgctgatggtgatgttgtatatgatgtaaagcgtatttgcataaaatcagacggagagagaaactatgcggattaacagagaagatatgctggaactgacccggcgtatgacagtaaaacgatcttccatgacccggatcgcgggagcttatatggaccgtgacggatatgtggacggaacttttaacacgaatttcctgaaactgtccccggcagacaaagagaaaaatctggcactggcgaaagccgttccattttcggaaaccaacgtcaatctgaagcgttatccgttcccgaaagaacagatggcagccggaactatgtggcagctgctcaacgggatcaaaaagagcggattgaaaaatgacgccctgatggatatcttttatgaaattgtcggggaacagtaccgttcctacggagattacgccgtatatatgttccacgaccgctacgatatcccggtgaaagcggcggatcatgagcgggtaggagaatcggaagaagtctacgaatatctgatctgcatcttcgccccggtcagcggtgactacgagccgggacagccggagtgtggattcctctacccggcattctgcgacagaagcagcgactggaattatgtggatatttaccagagaaatgcggagcggccgcacaatgagctgcggaagattctcggggtatagaataaaagaaaaataaagtgagttacaataaagataaggtgacaaccaagccggcatgacggatctgtgcgccggcttggtttgaaaggagaaaaaaatggcaattgtattccacaaagagagcagatgttttcatctgtataacaacgaagtaagttatatcatccgtatcatggaaaatgagcagttagagcagttatattatggaaagaaaattcacgaccgggaggattttacgtatcttcatgaggagtgcatgcgctcccagatgtccgtctgtgttccggaaccgggcatcctttccatgcagtataccaaacaggaattcccaacctatggaactggtgattacagaagcccggcactgacgatcgtacaggagaacggaagccggatcgtgaactttacctatgcatcccatgaaatttgtagcggaaagaaagacattcttccgctgccagctacttatgtggaaaatgaagatgaggcgcagaccctggaagtcactcttcacgatgcagtgatggataccgacctgatcctttcttatacaatctacgaagagtatccggtgatcacaagaaatgcaaagatctgccacaaaggaagtgagaagatcgttctggacaagatcatgagtgccagtgtggaattcaatgatatggattatgagatggtacatctgtccggcggctgggcaagagagcgttatgtgaaaaccagaagactggagatgggtatccagagcatccagagcctgaacggtacctgcagcggcgcggagcagaatccgttcctggcactgaaacgtccacacacaacagaaaatcagggagaagtatatgggttcagcctggtatacagcggcaatcatctgggacaggtagaagtttctacttttgatatgacccgtgtgatgatgggtatcaacccggaagacttcagctgggaactgacacagggagaatccttccagacaccggaagtagttatggtttacagcgatcagggtctgaataagatgagtcagacatatcacagaatctaccggaaacgtctgatgcacggaacctggagagatcaggcacgcccgatcctgttaaacaactgggaagcaacctattttgattttaatgaagaaaaaatcctgaatattgcgaaaaaagcgaaagaagcaggtgtggaactctttgttctggatgacggctggttcggtgcaagagacgatgattaccgtggactgggtgactggtatgtcaatctgaaaaaactgccatccggtatcagtggtctgtcacaaaaagtagaagaactgggactgaaatttggtctgtgggtagaactggagatggtcaacaaagacagtgatctttaccgtgcacatccggactggatcatcagtgcgccggagcgttttgagtctcatgcaagacatcagtttgttctggatttttcgaaaaaagaagtggttgactatatttatgagatggttgcaaaagtgattcgtgaatcttctatttcatatattaaatgggatatgaaccgttatatgtccgaaccttacagcaaaggaactgatccgtcccagcagggaaaagtgatgcacaaatatattttaggtgtatatgatctgtacaccaggctgaccacagaattcccggagatcctgtttgagtcctgtgcaagcggtggtgcaagatttgatcctgccatgctgtattttgcaccacagacatggaccagtgatgataccgatgccagtgagagaaccaagatccagtacggtacttcttatgtatatccgatcgtcagcatgggatctcatgtatctgcggtaccgaaccatcagttataccgtacgacaccgatcgagacaagagcgaatgttgcttactttggaactttcggttatgaattggatctgaatctgctcagtgatgcggagatggcaagtgttaaaaaacaaattgcatttatgaaagaataccgggaactgatccaggtagacggcgatttctaccgtctgttgaatccgtttgaaggaaatgagacggcatggatggttgtttctcaggataagacacaggcagtggcggcactgtaccagaggctgaacaaagtcaatgcgtcctggctgcgcctgaaactggaaggtctggatccggatgcaaaatatcaggtaagctgtgatctgaccccgtcctcttctttcgacacagaactggcaaaacgctacggttacgatacagtaggaaatcaggtaaaaacatatgaagcatacggggatgaactgatgcgtgcaggtatcccggttgaccgacaggatctgaacaaaaagggcggagatttcgcatccttactgtatacaattaagaaagtggattgataaaaaattttttaaacagcacgttagagcgtgtctgaaaaatcatttccgcaatctgcaagccccactttgcggtatattttaccctcattcggttgccgt

SEQ ID NO: 2569 - DNA, 2185 bp, Unknown
  gut microbiota DNA sequence
cttgcactgaagggatatttcccggtagaagatctggaaaccttacgtcatctgggatcttacctgcagggacatccggatatgaaacatatcccgggcgtagatatgtccagtggttctctgggacagggaatctccgcagcagtaggtatggcgatcgcgggcaagatggacaatgccgattatcgtgtatacacactgttaggtgacggtgagattcaggaaggacaggtatgggaagcttccatgatggcaggattccgcaaactggataacctggtagtgatcgtagataataataatctacagatcgacggagcaatcgatgaagtttgttctccatatccgattgataaaaaattcgaagcatttaacttccatgtaatcaacatcgacggtaacgattttgaccagatcgatgcagcattcaaagaagcaagagcaaccaaaggaatgccgacagcaatcatcgctcacaccgtaaaaggtaaaggcgtatccttcatggaaaatcaggtaggctggcatggaaccgctccgaacgacgagcagtatgcagtagcaatggaagatctgaaaaaggtaggtgaagcattatgtcagaagtaaagaaaattgcaaccagagaaagttatggtaacgccctggtagaactgggaaaagagcacgaagacctggtagttctggatgcagacctggcagctgccaccaaaaccggtatgtttaagaaagtatttccggaacgccatattgactgtggtatcgctgagtgtaacatgatcggtatcgcagcaggtctttccaccgcaggaaaagttccgtttgcaagttcttttgcaatgtttgcagcaggacgtgcttttgaacaggtaagaaactctgtaggatatccgcacctgaacgtaaagatcggtgcaacacacgccggtatctccgtaggagaagacggtgcaacgcatcagtgtaacgaagatatcgccctgatgcgtaccatcccgggcatggttgttatcaacccgtccgatgatgtggaagcaagagcagctgtaaaagcagcatacgaatatcagggaccggtatacctgcgtttcggtcgtctggcagtgccggtgatcaatgaccgtccggattacaaattcgagatcggtaaaggtgttaccctgagagaaggaaaagacgtggcaatcatcgctaccggtctgtgtgtaaactctgcactggaagcagctgaaaaactggcagctgacggtatcgaggcgaaagtagtcaacatccataccatcaaacctctggatgaggaactggttgttgcagcagcaaaagaatgcggtaaagtagttaccgtagaagaacattccgtaatcggcggtctgggaagcgcagtatgcgacgtactgtgcgagaaagctccgactccggtactgaagatcggtgtgcaggatgtattcggcgagtccggtccggcagtaaaacttctggaaaaatacaaactggacggacagggtgtatacgagcaggtaaaagcgtatatccagtaattacatttaagaaaaaattaaagtgtacagaactttacagtaagagaatacttacggtataataagacagggaatggagagttattttctccattccctgtttatgtactctcggagtctttctgcacttgcttttgcggctgattttccgccagtcgcacccgaatttcatcaacgtacgcaccgcgtacgttgatgaaatttgggcacaactgacaaaaaatcatctcacaaaatcaagcacagaaagattccgagagtacatgttttgcaaagctggaaaatatgtctgtacggtaaatggtacggaaaataataggagatcagaaaaatgccagaaaaaatgtcaggaaaacgggcaaaagattcacgggagaatctcagaagaaaacggagagagcgcacgaaagaaaatctggagttttatgagtgcatccgtgatatcgtcggtcatccggcagtactggagatgaaaaaattttatcagcactgtgatacggattgctacgagcattgtctggatgtagcgtataacaattataaaatctgcaaaaaattaggtctggatgcccgttccgcggcgcgaggcggcatgctccacgatctgttcctgtatgactggagagaacaccggaaagagacgggtg

SEQ ID NO: 2570 - DNA, 7488 bp, Unknown
  gut microbiota DNA sequence
aaaatgaacgggatctggaagaagtagcagaagaagtgaaagaaaaactggaaattgtcccggtagagacggtggagcaggttatgaaactggtgtttgcctgaacgaacgggaaggaagcagacagaaaagaacagggtgaacaaagagatggatacaagagaagtattggaaaaagtaaaacagggtgagatttctatcgaggaagcggagcattattttcggaaggctccgtttgacgagatgggttatgcaaagctggatatgcaccggcagatccgctccggatttccggaagtgattttctgcagcggaaaggcagatgcacatctggtgccgatcgtaaagcggctgtatgaagcaaacggagaggtatttggaacccgggcttccgagcagcagtatgagatgttgaaagaaatctatccggagattcagtacgatccgatttcacatattctgaaaatagagaaaaaagaaaagaaagagggtgttggtctgatcgctgtgtgtacagcaggaacggcggatatcccggtagcggaagaggctgcacagacggcagaatatttcggatcaaaagtagagcggatttatgatgtcggtgtggcaggaatccaccgtctctttgccagactggatgcgatccaggatgcgaactgtgtgatcgcagtggcaggtatggaaggtgcgctggcaagtgtactgggcggtctggtgaacaaaccggtgatcgctgttcctacctcggttggctatggcgccagcatgaacggaatctccgcactgcttacaatgatcaattcgtgcgcgaacggaatcgcaaccgtaaatatcgataatggttacggcgccggttacattgcgacacagatcaaccggatgggtttgaaagaaaaatagaaagataaaataaaaagaaggaagatatcgaaaccacgatcattctgatggctcgatatcttccttctttaagtttaataagtaccacttcgtatcttttcccggtactgtcggggtgtcataccaatctgctgtcggaagtgataacagaaagcagcagaatcacggaatccacaggaataggcaatttctgtcacggtataatcctgtgtctgcaacagttttgccgccgcgcggatccggtactggagaagatattgtttgggagaaatctgtgcctcccgcatgaagatcttatacagatacgttctgtccacacctatataatccgcaatatcctgaatccggagattgtaggaataattgttggtgatatattcaagtgcccgctgataatactgttcgttatgatcgcttcgcccgccgctttccggccgggtcatacaggaaaacagctgtaagaatgcagaagcgagtgccagaggattcttctccggggaaaaaaacagggtattcagctggagcataggctgacagcacagatccgatggactgtaaaagaccggtgaagagcgaaggacagttgtattcagtatcttttccacacaatttccgtcaaatccaacccaggcatattcccagggatcctctttatctgcctgataataatgtgtctgcatcggttcgatcagaaaggcatctccggaagaaagggcatattcttttccatgatacaaaaaggtcccctttccgtgcaaaatcacgtgaagtaaataatgggggcggatagccggcccccaaaaatgtccgggagcacattgctcccttccgcaataatagatacgaagtgcagtggtatgttccgtatttggatgttccacagccataacattcctcgcttttatttattacgatgtcctctgtatttttcttcacagtatttgcagcggtatacttctttctccggatcggtcaggataaatacctgatccagttcctgttcaatcgaagtgatacaacgtgggtttttgcaacggatcacgttgactacctgagaaggcagatgcagttctttctttgaagtgatcttgccgttctggatcacgttcaccgtgatgttgtgatcgataaatccgagaatgtcaagatccagcatatctacgttacactctactttgatgatatcttttttgcccattttattgctgcgggcatttttgatgatggcaacacagcagtccagcttgtccagtttcagatcatgataaattgtcatggatttgccggctttgatgtggtccagaacaaatccctcttcgatacgtcctacatttaacatacttttacctccagtaacgtcaggatcagtgccatacggacatagacgccgtactgtacctgtttaaaatatgcagctcgcgggtcagaatctatctcagtggagatctcattgacacgtggcagtggatgcagaaccagcatatccggtccggcgagtttcattttctctttgtccagaatatagaagtctttcatacggacataatcgtcttcgttgaagaaacgttctttctgtactcgtgtcatgtaaagaacatccagttttggcagtgcgtcttcgagacgggttacttcctcaaactcatgaccgctggctctcagaacatcttcacggatatagtccgggatacggagttcttccggggagatcaggacgaattttacattcggatagcgaaccagagcttcaatcagagagtgtacggtacgtccaaacttcagatcgccgcaaagaccgatcgtaatattatccagtcgtcctttcagagaacgaatcgtcaataaatcagttaatgtctgggtaggatgttgatgtccaccgtcaccggcattgatcacgggaattttggaaactaaagaagcgaccagtggggcaccctctttcggatgacgcatggcacagatgtctgcaaaacaggaaacaacgcgaatggtatcagaaacgctttcacctttggaagcggaactggaatcggcggaagaaaaaccaagagcctttccaccaagattcatcatggcagcttcgaaactgagacgggtacgggtacttggttcatagaacaaagttgcaatttttttaccgtcacaggcgtgcgcgtatttttccgggtttcgttcaatgtcatttgccagatccagcagatgctcaagctcctcaacggagagatccagaggactcatcagatgtctcatcatatacctccttgtatgtcataaaactatacagagtaccatcattttttactctgcctaacatcatataataaatacttttggattgcaagagaaaaatgaaggattttgtcggaaccataacggaacaactgttccttgtcaaatggtgtcgtttgtactataataacaacagtttactcgcaataggaggttccatattttatggattatataaaagcaagaacatatatagatgaaagtcatcggttcggcggtgagatgggtctggaggcgattacctgtctgctggagaaactgggaaatccgcaggatgatctgcagtttctccatattgccggaacgaatggaaaaggaagcgtgggggcttatctggcagcagttcttcaggaagcagggtaccggattggcagatttatctctccgacactgtatgaataccgggaacggatccagatcaacggaggatatatcacagaagaagcatttggccgtctgatggatccggtagtgaaagcaatcggggaactgaaagcggaacagaagcctctgccgtctccgtttgagattgaaacggcactttcttttctatattataaggaaaagcaatgtgattttgtcctgctggagtgcggcatgggcggaaagaccgatgcgacgaatgtgatccggaatacaaaactagcggtgatcacatcgatcagtatggatcatatggagtatctgggggatactctgggagcgatcgccgggcagaaagccggtattatcaaaccgggcagccgggttgttacctgcagacaggaaaaagaagcgatggatgttatcgaacaggtctgtaaagagcagggatgtccgctgtatgtgggagagaaaacacaggcagagcttgtgacggcagatcttgatcatatggtatttacctaccgggaagaaacctatatgattcatctggcaggttcgcaccagctggaaaatgcagtgcttgcgctggcgggaatccgtgctttgcaggatgcgggctatcggatttctttcgaacagatccgaaacggaatggaaaaagcacggtggaatggaagatttactattctgagaaagaacccgtatctggtggtggatggcgcacataatccggatgcggcgaaaaaactgcaggagtctttgcggatgtattttccggatcgggagtttgtctttctgatgggtgtttttcgggataaacagtacgacgcgatcgcaaaacgaatggcgccgatggcaaaggaaatcgttgcgatggaaacgccggacaacccgcgggcacttccggcagaggaactgggagaagttctgaaaaaatatcagtcaccggaacatgttcacgtagccggctctttggaggaagccttgcagctgggggaagaactggcgaaaaaagaagatgtgatcgtggcttttggttcgctgtcttttatcggcgatctgacaaaattaagcgaaaaaatgggataggaaaaagaaagtatggataataaaacattggatttactcgagatcagagatcagattgataccattgacaaagaaatcgtagaacttttcgagaaacggatgcagctgagtgcagatgtggcggaatataagatttccaacaacaaagaagtgctggatccgaagagagaaaaagaaaaactaatgacactggaacactatgcatccaactcctttaaccgggtcggcgtatacgaactgtttcgtcagatgatggcgatgagccgtaaattacagtaccgtatcctggctgaacacggaaaagcaggaaacatttcgttccgcaaagtgtcttccctgccgatgcagaaggcaaaagtggtattccagggtgtggaaggagcatacagttttaccgcgatgcacagctttttcggagagtctatcgagaactataatgtggaaacctggcgggatgcgatggaagcgatcaaaaacggcgatgcagattatgccgtacttccgatcgaaaattctactgcgggcatcgtagcagatatctatgatcttctggtggaatatcatcacagtatcgtcggcgagcagatcattcaggtggatcatgcgctgatggcactgaaaaattccacacttgaagacattaagacggtatattctcatccgcaggcactgtcccagtgtaaaaaattcctggaagagcatccggaatggaaagcggagaaatatctgaacaccgcaatggcagcaaaaaaagtaaaagaagacggagatctgacacaggcagcgatcgcaagtccatatgcggcacagtgcttcggattacagattttaaaaccgcatgtattctccagccagcagaattccacccggtttattatcgtatccaaagaagaaatctatcaggaagaagcaggaaaaatcagtgtatgttttgagatccctcatgagagcggaagtctgtataacacactgtcccattttatctataatgatctgaacatgacaaagatcgaatcccgcccgatcccggagaaaaaatgggagtatcgtttctttgttgactttgaaggaaacttaagtgacagcggtgtgaaaaatgcgctgtatggtatttccagagaggtgaataatctgcggattcttggaaattattaatgatacatgagaactgtccggctgtgaagacagggaacagccggaataagcaattacatattagatgtaagaaagacaggtaaagacaatgacaggaataagagaatgcattttatatcgtgattttgaacagggcgaattgctggagaagatgactatgttgatggaagatatctctcatccgaaggtgctctacggaaagggcggggagtattttgcatgtattcaccagctggtagagatggcaggaacctacggatttgcgggaaacctgtggcatgattatctgacctatctgctggtcaatcatgaaaatgcgttcagtactgcctgtgagattgtaggtccggtggaaggtacgatcaatgcgtttgcaatgcatgattttgagatctttaaacagctgtatgattttgatctgaaagaactggaaaagatttatccatccgtggacagcagcctgatcaccaattatcagaatatcaacgagggcagcaagttctttaacaaacgcatccgcgaccggatctgcacactggcagaaaaactggcaaaggcagagtccacaaaagagttcatggatgatatggtacagttttataaggaattcggtgttggtaaactgggacttcacaaagcattccgtattgacggaacggtgactcctgcccggatcgtgccgattacgaatatcgcacatgtgcatctggatgatctggttggatatgagatcgcgaagaagaaactgatcgacaatacagaggctttcgtacagggacgtccggcaaacaactgtctgctgttcggtgatgcaggtaccggtaaatcttccagtatcaaaggtatcctgaatcagtattatgatcagggacttcgtatcatcgaggcgtataaacatcagttcaaggatctgaacgatattatcgcacaggtgaagaaccggaattacaagtttattatttatatggacgatctgtcttttgaggagtttgagatcgagtacaaatatctgaaagctgtaatcgagggtggtctggagaaaaaaccggataatattctgatttatgcgacctccaatcgaagacatctggttcgggagaaattctcggataaagaagagagaagagatgatctgcattcttccgatacggttcaggagaagctgtcgctggttgcacgttttggcgtgtctattttcttctgcgcaccggataagaaacagttccagaatatcgtgaagacgctggctgagagacaccatgtggagatgccggaggaggagcttttgcttgaggcgaataagtgggagttgcagcatggtgggctgtcgggtcggacggcgcagcagtttattgattatctttgtggcaagacggaaaatgagtaaataaaatataggtttcggcttagggaacgcggctgaactgggattccttgggtgaacaacgtgggcagggcaactttgaactagccactaacttcgactatattcacgcgggtcggctgacccgcgcgaaagtctacgtaagtgtcggatttcaaagcttgccctaaccgcccacaaagtgttgttcacccaaggaatcccagttcagccgctgtttgttagcagagaactgtttgttggcggaaaccaatggggacggagttttatggttctgttagagaagggctcgtgagatt

SEQ ID NO: 2571 - DNA, 865 bp, Unknown
  gut microbiota DNA sequence
tctgatgctgttttttcatattttttatccttaattttcttcttttagaatcaatcccacagtttctccgaatatttaccggaacggatcatttcacggaaacctgcctgtgccagttcggtatcttctttataagtaataccgatccatttgtcctgtgtctccagaacttttacggttgctttgttctgttttaacagaccgtccacgatgatcgggatcagatattctttcttcagcggatcaccggaatcatccttcaggaattctacaaatccactcttcagcttgttcagaaattccggatatgcggcccacatattcatagatacatgaacatccggtgtgatccaggatcttacttcttctctgtcgcagactacggttccgtccgccccgattgcaataccggatgtctccagaacatctgtcagcatatcatcgtcatccacggtacagataccacgggtaacagctccgttctcgctgacagtatttttcaggacaaatcctgccatcgccatgttcagcacttcgccttcctgttttccgtttaccagaaaatcatgcagctttacgaaagcctcttttccgtagtaatcgtctgcattgatgatcacaaacgggtctttgactacatctttgcacgccagtaccgcctgaccggttccccacggttttttacgtccttccggcacggtgaagccatccggcagatcggtcagttcctggtatacatattccacttcgatctgagagccgatgcggtttccgatcaccgctttgaactcttcctcgatatctttgcggatcacaaataccactttgtcaaatcctgcttcttttgcatcatagatcgagtaat

SEQ ID NO: 2572 - DNA, 23118 bp, Unknown
  gut microbiota DNA sequence
ggcggcgtagcgggctacggcaaccgaatgagggtaaaatataccgcaaagtggggcttgcagattgcggaaatgattttccagacacgctctagtgctttcagcattcgatatttcgtcttgactttcttccattatttccaatagactgctcagattctcctcacgttaatcataatatctctatgaataggacacccttggtcttggctgtatctttcccactactagggtggatcaggaactttcacccattagaaacgtgcgccgcaaggcgcacacgaaaaagagcgggtagtttctctgctccccgctcttttgcattttccttatcttccgcaacagaatttgtatttctttccgcttccacatggacacggatcgtttcttccaacttttgcacctttgatgatcgtgccggatttcttctgttccatgtacagagttttcttcttctccggtgtgaagatctcatcccacatcggcagctcatacagccagtctgcttttgcgtctaccatgttcttgtaaagcagctctttatcaaatcccagattgacttcggtatcttcttccatctcttcaatcgggttctgaacctttaaactgtcattaataccatccaggaaacctgtcattgtcataacattgactttatatttatcagccagttccttaacagttccacgtactacttcatccggattggaaagcagctgttcgtagattcctttttcaattacaaaatattctgcccagaatttctgcagtttcgctttatctgcctgctgagagtatgcaacatctctccactgttttaataatcccatgattactgtaccttccttcaattcaattggtaaattatactccacggatctgatactgctcatataattttctttcagtagtccagacacttccgtgtgactctctttagtataaacgaaataccgcagattttcaagcacaaatcacgttttctcatgctccagaccacacaaaaaagtgagtaccgaaatcttctttacgattcgatactcaccttacattgccggctctatcattgcataacctctctttcttaaattataaggtaaatcataaactttctggtggtctgtacctcctgcttttttaaatttttaaatggggtaaatccttactttctcattggactgtacctgactttcttaaaatttgttttttaggtgtacctttacgttttcggtggtccataccttcctttcttgaaaattacatctggagggatgctgcctttgaactttacgttaagtttctggtggtctgtacctctctttcaagttcctttattattgtgtttcgttcttttcttttgttgagtatatagtaactcttcttcctgattttgtcaatacttttttataatttattttattcttttaaattttcagaatcttttatcattcaagtacacttttctcacttattcaaaagaactttccagccacttcccccttgccttactcttcctccccccaccactacccagaaagggagcgcaggcaagacgaggacggacagccttatgctggtgcttttagctcagctttgcgttaccagcggttgtccgtccccgtcctgcctgcgctccctttcgtccgaatagccgataatccgagcatccaacaaatccgagtaacactccttacttctggaaagccttcaccctctcctgaatcgtaacattaaaattctccacccgtctctcataagtctcctccataaacttcgacgtcagcagaaaatccgccgtagccagattattcgcaaccggaatatcataaaccaccgcgatacgaagcagcgcccgcacatccgggtcgtgtggctgtgcctctaacggatcccataaaaacaccagaaaatcgataccgccctcaacgatccgggaaccgatctgctgatctccgccaagaggaccactgcagtaccccttcaccggaagacccgttttctccgcgatcagcttcgccgtagtacccgtgccacacagaaaatgattcttcagcacatccttgttccggtcacaccactccaccagctctttcttcttaccgtcatgagcaaccagtgcaatgtgcttcgtcttctccatcgtaaaaccgataaacttctcatttgtcataaacattcctccttcattctttatagatttccttaatgataatctctcaaaaaacgactcgaaagcgtcgttcccgttccatacagacactgatacagattctccagaatcgccggtgtctcatccagtgccttctgataaagctccatcagccgtgttgttgactccctgcatgcaggatttgccttttcccgcatcacctgaccttccaggatatcataacatcccagtacatgcatgccgccaagcacgatcttttccttgatcggattcctgcaggtcagaagcttatcatacatcttctgtccctccagcgcccggtgaatctgcttcggtgtcaccgatgggaacatccgcgcgatcaccctgcagttttcctccgaatcatccaggacactcgccggaagatacaccctcggctcctttcccgtctccagcatcagataccgatcaagttctgtctcgatctccgcgtgagagatccccgtctgcttctcaaaccttcccacatatccgtggcaggtgctgtccagcataaaatggcaggcaaatccaaacagatacgatgccagctgcggtgacgggctgatctcaaactcccggattccttgctggaagaatccaaacgccggttctttgtgcatccgcggtccgatcttattgatccggctctgcggcaggcgaaccggtttgtaataaaagaaaatatccggtccgtgctgaccgatccggtacagtccctttccctttcggatcaccgctttgatatgttccggtaatttcttgtatacatcttttccaaacttgtcatgcgtatatgttgtcggcatatctatcgtccccttttttcagttcgggaaatactcccgttttctattatcccctatcgttgttcaaaagttatgaattgcaggttaaattcctgtaaacctgctgtgcaattccattcacacaaattattataattcttttgactgccggaaacaagaaaatttattctgaaaaaatctgaaacttttgtgtttctttctgaatatcttctcattttccggtcatactataaatagccggtggggagatgacacaaaggcgtgacgcttttcattggcccgaaagaaaaactgcgccggatcccccctccggcctggaataacgaaagaagagatgaaatacttatcctcccctttataagctgtcgccctgtgcggcagcttttttattgcttcagttaatatccagcttttccgcaatctgtgctttcattctctcatactgttcctgattgattttgatctgattcccctgtttttcgatcaatccctgttcagaaagttttttcaccgcccggttgacgcttttcagacaaaagcctgtcttgtcagccagacttttctgcccttctctgacccacaacacaccgccctgtccgtactgctcaaaataatccacaaacaacagcgccagccggtccgctccctgcatcagcagaaggctccgctcatttcgcgcctgctctaacagatattcaccaaccagctttgcctcgtatttgagggcatgaatatccgcatacatccatttttcaaacactgcccttggaatctttacgatcgtgcaccgcgtaaccgtccgcagcgacgtcttatactcttccagatccatcagaaattccattccgccaaaagcatacacatttttaaactgcatgtaatcatacgccactccgaacacccgataatctgtggctaccacgatcccctgtgccaccagatagatcgtatccgcaggatcattttcccggacaaacgtcactcctttttccagtgtctccaccgtgaacgcatccagaagccacaaaggagcagtctgaaaataccgttcaaactgctcccttctgtctttttttacatcttttaaaaatggtagcctctggtacaaatatgctttttccatactctacctctcttttttataccagttcttttaaaatcgaagttccgatcgttccctccggcatctgtaccccgaagttttctgcgatcgtggcaccaatgattgcaaaggtatcctgatttggcagtttgccgccctctttcatctgttttgcataggcgataaacggcacatactctctggtatgatcggttccggtgtaggtcggatcgttgccatggtcagcggtcaggatcaccaaatcgtcctcccgcatggtttccatcagctttccaagtcctttgtcgaacttttcgatctctcttccgtaaccttccgggtttctgcgatgtccccacagagcatcaaagtctaccaggttaacaaaacacagtccgtggaaatcctctttgcagatgtctaccgtctgctccataccgtgtaccgaactttcggagtggtaggtctttgtgattccttcgccacagaaaatatcattgatctttcctacgccgatcacatcgtatcctgcatctttcagtgcatttaatgcggtggcgttggacggtttcagggcgtaatcgtggcggttgctggtacgtttgaactcgccttttttctttccgatatacggtcttgcgatgacgcgtcccactctccactcatctttcagtgtcagttctctcgcgatctcgcagcagcgatacagattcgccagatcaaacgtctcttcatttccacagatctgtaacacggaatccgcggatgtatacacgatcatcgctccggtgttgatctcttcttctcccagttcttcgatgatctccgtgccactcgcactcttgtttccgatgacacgcttaccacagcgcttttccagttcgccgatcagttcctgtggaaatccggtttccgtgaaggttttgaacggttttgtcgtgttgattcccatcatttcccagtgtccggtcatcgtatctttgccgttgctggtttcgccgatgcgaaggtaacgtccgatcgggttctccacgccttccatcttgccgcctttgtgaaggtttaacattccgagttttttcaggttcgggatatccagtgttcccatgatatccaggatatgtccgaaggtatccacgcccttatcgccaaaccgttccgcatccggcatcgcaccgatacccagagagtccagtacgattacaaatattcttttatatgcttccatcttaagtccctcctgttcctgccatttttttcattatatcccgtttatgcaagatttgccggtccgaatccctgtggaagaagttcttccagcgtatacacatcgtattgttctttgctcactgcaaggatcactttgaaggttttcggatcgcagaattccatcatgacctgtctgcacacgccacacggtgctgcgtattcggtcagcacgccgtcttttccgccgacgatacagatcgcatcaaactcctgtacgccttcgcttatcgccttgaaaaatgcggtacgctccgcacagttggtcggtgtatacgctgcattttcaatgttgcagccggtgtaatacagaccgttttttgccagcagcgctgctcccacgtgaaaatgagaatacggtacataggagtattgcagctgttcgatcgcaagatcaatcatttcttctatctgctttttttccatcttgtttcctcttttccgtctaaaatcttaatatcctgttgcttcttcctttttgatcagtttgatgatacggctcgttccgagacggtccgcgccgagttccaggaatttttccgcatcgtccatgctggagatgccgcctgctgccttgatcttcacgccctcgcccacatgttttgcaaacagttcaatatcggcaaaagtcgcaccgccggtggagaatccggtggaagtcttgatataatcggcacctgcgcgcgttacgatctcacacattttgatcttctcttcgtctgtcagcagacaggtttcgatgattactttcaggactttctccccgcacacttcttttaaggtgcggatctcgttttcgatcgcatcgtattttttgtctttcagccatccgatgttgatgaccatatcgatctcatcggcaccgttttccagcgcatcttttgtttcaaatgctttggtagctgtggtcatatagccgttcgggaatccgataacggtacagatggctacttttccctgtacatactcgctcgcctgttttatatagcttggcggaatacacacggatgcggtctggtattttacaccgtcatcacagatctgacggatttcttcccaggtggctccctgtaataacagggtatggtctacatgttttaagatctcatttgtctgcataacttattcttcctctctgaatccagaatgaaattatttgttctggtctactttgatcatgttacggattgcctgtacggctacctggatcgctttttcggtatcgtgtaccaccgggttttccagtcccagtttttctctttcctgattggctacgaccaggaaacaggagccagcgcggactctcaggtggcttgccacgataaagagggctgcggattccatctcggaagcgaggcagcccatgcgtttccatgcctcccatttgttcatcagttcgtagctgaccggttttgtctccggctcatgctgaccgtaaaaagcgtctttgcactgtaccacaccggtatgatactggcagccttctgcttttgcagcttccaccagtgcattggtcacggacagatctgccactgccgggaattcgatcggtgcgtactctttgctggttccttccatacggatcgctccggtggcaacgatcacatcaccgctctttacttctgtctgcataccgccacacgtaccgatacggataaaggtgtctgcaccgcagcgatacagttcttccattgcgatggatgcggacggtccgccgataccggtggaggtcacacttacttttaccccatcaagagttcctgtatacgttacatattctctgttgtccgctacaagaaccggatcatcaaaatattttgcaatctttgcacagcgtttcgggtcacccggcaggatcacatagtgtcccacttctccttttgctacctgaatatgatactgtctgcttgcatcttctgaataatttttcatgtttataccctctctctgtttctttttgcagctgtccggcgttatcccaatgtttgccggacagttgatgtattttttatttttatctctgtcccttatcgtacgggataccttccgctttcggtgctctggattttctggagataaatgccagaacaaccagagaaataatatacggaagcatgttatataaactgcttggcagtttcagtgccactaacggggcaaatcctgtatacacgttggacagtgcacggaagaatccgaataacagggctgccagtccgatattgaccggtttccactgaccgaaaatcataacggcaagtgcaaggaaaccaaaacctgccacaccattctcaaatttccattcgctgacaccggcggtgatatagaccagaccgccaagtccaccgagtgctccggagatcaggacaccggcgtagcgcattttgtatacggagatacctacggaatctgctgcctgcggatgttcgccacatgcacagaggcgcagtccgaatcttgttttgtacagtacaatatgtgctgcgatcagaacgagtacgacgatcagcataaaccagttaaattcaaaatctccgatatttaccagaaatacctgttttgctttccggtatacgatcgtggaggatacgttgtccgggttctctgccacgttgatggctcttacgatgacaacggctgccgctgttcccatcaggttcagtgcagtacctaccagtgtctggtcggcattgaagttgatagctgccacaccaagaagcagggaaaacagtacacccatcagaaggcttgccagaacgactagtaaaaacatcacgatcgccggtacgcctgccggaacgaatttcatcaccagggctccgccgagtgctcccataaccatgattccttccagtccgatgttgatgacaccactgtgttccgaaaagcagccgccaagggctaccagcgccagtacagaggcgaaaattaatgtatattgaatcagtaacaacatcagcgggtacctcctttctcttctttcttatccagataacggttcagccagcgtttgaagaaaaatacaaacgcgcacagataaatgataaaggctgagatcagatcagaaatctgtgtacagtataacgtggtatccacataggttccaccgctggtgatatgctggataaagtaagaagcaaacagggttccgatcggatgcagaccgccaaggaacgcagctgcgattccgttaaatcccattgccggtacgctggtctgctgtaccatccactgctcgataccgcttaagtagaagacgcctgcgccaaatcctgccagaccgcctgcgatcatcatggtcacgatgatatttctcttttctttcataccacagtattttgctgcctgtttgttgcttccggttgcctttaattcataaccgaattttgttttgaacaggatcacccataccaggattgccatcaggatggctaacggtacaccgatggtcatgtatttgttatgaaacaactgatccaaacccagtttcgggagcatggctttctgattgaagttaaacagcagtttggtatacggtgtggaagtatcttttaccgttgtcagcagcatgttcacgccgtacagagagatccagttcagcatgatacaggagataacttcgtttacatttaagtacgctttcagtgcaccggagattcctccgacgatagctgccacgatcacacctgccagaaggcatacataccacggcatctcaaatttcagtgccatgtacagacatccgcccgcacctacaacatactgtccggctgcaccgatgttaaataagcccgctttgtaggcaaataatacggacagcgcacacattaacagggcagatgccttgatcagtgtcgtaccgaaatacttcgttgccgccgctgcattcggatagtagaaaaagttcttcataattgccacgattgcttttcctgcgcccgccggattgatgatcagcagtacgatataaccgatcagaagaccgatcgcgatacagatcagggaggcaagcaccgtctgaaaagcattatttctcaacagcttctgttttttatccattttcttttgtcccctttctctttgagcctgccatatacagtcccagttcttctacggaaactttcttcgggtcaaattctcctacgatttccccttcgtacattaccagaatccgatcagatacgttcatgacctcatccagttccaggctgactaacagtacgccttttccggcatctctttctgctaccagctgtttgtggatatattcgatggctcctacatccagaccacgggtcggctgtacggcgatcagaaattccggattcttgtcgatctctcttgcgatgatcgctttctgctgattaccaccggacatggaacgaacggttgtgatcgcaccctgaccggaacggatatcatactgtttgatcaggcggtttgcataggaacggatcgcttttcttttcagaaatccaaatttattcgtaaattccggctcaaaataccgttccagaatgatattgtcttccagtgagtaatccagcaccagaccgtgtttgtgacggtcttccgggatatggctcataccggaggtgatacggtttcggatggacatatttgtaatgtcctgtccgttcatcgtgatggttccttcttttaaaggctccagtccagacagaccgtacaccagctctgtctgcccgttgccgtcgatgccggcgatgcagacgatctcacctctccgcacatcgaaggatacgtgattgactgcgttatttttgtggcgtttggatgccacggtcatatttttgacgctcaacaccacttctttcggctgtgctggtttcttctttaccacgaagtttacgtcacgacctaccatcatcgcagataatttttccggtgtggtgtctttgatatctacggttccgatgtattttccttttcgaaggacgctgcagcggtcggcaactgccatgatctctgccagtttatgggtgataaacagaatactctttccttctgctgccaggtttttcatgatggtcatcagctcctggatctcctgcggtgtcagcacagcggtcggctcgtcgaaaatcagaacttcgttgtcacggtaaagcatctttaagatctcggttctctgttgcatacctacggtgatatcttcgatctttgcgtccgggtctacttccagaccatatttttcagaaagtgccaggactttctttctcgcctcgtcttttttcaagaaaccgccttttgtcgtggtttccacacccagcatgatgttatccaggacagtaaaacattccaccagtttaaaatgctggtgtaccataccgatgcccagtgtgttggcatcgttcggatcctggatgtctactttttttccgtttttgtggatttctccttcttccggctgatataagccaaacagtacgctcatcagggtggattttcctgcgccgttttctcccaggagtgcgtggatctcaccttttttcagctgcagcgtgatattatcatttgccacgatgccagggaaccgtttagttatgttcagcatttcaatgacgtattcgctcatagttttctcctttttctatcttccgtttatttgatgctgccgtagtcggttgcctggatctccgtctccgggaagctggtggtgtcaccggatacggtcagttcgccatcgtacattctctgtaccagatctctgtaatcatctacggtaaagttgtcatcccactgggtggttgtttccggaagctgtacatagttttcttccgggtttgcggattccagaccgaggttttccatctctccggcatatgcatcccaggtaccgcctttgatcgcgctcagcacgttgtcaatggttacctgcagacctttcatcgcagatgtcacggtcagaccgtcttcatactcatcaatggttgcggactggtcaaggtctacaccgatgatcttgccgccggtcttgactgccgcttccgctgcggatgtatagataccaccgccacaggcaaatactatttccacgcctttggaaccaaaccaggtatccatataagcggtaatgtccgcatcgccgtagaactgaccgccacatacatattccacctgtacttcatcggtgatgccaagttcttttgctgcctgatcagcaccctgtacatagccgtaaccgtaacggtttactgccggaactgccataccgccgaggaatcccagatgacggtagccaagttttactgccgcgtaacctgccatgtaaccggaaagttcttcctggtaagtacagcagaatacattttctgaatgataataatcttttacattatagtgatccgggttgtaatcgtatccctgaccgattcctttttcacagatatctccggcacttacgtcgagtgccaggaatttgatgtccgggtacaggtcggactcgtcaatgacagtcggtgcaaatacataaccggacagcacgatcacattcgctccgtcggcaactgcctgatccacactggcggttctcgcctcatcagagtcgctctgcggtttgtaatagttaaattcgatatcgttttcttcgccccatgctttacaggcttcgtaggtcatctggttaaaactctggtcggtgatatcaccggagtcggtaatcatcgcaaccttcatcacatcgtttgctgtatccccctgtccgtcatttccgctgccacagcctgtcagcatggacatcgacaggatacctgccagcaggaatgctgctgctcttttcttcatgtttctttctcccttctttttccggtcatccggtaaatcgtttttctctttgcaagttgcttacgtctcactcatttctgtatgctcagtatatgcacattttacactttcggataggacatgtgtccttttttcttttacttttctgtgatttgtcgctttgtaataatttgcgcatatcctttttgtgcatatcatctataatagcattggctactgcatccattcgggaaaatctgttgtttcatctgtctgcaatattctgcttcactccctgctgttttcagaattgtcagagatttgtgaagattctgaatatctgctttcatatcctcgctgtgattgccacgccccaccagtttcaggtgcgtgatgccggcttcctgtaaccggtacagcgcacacagaccgcatccactcgcaccacacagatcatcttccatttctaaatattccggttcggaagaaaccgcggatctcccttcttctcggaatgtttccagccgtttcttccatccgggatcttctgctttctgcggtcgcagccagtagggtgtgcgacacagatgtcccagttcatcgcagtgcagggaattgcagaaacttccggaaaactgacacagttcgttcagcacaaacgcttcaaattccgtcctgcttcgttttcctcctgcttccttctctgccgcgatcatggatgccatatcttctatcgtattctttcggtgaaaaatcatacgtttcagatccagattctgaaaagtttccaccattttgcggttattttctcccgtctctccactcagatggatctgacagtccaccccctgctgccgcagatataccatcagtgctggatccgccagaataaaactctgaaagccaagatccatacagcttcggataatcttctcgatcatcggatactgttcggggatgtaatacagggaattaaaggtcagatgcaccgggcgctgatagtcttcccgcatggcagccagaatctccagttcactgtacgctcccaactgtacctgataacagagcacttcccggcggttcaatgccagcgtggttccgtaccgtttcgtccacgcatacggcacatacccacagaaaaattcatccgctcccgcctcacaaaatgccggataatcgtcgatacatccgagtcctgccacaattttcatacgcacgccctcctacagtccgatcaccagacggtcgatgcctgcctgttgatatgctttcagcttttccggatgttttacaagttccgcatccagcccgaacagagaattgtaccttcctgccatatgcagatgttccgagtaaagatacgcatactgttcacagtatcccggacagtgctccggcaacctctgttttccccgctcgccctcagtacagctcgcatacagcgggcagtactgggaagtattggtttggtaatatggcagatgcaggctgttctttccctgtggaaatacctgcggatacccacagctttcccactcatagcgggtgatcccgtatgtgtcctttaagaacgtccgataaaaatccgcctgcagattactttctcccagtccgcgggtactgccttttttatagcgcatccgcggatcctttttctgcttgttcagaaggactccgagacagggttccagatgcttcccgctctctttcaccagagctgtcattccccagtcattgacgagaatttccaccctggtctgccgtttttcacaccagttgtccactttttttaagagttttccctgctcttccacctgaaactcccgcatacaggggaataccagggtgatttccatattttccacaattgccttttccatcagggcaaacagctgctcttctttcggaaataacagatggcagaatgcattgccgatatacaggcgatcggggattgttttatactcttcccagccgtcgattccgttttctttccagtactgctcggcaaatctttctattggatttcgttgatacaggtcataccatgtgttccggtcaagttccagagcgagttccatgccctgtaccaccggctggatccgtgcaccggaaaaccagttggctttctgctcttccatgctctccgcatggatctcgtcctgatccgccggatagttgcaggcgatctgcgccatctctccgtccgttccctcaagccgtgcccggatatatccggtgtattcccggaaaagtttctgtactgcctgtgcataatcttgctggaacaccttgacggtataatttacataccactgctcctgccttttttccatgaaatgataactttctaactccacttcccggtacatgctttcagataaatcatagaatccgatccgtatatgccgcggtctttccacctgttctcttacccgaaagcaaaagctttctgtagaaatctccgtgatccgcacttctttgtcatcgacaaatcctgccagaagtccgaatggaatcatctccacactctgcatcccgcatcacctccccgtctttgcgtcatatatttttttctgtctcgtgacactaaaaaaggtccaccggacctttttgtcgtatgcttggcaactgaaaaaccccttagtaacgttccttttgttccgttactaaggggtttccttcacatctattcgctaatacctctgtttgttttaagcaaagaatttgtcatagatgccataaccaaagataaataagatcatcagcggcaggatgtaagacagatacacacgcatccactcctgcatcttgaaaccttttcctgtattggcttctgctttgaagtttttccagccccatccgtaacggctggtacaaaacagcagatataccagagatcccaatggcagtaaaatgttacttaccagaaaatcttccaggtctaatactgcaccgccgaagatggaaaatccatcccagctccatacattatatcccagaacacatggcaatgacaagaggataatcccaaacagattcacaagactgctcttttttctgctccatccggtcagttccatcacacaggatataatattttcaaaaactgccagtactgtagagaatgccgcaaaggtcataaaaataaagaacaaacttccccacagtcttcccatcggaatatggttgaagatattcggcagggtgataaagatcaggctcggtccggatgtcggacttactccgaaggtaaagcatgccggaaaaatgatcagaccggatacgattgccacaaatgtatccagaatcgcaatatttgcagattccccaagcaatgatctttcctttccgatatagcttccgaaaattgccatggctccgataccaagactcagggtaaagaatgcctgattcatcgctgttacaatggtataaccgatacccagttctttcattctttcaaagtccggaatcagataaaacttcagaccttctgccgctccgtccatcatgatactgttaatcgccagcactaccatgatggcaagcagtgcaatcatcattacttttgtgattttttccagaccattctgcaaacctctggaacatacaaagataccaatggccactacaacgatcatccagaaagccataacaagcggttgtgacaacatctcattaaatacgccgccgacctgatctgcatcaagtcctgcaaacttaccggttgctgtcagataaaaatagtgcagcatccatcctgatacagttgtataaaacatcatcagcagatagcagccgatcacggtgatgtagccgtggatatgccatttctgccccggtttttcaagtgcctgataagcttttaccggacttttctggctggctctgccaacggcaaactccatagtcataaccggcagtccaagtatcaccagaaagatcaggtaacacagtacaaacgcgccaccgccaccttttcctgcaatgtaaggaaatttccagacattaccgattccgatggcacatccggcagatatcaggataaatcccagacgcgactttaatttttctcgttccttcattcatctttctccctcatatagatttttacaaaatacgtaactgttcagtaccttcacagttacgagccaaaatgcatttaaaccttcggtgatggcattttggcttgcatgtctcgggattttgacatattcatgtcaaaacacctcgcgggacagtggctactgaatagttaccaaaatactaacagggcatacaacaacagcctggacagagcatattcatgcacaggcactggcagcaccagtttcccataccttctcccggtttctgatagccgtatccggtactcatattctgataccactgtccctgagactgcagctgctgataaagtctctgatacatcatgttgcccggttccatctccatcgctgttctggcatcctccatagcacttgctgtatttcccgctccggcacttgcaatggcatgataataataccattctccatttttttcctgcattctttccaggacatttaaagcctcccggtaatgaccggcattgatgtagttcgccgccgcacgcatctccatggaacgctgatcatcctgtgtctgataccctccggactgatacccaccgtaccaggagttttgagaagttccctgttcccgttccctcacgatctgatcataagcctgctgtacctgtttgaacatctcttccgcctgctctttattgggattattgatattcgcatccggatgatattttctgcttagcttccggtatgcttttttgatttcgtccatgcttgcatctcgcgatacaccaaggacgctgtatggatccaacattccttattttctcctcgtctctttttcccgggactttattctgtcatattttgtccagataccagaatacaatatatttcgcaaaatgtccacatattctatgatcggaagtttttcaaattggcgggaagcttcagccgcttccatcatcagaatctgtctggcccggtcatcaaagtctttttcctgtgcgatcggcttccatgggttatagtttcctttttttctgtctttttcaatatcctcataagcatccatccggtagatgaatcttcccatggcacaaccgatctttcgcattgtatctgcccagacatcttctttccagacatagatttcacccagcatctctcccgtatctgctgctgccctgtcaagatccgtacttgcttcctgctcacatgctttcagcttttgcagataggtttcgattgctctcgcctgccgcggatatctttcctttaaacgttttacgtctttttttaatgctgatgcaagtataagaggaaccggttttttctcgtcctcccagtcgtctaacagattataataactcaacagtacattcatatccgccgcataggcagtccactggtttctcagacagagatgctttttgaacggatgcatggcacagaagtgctcttcccgctttgtttccgtctcatacaggccggtcagcaaaattccgagaaaggtcacatcatacgtcagagtaaccctggaagtttgtccgtgaccttctttcagatcctggcagactccgcagtaaaatccatgatagatccgatagtctttgatcttcatttcttccatattggttgtaacgtagccaaacatcctccctcacctcttttctttgtttgtctgtttatgatctgttcatctacttcataaaatttatcaggtgcgtttgataaaattacagttgcaatttggacagtgaatcgatatttttccttttccttttggtacccggactttttgtccgcaggtcggacatttgtaaattcgatgggtgctgtctccgtgacttccggtcagtttgttccattttgttcttactttttcacgtgcctgaatataatgctgattttcctggtatctcgctgagatatctttggaaagaatacgatagtaatcatagatcaatacgagcagaatcagcagggaaaagatcgaacttctcacaaagaaggatacgagcagaagtccgaacagcagatacatcagaaatcttcccagttcatctattcttccgtatctgccctgcataaatcgatatagtttgtctctccagttattcattgttttctccccgttctttttttactgtcaccacattctcagctctttctctcatatctgtgcagctttctgcttttttccatgcttccctggcaaatgcaactgcattctgtatatctgcatcgtccgggtgcagcaacgctttatcaaagtttcggatcagcatctgtgctttttctctctgctccggattctcttccatgacttcataacgttttcgtacctgcatcggcatctttcccatgcagagaaaagcccccagacagctgttgtctttcggaatccactgttttacattttccacaattctgtcatagtattcctgactctgcccgaatccacaggttccaaacagtacgatctgcctgttatgtacttttttcagaagttcctgcacttcgatggggcagtctcctttttccacacaaaatcccacatacaaaagatggcttttcccaggttccgtattgcagttgatttcctcgatatctccgttaccaagctgttgtaaactctgataaatacaaactgccagccgctgggtgtttcccgtgcgactgacatacatgattttataatctaacatgatattatttcccgcctttccatctgcccgcttttttaatttttccggtattcgacatctttgtttcagatatcgttttgtcaacaggtttactgtatactactttcctgaatattacaaggatcggcatctaaattttttctaaaatttttgttatgtaagatgaaggagtatctttataaaatacatgttatgttatttcattttactttccgttttctcttttcagcaacgtttccaggtctttttttgcctgttcatggttctgaaacagaatgccgtgaatcccacaggctccggctcctgcgatgttgtcttcccggtcatcaaagaatacggtttccctgggattgagttgatacatcgtgcagagtttttcataaatctctcgatccggttttgccattttataaacataagaaaacaatgttccgtccatgtagggcaggaatttcatcttgtggctggacagctgatacgtatgctccgcatagttcgacagaatatacagatggtatccctgttctttcagggtttttacccaatcttcagcgtatggcatcagttccaccacgtcaccaagattatcatataccgtctgcacttctttttttaatcccggtgcatttttccgaaagccttcccagatttcttccgttgaaattatcccgcggtcagctgcttcccacagcgtactttcaaagatcaccttacgcagagtctgtactgttttttctgaaaatccaaggttcttcagatagttttccggagtgtaagacatcagaacctgcccgacgtcaaaaacaatattttttatcatgtttccctttcctcttttctgtgttttattttttactttatttgtttcggtttttcagataacggtagatcatcatgtaggcatacaataataccgggacgatgatcgttgctgcaatagaggctttgaaccagccaatggagttttcacttccggagagggcaaagatcatggtggaggcatagagggccagcaagaggactacgccgagaattgccaggatgcgttgtagttttttcataggaatctccttttttgttttgcttcttttattatactggtttcttatcagaaagcaagaggagtgtttaaaacggacgaagtggacgaaacggacgaagtggacgaaacggacgaagtggaaaggcggacacgacggggcagacaaccgctggtaacgcaaatctgagctaagtcctaagaagaactatgtgccagttcgcggagagccgctcactgtcaagttcttctaaggactggatctcatctttgctaaaggcaccagcaaaaggctgtctgccccgccgtgtccgcctttccacttctgggtattggctgatttttcatatatgtctccggatcgtttaaccgtatatcgtggtcagcttttcaactttttaaagtgttgattttcaaatgttccagtatcttgttagactggttcgtagggatattcgtggtcacatttggactcgaattctttgagattgtatatttttttgttttcatcgaactgtgcgatggttacaccgtcaaaggctcccggagtgtcgcagtagtcgcactggaaataccactcgacgattactgtgttctggcagatgtagatttgtttgatgtcccatttttctacagttcctttttggttccagtcgcggaaccactgttggatctgccggattccccgatattccggaccgtagcattcgctgtagatgatgttgtctgcaaatatatcggtcaggggtttctcgtctttgttcagccagcaggaaaaatagtttctgatgatttcttccattatgttttctcttcttcgtttacctcacatacatacagggtttcttcttctacgcggaatttgatttccaggccggcgaaggggaagccgtagattctttcgggatcctgctggtaggcggggcggggatccagagccaggatctggatcaggggtttttgttttgattgcggaactttgttcaggagttccggcgggaattgtacctgaaggtggtcgtcgcgatgagcggttgcgaagcttccacgtgcttcggggtggctgtcggcataagggatgtagggtttgatgtcgtagatcggggttccgtccagaagatcagcgccctggatatggatgaccggaccatcctgaggattccatgtaacgcctgtaagctgcacactggagagcccgatcggattgggacgaaacggggagcgggtggcaaagacgccgactcttgtgtttcctcccagttttggcggacgcacggttggggaccattcttttcggattgcctgggaaaattcccagatcagccagaggtgggagtattcttccagccctctcacggcttccggattctgatattccgggtagaaatggatctcggcttcgaggtctgccagaccgctctgtcttgggattccgaatttgcttgtaaaatcactttttatataagcaaccggacgcatcatgcgcccggttgtctcattctggtttttattcatatgtctgttactccagatttacttttccacattttttgatcactactgccagcacgagcagttccagtaccagtcctacgaccagtgccagccaaccgttaccggtaaatccgccaaccagatatccgaccagacagcagccagctacggtcagtgcatacggaatctgtgtggatacatggttaatatggttacactgtgcacctgcggatgccaggatggtagtatctgagatcggagaaatatggtctccgcatacagcacctgccagtacggctgccacgttcagtgccagtaaggatacgttgttggtattgatcacggctgttacgatcgggatcatgataccgaaggttccccaggaggttcctgtggagaaggaaagtccgatcgctactgcgaagaacagtgccggaagcagtacgccgatgacagcattgccgcttaccacatctcctacgaagtttccaagtgccaggtaatctgaagagcagataccggacagtgtccatgccagtgccaggatcataatcgccggtgtcatggctttgaatccctgtacaaagctttcgcagaactggctgaatgtaataatcttgcgaagcaggtagaagaagaagataaataccagggtaaagaaggatccgagtaccagactcaatgaggaatcgcagtctgcaaatgctgcggctactcctacaccgtcaaggataccgccggtatacagcatcgcgctgatacaaagaacgatcagtacgatgatcggcaggatcaggtcgataacttttccgttaccgatgattttgatttcttcgtctccgtctgcggtttcttctttttttcctaccaggtctgcatggtattttgccatcgcactgtaatcgaagtttttaccgatcaggatgatcatgaatacgatggtcaggatcgcatacaggttgaacggaatggtttttaagaacagtgagaatccatcaatcgcgcagtcatccggcagggaggatcctactgctgccgcccagcttgagatcggtgcgatgatacagaccggtgctgctgtggcgtcgatgatgtaagccagttttgcgcggcttactttgtatttgtctgtgaccgggcgcataacggttcccacggtcaggcagttgaagtagtcgtccacaaagatgactacgccgaggagcatggttgagaacagtgcacctctctgggatttgatttttctggatgcccagtctccataggattgagaagcgcctgattttgtgatcagggctacgatgattccaaggaataccaggaagagcagaatgtttacgttgtcgccgattttccagttcatgacttctaccatggtctgggtggcggcgaggatgtggaattttgtaaagagcagggctccggacaggattccgatgagtagtgacagatagacttctttggtccatagggccagggcgatcgccacgatgggcgggactaaggcccagattgttcctgacatgtttgtttcccctttcatgttggttttaatttttatgtttttcggttaattatagcatggtaacgtgatggtgtaaatgggtattgtgcaaacggatgaagagcaaagttgtatacaagacggac

SEQ ID NO: 2573 - DNA, 1104 bp, Unknown
  gut microbiota DNA sequence
ggatggcatgggttccggtatggaggcaagcaaagagagtgagacggtggtggagctgttagaacagttcgtgacttccggattttccagagagacggcggtacgcatggtcaattctgccttgatcttacagcgaaaaggtgggatgttttccagtctggatgtgtgttcgctcgatctgtataccggtgtgtgcgagtttttgaaggcgggagccgccacgacatttatccggagagggaactgggtggaggcgatcacttcgaccagtatggcagcaggactgatgcagaagctggaatttgaaaaaacgacgaagaaactgtatgacggggattatctggtgatggtcacggacggtgttctggacgcgttcggggacgagccgggagaagagattttaaaagagatgatattgcaggcgcaggaacagatgccgaaagaactgggacggcatctgctggaaaaaacattgcagtatgcggattatcgggcaaaagatgacatgaccgtactcgttgcgggaatatggagaaaatagatgactacaaaaggtggaagtggacaaactaacagacagatgtggaaaacagaacagaaagtgaaagtatatgtggaaagattccatatgatcgaaccaaaagatacgatcgtgctgggtatttccggaggggcagattccgtgtgtctgctgaagattctcgcacgatggaaagaagcgtgggggatttccctgcgggcagtgcatgtgcatcatcagctgcggggagaagaggcggatgcggatgagagatttgtgcgcgaactttgtgagaacgaagggattccctgtagggtatttcatgaagatgtgcagggaatggcgcagagagaaaaaatcggtttggaagaggctggaaggatcgcacggtatcgctgttttgcaacggtctgcgaagatgtcggtggaggaaaaattgctctcgcccatcatcaggacgatcttgcggagacgatgctccatcatctggtacgaggaaccggcatggcaggtctttgcagtctgaaaccggtatccggcaatcggatccgcccgctgctctgtctggaaaaagaagagattct

SEQ ID NO: 2574 - DNA, 3145 bp, Unknown
  gut microbiota DNA sequence
cgatcacgatgatatcattttccgccgccagagtatcatacgctttcataatatccgggatcagtttctttttgtaggcaaaataatcgcgtgcgctcatatttccaagaacttcgccgtttacgatcacctggctgcctacatcattagtcggttttaacaggatcggattcatcagaacggaaggcttgatgcctgccgcttccgcctgcatgacctgtgctcgtcccatctcgagtccttcttcggtgataaaggaattcagtgccatattctgtgatttaaacggtgctacccgataaccatcctgtttaaagatccggcacagtccggctgccagcaggctttttcccgcatttgacatggttccctgtatcataattgcttttgccatgattcatctcctcactttccgaatcttccgtaataactgttcgttttcgttatgcagcttcaccgcgatccgataacaccctttccagaggcccggatagttgctgcagtcccggatcatcacgccttcttccagaagtttttcatacagatccggctctccctcaaagaacacataatttgcctgggagtccagcaccggatatccacacgctttcagcccgtctttcagaaatgcctgttcctgaaagatcagttctcttgctttttctacatacgcggtttcttttaacgccgcaacccccgcttcctgcgccggcatcgacacattccacggctgcagctgttgttccattttctccatcagtgtttcactcgatgtgattccgtatcccagtcttaagcccgccatcgcgtatcgtttggtaaatgctttcagaagaaacagatattgttttccttccagttcaccctttagcgtatgcacttccggttccgaaacgaaatccaggaaacactcatccactaccagataaatatttctcttttcacagatcgttacaatctcccgcagaagcttcggatttatcaggattcccgttggattgttgggattgcataagaataccatctgcaagtcttctttttgcaatttctccagaatcgtacgctgtaaggtaaatccatcctcttttttcagaatttccctatccacctcacatccaacggcttccagtgcctgggcatattccgcaaaggtcggtgccatgaccagcgcccgtttcggttttactgcctgcaccagtgcaaagatcagttccgccgccccgtttccacagatcagccattccaccggaacctgttcgtatgcagccagtgcctgtttcagtttttcctgacaggcatccgggtaatgacagatccattccatgctgtcttttgccgcctgaacgaccgcgggcggtgttcccagcggattgatatttgctgaaaaatccagcacatccgggtggcggtagatgtctccgccgtgtatgtattctttcatgagtccgttgcttctccttttattataattttaaataaacagacagaccagaacacgcaccagtccaaatgcgaccagtgacagtactgttcctgcatacatcagtttatgtgatcttaagatatcctccatttccactttccggatcggatcgccgataaatggttttttatgcagttctccaaaataccaggcatctcctgccagctggatatccagtgcgcccgccatcactgcttctgtctgtgcagagttcggactggcatgttttctacggtcgcggagatagattttctttgcattttttccatccataccgatcaaccaggctcccgcgatcatcagccaggcggaaagtcttgccgggatataatttaacacatcgtccagttttgccgccgccgttccgaaatactggtatttgtcattcacatagcctaccatggaatccatggtattcacgcttttataagcaaatccaagcactgcgccgccgatcatcatataaaaaagcggggcaatgataccgtcggatgtattttctgcaacggtctcaactgctgccttggttacaccttcctcggtcagattctgcgtgtcgcgtcctacgatcatcgataccgcgtaacggctcttctcgatatctccggtttgcagcgcatcgtagacttttttgctctcatcacgaagggatcttgcggcaagcagctggtagcacataaagctttccagtgccacacccagccaggtacggaatccatacgccagatgcaagatcagccacggaacaaaagacgaagccgccacgattcccaccaccaggaatcctccggcgatccgctctcctgtttttgttttcggaaatatgttccgcaggattttttctaaaaatgtgattccctttccgatgatacgcaccggatgatacagccatctgggatccccaaaacacagatccagcaaaaatcccagtactactgccagtaatgtccatctcatcttttcttcctctttctgtaaccgcctgcttttttgcagttgcgtgttttcttttttcttccattatgtttatgttctcatattttcgcctcgttttctcgagtcattcgcatacgaaaatatgtgtttgttcgaatttattatatttgtactatgtatcattgcctactactgtttttctttttctgtcagttgtatcgccgttattacacgtagcactgggttttctcccgctccttccatccattccagatttacttccgcctcatatccgcatccgttacctacatgccattcataaaattctttttttgtttccgcaaaccgttccagcaccgccatgatgaccccgccatgtactacgaacgctgctgattctgctctatcttctgcacagatcttcagtccttccagaaatccctgacatgctctgtcgcggaattcctgcggatcttctcctcccggaaatggcagcgttgcgttgctgtccacccacgcctgatactcggcatcaccggtcatttctttccagtttttgttttcgaatcttccgaaatcacattctctgagattctgaatcacctgctgttcctgtctaggatagatacacgcggctgtctgacggcagcgaagcaggggacttacaaaaagtttttctgcattcggatagttctgtgttttcagtcgttcctgatcttcttccag

SEQ ID NO: 2575 - DNA, 2983 bp, Unknown
  gut microbiota DNA sequence
accgtctctaccgggacaatttccagtttttctttcacttcttctgctacttcttccagatcccgttcattttccgccggaatcaatacttttttgatgcctgcccgctgtgctgccatcagtttctccggcagaccgccgatcggcatcacaccgccacgcagggatacctcaccggtcatggcgtattccgggttgatcggtgtgtccgttaccagggaagtcagcgctgtcaccagtgtaataccggcggaaggaccatctttcggaaccgcaccggacggcacatggatatgcagatcattttctttaaataaatccgctttgtccgggtagcgttttttcaccagtgtgatcgcgatctgtgccgattctttcatcacatctcccagctgtccggtgatgatgatcttgccggatcctttcgtgaaggaagtctcaataaacaggatctcaccgcctgcgctggtccatgccaggccggtcatcacacccggctgcggatgtttcaggatcgtatcgtgaatgattccctgtcctaaaaactcctgcacccgtttttcattgacggtaatactcttttgttctccttttaccagtttcactgccgcatgccggcaaagaacatcgatctgtttctttaaaccacgcacaccggactctgcggtatattctgcaatgactttttccagcgctccatcggtaactttcaaattctgcgccttgattcccatcgctttcatcgccttcggaagcagatgttttctcgcaatatgaaacttctccaccggtgtataccccgggaactggatcacttccatacggtttaataatggttccggaatcgtatccgtactgtttgccgtacatacgaaaaatacattcgacagatcatacggtacattcatataatggtcggtaaagctgtagttctgttccggatccagcacttccagaagagcactcgccggatctccgccgtaatctttcgccagcttgtccacctcatcgagtaccataaccggattctgtgctttgctccgtttcatgccttccatgatccggccaggcatcgctcccacatacgttcttctgtgtccacggatctctgcctcatcccggataccaccaagactgattctcacatattcacggtgcagcgctttcgcaatgctctgtccgatactggtcttaccggtaccaggcgcacccacgaacagcaggatcgagccggactgttttttattcagtgccattaccgcaagctgctggatgatacggtcttttacttttttcagaccatagtgatcttcgtccagaatctcttctgcttcctgcagattaatctcggtctgttcctctgtcttccaggaaagggaagtcacaaaatccagataatcgtacagcataccgtattcgtggctgtcttttccttcctgtttcattcgattcagaactttctccgcctcttttcgggcttcctcgttcataccggactgtgcgatcttcgtctcaaacttccgcacatccgagatattttccggatgcatctcatcgagctgctgctgcaacagttcgatctgttttttaatggcagattcccggtacacctgttcatgaatctctttctgggcttcctcggcttcttctcccacctggaagacctccataaattcataaacagcttcctcaatctttttgcaccgttctctcttcgaatctgtctctatgataccatatttttcttcccatgtgatattaaaataagatgaaagcgcacatccgatctcttccacattcttccagtgcagaatcacgccacgcgcccagacgccccacggaaatcctttgataaaccgaagaatatcctgtttcattttctcaaacagagccttcgcctcttccttcgggaaatcgtccacatccggaaggatcgaagcatccgccgtgatcacgccgtctttctccagctcgatatcagagatttgtacacgctctctcactttcacgcgcacatttccctcgtcatccacgctgtcgatcgcgccgatcacaccgatcggatagaaatcatccggtgtcatctgttccttctcttctttttccattacaaataatatatcttctccaacagactctgctgttatctctccactgggaaacacatcttttttaaagaaaaatgtcacacctggcagtaacaacaggtcagaaatgggcaatgtaatcatgatgtttcctccttgttcttcttttgttagcactcattctttacgagtgctgattttcatattttattctatcacgttctgttgaaaatgcaagtaaaattcgtgaaaacctttcaaactgctatgttatataaactcacatgcaggcatggattttggttcattgttcacgcaaaaaaagaaaagcaaccagaactctagattctgatcacttttcttttatatcacaatatatatcatctggtcattacatgaatccttctgacgatacatctactgtgtttctacctattataatattacctgctgaaccgttagatactttcaaagtacctgtatcacaatcaggtaaaccggcgaatcgcaagaatggtcttgcagtttgcgcttctgtcatgggtaattccccatttacttccttttgcttccacgattccaccgttaccgtcgtagattgctacatgtccggaatagcagatgacatcacctgcttttgcttcggacagactggatactgcctttccaagacttctccatcctgcggatgttgtatatccaccactgtatgctccggtatttttcagaacctgatatacaaagtgagaacagtcaataccattggtcagagaatttccaccccatacatatgggttaccaacaaactgatcggcataagctacgatagcacttccggatactccgctgctgcttgtggaactgctggtgctgctggagcttgctgtactgttact

SEQ ID NO: 2576 - DNA, 2555 bp, Unknown
  gut microbiota DNA sequence
cagctgtgcgttaccagcggttgccgctcctgtcaggtggttctgcgtttcgtccgtcttgaacgcctcacactattctaaactctaacccaaacctccatctcattctcccccctgttagcccacgtataataaggcacaaacctcaactccacaggctttctctccttcttcttatacacatgatacaactccccctctttcttcgccgtatccacaactctatatccctccatcagcacaaccttcacctgatttccacagatctccccatccgaaactcgtgcctcagcctccggctccacctccagaagatgcagattctccccattatccaccgcttccagacaatatacaaccggtccgtgcatcactgccaccctgccggcatcctcacgaaccctttcgtccgcctctaccagccgtaccggcatcgcaaaatgaagcttcaccgtatcactttctccccatgccttcttcacatacagatacccgtctttcactgatacctcgtcctgctcggcgccttccagggtatatgccccttcacaccatcccggaatccgcatcgcaagtacaaactccgttcccttcgcctctaccgtgaccgcaacctccccgtcccacggcatctgcgaatccacacgcacctgtacctcgcgctcgccaaccattttcttcaatgtacttcccatatacagatgtacaaacagcgtatcctctttctccgtaaacgcatacgccccgatcgaactgatcagtctcgccagattcggcgggcagcatgcacagccaaaccatttctgccgtaccggtttgacatggaattttctctcatccttatgacacgcttccggcagtacctccagcggatttacatagaagaaactctttccgtccagtgccatgccgcttaaaatcccattatacagcgccagttccatcacatccgcatattttgcatccgggcagatctccagcatccttcttgcaaaaaataccagaccgatcgaagcacaggtctccgcatacgccgtatcattcggcagatcatagggaaaggaaaatgcttcgccgatatgtgtaccgccgattccaccggtgatatacattttctcttttgtgatgctgtcccacaatttctcacacgctgcatacaacgattcgtccccggtcatccttgcgatatctgccataccggaatacagatacaccgcgcgcaccgaatgaccaaccgcttcgtcctgttccctcaccggcatatgtgcctgattatatgcatatctcagatcatcctcatgaccacgtttcacctcttccgggtgctctttatcaaaataatacggacgttttccacgctcatcgataaagaatttgctcagttccagatatctcgcctctccggtcacatcatacaggcgaaccagcgccatctccgcaatctcatgtcccggatagcccttgcattttccttcctccgcgccaaaatgcgccgccgcataatccgcaaaccgcgccgctgccttcaacagcttgtcttttcccgtcgcctcataataagccaccgcaccctcgatcagatgtcccatacagtacagttcatgatgatctttcagattggtaaaaatatgattctttccattaataatatagtaagtatccagatatccgtcgtcctgctgtgccgcacacacgatatcgatcgcaccgtctgcgatcctttccagttccggatccggatgctgggtcagagaataacccaccgcctcgatccatttggaaaaatcactgtcctgaaagacaaatccataaaatttatcttccagatgctccggatcttccggcagtgtctcaaaaccgcggaaggtatattccggttccttaaatgcatctccccgttctcttctctcctgattcttttttgccgccaccttaaaattccgcatggcaaaactcggagccgccccctcgacccgatcgttcaacgcttcccactgatacggaatcacttctttccttaccagttccatctcccgcttccagaaactgtcattgatctgcatgctgcgcagtgacagcggatgtgaatacatttttttatccatttgcaatacctcctgtttgcgattatacttacggtaggacttgaacctcacgtttttctggttctatcctaatataattttgctgatttatacattgatcatatggaaaccggcatgtataaactggaaaggtcttacgatggtacttcttgagaaaatgaaactgcatacggtcgcaagtggcaactatgttacatccgtccacgggatgctgcacccggaccgtattttaaaagaacacgattttttatatattttagatggaacctgggaaatccgggaagatggcgtgatctatcagctgcacagcgacgatcttctgattcttgctgccggacgtcatcattatggactggagatgtgtaatccaggaaaccgtcatatgtatatccatgtacttcccacccgcgcggaagaacagtataacccgtctcacaccacaacggatga

SEQ ID NO: 2577 - DNA, 1464 bp, Unknown
  gut microbiota DNA sequence
acaagagtgcaatttacagataacagcttcactttatttttacaggaggtaaaactatggcaataacagcaaccatggccgaagcacaaaacgactattataaagcgatgcgcgccggcaaaagagaaggcgagattcttcccaatcttgatgatatattaaaagaaaaaaacattgtcgctgtccgggaggttcctcttggactggttcagatcccttctgaacggatcgtaggaaccaaaactgcaggcagaagttccgcattcagcaaaagtttcaaacctctgctgaaagaaaacacagaatttgcatacaaatggatgaccctgtacaaggcgcatctgaatgaagggatccgtgaacccatcaaagcatatgaattcatgaacaaattctatgtggaagaagggaacaaacgggtcagcgtattaaggttcttcgatgcagtatctattccgggcaatgttacccgtatcgttcccccgagaacggaagaaaaagaaaataaaatttattatgagttcatggacttttacgccctgtctcgtatcaactatatctggttcacccaactgggaagctttgccaaactgcagcgtctcgttggcaaacgcccggatgaagcatggagcgatgacgacagactggattttgcatctgcttacaaccgtttccgtgccgaatacaaggcaaatggtggtgataagatcccgattactaccggtgatgcgttcctttattttatcggtctgtatgactaccgttcacttgacgatatgactgccgtggaactgaaagaacagctggcaaaatcctgggatgagttccggcttctgactaccgacgaatctgtggaactgcagatggatcctaccgacgaaagcgaagtaaagaaaaacttcttcgcccgtctgatccctaccagcaccccaaaacttcttgtggctttcatccacgagaaaaatgccgaaatctccggctggacttatgcacatgaacttggccgtatgcatctgcagcagacctttgaggatcagatatccacaacctgctacgataacgccacggaagaaaatgctgacgatctgcttgcaaaagccatcgccgacggcaacaacctgatttttaccacttccccgccgcttctgaaagccagcctgaaggcagccatcgagcacccggaagtgaagatcctgaactgttccctgaacacttcccatcgctatatccgtacctactatgcacgtatgtatgaagcaaaatttctgatgggagctatcgcaggtgcaatgtccaaaaacggtaagatcggttatattgccgactatccgattttcggtatgactgccaacatcaacgccttcgctcttggtgcaaaaatggttaatccgcgtgcgaaagtatacctggaatggtccaccctgaaagatcacgatgtggcaaaaagtttcgccgaaaacgaag

SEQ ID NO: 2578 - DNA, 843 bp, Unknown
  gut microbiota DNA sequence
cttctctttttccgagatcacacggctgtgtttttcggttccgataccgactttgataacagctttctggatatctttctggcacaggaactggcgatcctcttttgctgccagaatggccgcctcattcagcagattttccagttctgctccggtaaatccggcagtggtctgagcgatctgtgccagatccacatcgtcaccgagcggtttccccttggcatgaactttcaggatctcctctcttccgcgcacatccggtgcacctaccgcaatcgtacggtcaaatcgtcccggacgcaggatcgcaggatccaggatatccacacggttcgttgctgccatcacgatgattccctcattgacaccgaaaccatccatctctaccagtaactggttcagcgtctgttctctctcgtcatgaccgccgcccataccggttcctcttcgtcttgccacggcatcgatctcgtcgatgaaaatgatacatggactgtggcgttttccctcttcaaaaagatcgcggacacgggatgcacccacacctacgaacatttccacaaaatcagatccggagatggaaaagaacggaacacccgcttccccggcaactgcttttgccatcagcgtcttaccggtacccggagggcctaccagaagcacgcctttcgggattcttgcacctactttgttgtatttgtccgggcttttcaggaagtcgacgatctctttcagatcttctttttcttcctgcagaccggcaacatcacggaaggtaaaacgtttgcccgatgttgtagtcatctgtgcacggctcttgccgaagttcatcattttacttcc

SEQ ID NO: 2579 - DNA, 332 bp, Unknown
  gut microbiota DNA sequence
aaaaatgggacctacagggctcgaacctgtgaccctctgcttgtaaggcagatgctctcccagctgagctaagatcccattatttttacacactttgcaattcttgaactactggtcgttcatgctctgtgtgaacgacccagacgggactcgaacccgtgacctccgccgtgacagggcggcgctctaaccaactgagccactgggccatctgatcatgtaccttcaaaactgcatacacgtaacatcctatcttcctacttcctgcggttgaccgcttccaggtcaaaccctcgaccgattagtaacagtcagctccatacattactgca

SEQ ID NO: 2580 - DNA, 4325 bp, Unknown
  gut microbiota DNA sequence
ttatcattccaactatgaacagaattagtgcttcggacagatcgggtgaggtatcagcaataattgagcagactgatagcatatgaatgtaaagatgaaaggtgtcagataacataaacacaccgaaacttttttgatatgttacaatgaggttgtatgtttggcttttttattatagaatgtaaaaaagttatacagtgaataaaactttgaaaaggagaaagtggagtatggatacaacattgaaattaccggttggtatcgaagattttcaggaaatccgtcgactcggcttttactatattgataaaacaaaactgattgaacagctccttgagcaatggggaaaagtcaatctttttacaagaccgcgacgctttggaaaaaccttaaatatgagtatgctccgctgtttttttgaaattggaacagataagactttatttgataatctttatatttcaaaaagaaaagatttttgcgaagaatatatgggaaagttcccgattgtatttttgacgatgaaaggtgtagagggaaacacatttgaaaaagcaaaagcaaagctgagtaaattagttgcgctggaagcagaacgcttttgctttttgaagaatagtgacagattgacagacaatgaaaaagaaagatacaaggcgttaattcggataaaagatggaaaatattcgatggatgaagaaacactggaatcagctttgcagacattgtcagaactgttatttcggcattatggacagaagacgattattttgatcgatgagtacgatgtaccattggataaggcataccaaaatggttattatcgagaaatggtatcattgattcgagctctttttggagatgcgttgaaaacgaataattttttacagttttctgttttaacagggtgtttgagagtttcaaaagaaagtatttttacaggtctaaataattttaaggtactttctattacagatgcccgttttgatgaacagtttggatttacagaaaatgaagttgaaaatttgctgaaagcgtatgggatggcctcgcatcttgaagaaacgaaggaatggtatgatggttatcgattcggagatgcagatattttctgcccttgggatgttattaatcatgtggacagactgtgcaaagaaccggatgcaaaaccacagtcgtactggttgaatacgagcagcaatgaacttgtaaaatgttttattgataaggcaaataaaacaacgcgggatgaaattgagcgtctgattgcaggagagccgatggagaaatttattcggttagaattaacatacgatgaaattgataccagtattgataatttgtggagtgttttgtttacaacaggatatttgacgcaggcaggggtaactgaaaccggagcatataagctgatgattcctaatagagaggtcagagaagtatataaattgcagattcaggaatggttcagggaaaatatattaaggaatacggaaaacctaacagcattctggaaagctgtggaaaaaggaaatacagaatgcatagagaactatctgaataggacactcagtaatacgattagtgtttttgacacgaaagcaccggatgcagagaaagaaaattcttatcatacatttttagctggacttttggcaggaaattccaactggctggtaagatcaaatgtagaagcgggtgaaggatttgcggatattattattgaaccggaagatccggatgcagggattatttttgagttgaagcatgcaagggtagcctctggtttgaataaatcctgtgagaatgcgattacacagatacggaatcgaagatatgaggaatatttaaaaaatgatggaagaaataaaatagtattatatggtatagcattttataagaaaagatgtaaggttgttgtagagagaatcaatggagaaagagattgatgagtgaatgtatgcgaagaattttgaagatgcatatgacaaaattctctgttacagaatatcattatttgagcattgcatggtaaaaaatagcacaaatgatatgcaaggatataattatcggaaaataattatatccttcgtaagcgcaaaataattcgacggattgtgttaccctaaaaatcaattcataataattaacagggaatgcaagcattttaattcattttctgttgctagaaatgatagatgcgagcattttactctattcaatttatggaggagtactcatgagaagcaagaaaatacctgctgaagagcaataccgtctcatcatggagtgccggcaaagtggtctgacagatcatcaatagtgtgtggaacatgacatcaaaccaggaacatttgataactgggtaaaacggctccgccaaaaaggctgtacagaagctgtatggaattactgaaactggcagaaaaatattcgccagaaaaactggaacaggtctgctttatcaacttgctatttagcgcagtagatgataaaatcaaagcacaataggtgagttgtatcaaacagctccagaaaggagtctgagaggcatgggaagatttgtaaaccctgataatagtgcgtttcaggtcgctctaaattctaaaatctacgttgacaaaacgggtctgattgaatacacaaacagcgttctagatacgacagatgcttatatttgcaatagtcgaccgcgccggttcggaaagtcttatgcagctaatatgcttgcggcttattatagcaaaggtgcagattcagagaaaatgttctctggtttggaaatcagcaaagatgaaaactttaagaagcatctgaataaatatgatttgattcatatcgatatacagtggtttttggcaaactgtgttgaagcggacaatgtggttgattttgtcacggactcagttttgggcgaattgcgtgcgatttatccggaagcattgccaccagaggtatctcgtttgccagatgcgctctcaagaatcaaagatagaacagggcagaagttcattgttatcattgatgaatgggatgtccttattagagatgcggcgacggataataaagcgcaagacgactatattactttcctgcgaggactgtttaagggaacagaacctacaaagtatattcagctggcatatcttactggtatccttcctgtcaaaaaagaaaaaactcagtcggcattaaataattttgatgaatttacgatgctgagcgcaagcgaactggcaccgtacattggctttactgaggatgaagttgaaaagttggcggaagaatatcatcgggactttgatgaagtaaaacgatggtatgatggatatcttttgaaggactatcaggtttataatccaagagcagttgtcagtgtaatgctgagaggcgaatttaggagttattggtctgagacggcttcctatgatgcgattgttccattgatcaatatgaattatgatggcctgaagactgctatcattgagatgctttccggcgcagaagtaagagtgaacacagcaacctttaagaatgatacggtaaatatcaggagtaaggatgatgtgctaacctatatgattcatcttggctatcttggctataatgaaatcaaaaagacagcttttgtgccaaatgaagaaattcgtcaagaactgacaacagcggtcgaaagcaaaacttggaatgaaatgttgactttccagcaagaatctgaaagattgctcgatgctacattggacatggatggcgtagaggttgctgcacaaattgagaaaattcacaatgaatatgtatcggttatacagtatcacaatgaaaattcgctgagtagtgtgctggcaattgcatatctaagtgcaatgcagtattatttcaaaccaattcgtgaattgccgacaggacggggatttgctgacttcgtatttttgccaaagccagagtacaaaaatgattatccggcattgattgtagagctgaaatggaaccagaaagtacaaactgcaatgacgcagattaaggacaagaagtacccatcttcgatttcaaactatactggtgaaatactgcttgtagggattaattatgataaaaacagcaaagaacatcagtgtttaattgaaaaatacaagaaggattgacctttcatgccactagtctgctgtgtataattctacacggtaggctggttgctttgcaaacggtaaaaccgtttacgactgatttaccatgtatttttttacagaatatgattagattagcatgaaaataaaaagaaactttaggatgtgtgaagtcatatcaatattccgaaaaaattacgt

SEQ ID NO: 2581 - DNA, 674 bp, Unknown
  gut microbiota DNA sequence
ctgaaaacaaaaaacggacagaaagtctttcaaaagagatgaaatacagaaaacaaacagacagtatcagaaaataaaacagtacagcaggagagcagattatggatattcattggaaacagaagcatacaggagacatgcaggtcagacaaaacaacggtataacgtatctttcctacccaagactggaacaggaatccgccattgtccatggtttcagcacccgtctgggtggtgtgagtgagggatatctgggaagcatgaacctcagtttttccagaggcgacaacccggaaaatgtactggaaaactaccggagaatcagcaaagcgatcggatttccggtagaaagcatcgtcacctccgatcagacccatacgacaaacgtgcgccgtgtaggaaaagaagattgcggatgcggcgtcctgacaccgcgtacctttcacgacatcgacggtctgatgaccaacgagccgggtgtaaccctcgctacgttctacgccgactgcgtccccttatatttctacgatccaacccacaaagccatcggtctgtcccattccggctggcggggaactgtaggaaacatcgcaaaagcaaccgtagaagccatgcacgaagcctaccagactgccccggcagacctcatcgcagccatcggcccctctatttgc

SEQ ID NO: 2582 - DNA, 5194 bp, Unknown
  gut microbiota DNA sequence
gtatcctgggttactctttttacaacctctgaagcctcttcaaatttgtcaattgtaagcattatgattcttcctcctctgtttttacatcaaacagtgcatttacaaactgttctgcattgaatttttgcagatcgtcgatagattctcctacgccgatatattttaccgggatatccagttcggactggatggccacggcgataccgccttttgcggttccgtccagtttcgtaagaatgataccggtgacatttgccacctctttgaactgtctcgcctgtgccagcgcattctgtccggtcgtaccgtccagaacaaccagcgtctccagataagcatccggatattctctctccagcacgcggtaaatctttcgaagttcttccatcagattctttttattatgaagacgtcctgcagtatcacaaagcagtacatctgcatttctcgctttggctgctgccacggcatcgtatacgattgctgcaggatcagcacccgcctgtcctccgatcaggtccacaccggcacgatgcgcccattcggtcagctgttcaccggctgcggcacggtaagtatccgctgcggcaacgatgacttttttgccctgatctttcagctttcctgccagttttccgacagatgtggtttttcccacaccattgacaccgatcaccagcacaacggattttctgttttcaaattcataggcagtgtcaccgacatccatctgtcgtttgatctcatcgatcagaagctgtttgcattcggaaggttctttgatcttcttttctgccacttcttctttcagatgttcaataatggatgtggtcgtattgataccgatatcccccattacgagaatctcttctatttcctcatagaaatcatcatcgatgctggaaaagccgctgaaaatagaatcgattccggctacaatattatctcttgtctttgtcagaccttcgcgaagacgtctgaaaaagcctttcttttcctctgacatatggtttcctctcttatttttttacttcttccttattgtatctttttcactttactgcactatctcattatagaatgatgtatatacgactgcaagtcctttttcgatttgcaaacaattctactcatccagctgattctcgatcaggttgaccgataccagtgtggagacacctttctcctgcatggtgataccgtagagacggtctgccgcattcatcgtaccacgtcggtgcgtgatcacgataaactgtgtattttttgtgagtttatgcagatactgtgcaaaacgggtaacgttggaatcatccagcgccgcctcgatctcgtctaacagacagaatggagacggtttcaggttctggatggcaaacagcagtgcgatcgctgtcagtgccttttctccaccggataactgcatcatattctgcagtttctttcccggtggctgggagatgatcttaatacctgcttccagtacatcctcatcctccatcagttccagcgttccctttccaccgccaaacaactgtttgaataccttgtcaaattcctgacggatctcctggaatttctccgtaaactgtttgcgcattccctcatccagttccgcaatgatacccttcagcgtttccgctgcttctaccaggtcagtatgctgtgcattcaggaatgtgtgacgttccagaatctctttatattcttcgattgcattgacattgacatttccgagttttcggatcgcatcttttaattctgcaatctgctggcggatctcaccgcgttccggcatctctttcatccggtaagtattcgcctgtcccggcgtaacttcatattcttcccagagataattgatctgattttcctgtcgttcttccagtttctctttctggctgttcagtcggaaacattctttatccattcggctgatatgtgcggacagttcatcccggcggctgaaaaatgttttatgctggctgctcagctcctctttctttgccagatagttctgcatctgcgtctcatcttcctcgcggatccgttcggcttcctgaatcgtctgctgaatcgtcagaataccctgttctttttcttctttttccttgccgcctgcctccagtgcttcctgcatctgctgcagttcttcccgcattgttgcttcttcctgatggatacggctcagattctctcctgcaaaacttactttctgctccagagatgcatagtctaactggatttggttcagttcctgactgtaagcggcttctttttcctgcagctgctccaggatctcctgatgactgttcaccagggtttcctgttcctgttctctggtcgtcgactgttccatctcctcacgaatcgacgaactgctgcctttgatctctgcgatctggttttcaatctcacggccttctgccttcagctgtccgtaaccggtccgcacttcgcggatgcgggcttccgcctgcgtaatccctactttctccgtgttctgaccgatctgtaactgctgtaactgccgggtcatctctgtcagttcatcccgcagggcatttcttctctcccgcttgtccaggatcactttctggatcttttgcagttcttctttcagtgcaccgacttttccttccagttcctcgatctcacggcgccgtcccagaagattactgctgtttcggaacgcaccaccggtcatcgaaccgcccggactcagtgactctccctccagcgttacgatacgcagagtgtgacggtattttcttgcaattgcgatcgcatgatcgatcgtatccaccaccaatgttcttccaagaagctgggacagaagggtacgataggtactctccgccgtcaccagcgtatcggcaagtccgatcactccctgttcttttaaagctgccggactctgaaaattgctgtttctcatattggtcagtggcaggaaagttgcccgtccgtaccggttctttttcagatattcgatcatccctttggcagtctgttcgttatccgtaacaatgttctggatacttccgccaagtgccgtttccacagccacttcatacgctttctctaccttgatcagatccgcaacaacaccgtggatccccggctggcggtctctttgttccatgacacgccggatactgttgccgtatccttcataacgctccgcgatattccgcagagattccagacgggatgcctctctgtggtaggcggtctgcccctgttcgagttttttattctgctcttccatctggcttcgcagagaagtgacttcccgctccactttccggtactccatctggataccgtccatctggacgctgatttctttgtatttttcctgatgtccctggatgatctcctgctgctgggactcgtcacttttcagtttcagcacacgctgactgagtgctgcttttcggatcccgatctgttcaagcatcgcatcgtaacgctgcatcttaccttttgttgatgcccgctgattcaggatctcgatgatctcactctttccatcctcgatgatctgactggtttcttctatactctgatgcaggatcgccagtttttcttccgcttctttttttctgacagctgcttcaccgagattttctttcagggcttcctgctcctgttcatgtccctgcgcttcctgctgtctgcgttcgagatcctgccggatcgcctgcatccgttcttcgtagtgctgatggttctgctgtgccgcccggatctgttctttcaacagttccacgctgttttccagctgttgctttttcagagcattctcccctgcctgggtcctcgcttcctgaatctttgtatccagttcttccagctctttttccagacgttcgtattctgccttcgtctggtcaaactgtgcctgtgtctgctgtaattcgccctgagaaatccggtatttttcctctgtttcctttaactgttctctgatgtgagcactctctgccagatacatgttcacatccagaattttcagttcttcttttttcttcagataaattctggctgtctctgactggcgttccagaggtcccagctgtctggtaagttccgacagaatatccgtcacacgaaccaggttctgctgttcttcatccagtttcttcaacgcggtagcttttcttcgcttgaatttgacgataccggcagcctcgtcaaaaagttctcttcgctcttccggctttccactcaggatcttatcgatctgtccctgtccgatgatggaatatccttctttaccgataccggtgtcatagaaaagttcattgatatctttcagacggcagctggttccatttaacagatactcactctctccggaacggtacagccgtctggtaacggttacttcttcgtattcgatatccagtttgtgatcggaattatccagcgtaatggcaaccgacgcaaaaccaagcggttttctggtctctgtaccggagaaaataacatcctgcatgtttcctccacgcagctgttttgcactctgttctcccagtacccagcggacagcatcgccgacattgctctttccacttccgttcggacctacgatgccggtgataccgttatggaattcaaatacgatcttattggcaaaggatttgaatccctgtacttcgatactctttaaatacatacgtcacctactgttttttgttttccgcagctttcaggcgacagatcgcgcggtatgcagccatctgttcggctgctttcttggttcttccgcttccctgtcccatgcactgttcaccgatccacacttccacagaaaatgtcttatcatgatccggtccgctctcacccagcggatggtaggaaatttctcccggaaaatttccctgtaccatctcctggaagatagtcttgctatcaaaaaagagttttttatgttcgatatcatttaacacataatccaacacaaactcttttgcattagcaaatccaccatccagataaaccgcaccgatcactgcctccagtgcatcggaggtcaccgaatccctgtgtcgtccgccggtcatctcttcgccctttcccagacgcagaaaacttcccaactcaatctctctggcacagaacgccagtgtcggctcacataccagactcgcacgcagcctggtcagttctccctccggcatct

SEQ ID NO: 2583 - DNA, 3178 bp, Unknown
  gut microbiota DNA sequence
ctcactgcttaccagttcaagcaccgcatctcccagaaactccagccgctcgttacattcgatccggttcattctgtgttcattggcataagagctgtgacgcaatgccttttccagaagttccggattctgaaagtgatatcctatctttttttccagttcctttaattctctcataatatctcccaatttctcttattcgacaactctctggatcagttccactgcatcgccaaccgtcacgattttttctgcttcttcctgtggaatctcgatgtcaaatgcatcttccacgccaagaatgatctgatacagatccagggaatccgctcccagatcgtcggtaaatgtagtacccggcattacctccgaagcatccacattcagtacttctgcaattatctgctgtaatttttccagttccatctctagttttccccctttttctcctgcttcatattctcctgaatctttccgcagatgtcttcttttgaaaatgcaatacactggatcagtgaattcttaatctcatttgcttttgaacttccgtgtgcttttaccaccagacctttcagaccgagaagcggtgctccgccgtattcgctggcatcaaaacttttcagtgtctctttcagtgccggttttaccagaagtgctccgatcttgctgcgcaggctggacatcatacctgcctttactttggaaatcagcgtagaaccaacgccttcatacagtttcagaattacatttcccacaaatgcttcgcagactacaacgtcacagacacctttcgggatatcccttgcttccacatttccgataaaattaatgtctttacattcttttaataacgggaatgtctcttttaccagcgcatttcctttttcttcttctgcaccgatatttaccagacctactttcgggttcttgactcccataacatattccatgtaaatcgatcccatacgtgcaaactgcaccagatgagaagaacgggcgtccacattggcaccgcagtcgatcagaagagaaacaccggttgcagtagggatcagtggtgccagcggtgcacgttccacccctttgctctttcctaccagaacctgtccgcctaccagtaccgctccggtacttccgcaggatacaaaagcagatgcctcctggcttctcaccatgcgcagcgcttttaccagagaggagtctttctttttctggattgcctgtaccggtggttctccggtttcaatgatctcggacgcgtgaaccacttccaggcggtctttcggataggaatatttttccagctcttttttcaggacctcttcctgtcctaccagatacacgaacagttccggtttttcattcagtgcatcaatgacaccttttaccggctcctgcggcgcgtaatctccacccatggcgtccacggcaacttttatatattcactcatattctgtcctcttttctcataaacctcgcgtattctcttccggcatttctttttcggaacaagaaacgtataactatctatatgatactagacattctgcaaaaaagcaacaaaaaaaggatctgcctttcacagacagatcctttgcatatttctttctgtttactgcatgattccgtcagatcccagatgatatccatctatatctgcatcacataccattgctccgttttcatcaaaatagaaccagttatctccccactgataccatccggtacggatataaccgttttcgtcaaacagataccattttcctttgatttcttcccaaccatttgccggataagtaccgtcttctctctgataccaccagttatcgccgctctgctgccagcttccggtttcttctgtggcttccgtatcatcggttgcagcttcctgttccgtgatggttacacattttgttccgctggctgtcagctgaacgccatctcctacggtattggttactaccacatagtagtaaagtgttccggattctgtagtcggcggtgtataagtagcttctgttgctccgtcgatcgcggttccgccaccgttggaatcaacattgttacgataccactggtagcttaatgttccttctgataccgtagcttccacggttataggatctgctgttgcatgcagatcataagtcaccggatctcccatctcggaagtaatctccggtttccccacactgtcgtcaatattggcagcgttcagatccaccgttttctcttctttctgtgtctcttcactgttgctgcctaccagaataccaatcgtatcttttgccgagcaggctgtcatcagcggcatacagcaaagtaccacgcctgcaagtaatcccctttttaatttcatatatagtactccttttatttttaaaatgtgtaactgttccgtacagttactaaaatgttacaatttcttttcatccctgtgtcatattgtaacattttcagaattatctgtcaactggatggatctcccatcttcctatccggttctctctcttttacagctgagccgttacaaaaatgtcgtagatcgcacggatcgcagtctcaaaatcacggttttccacaccgatgataatattcagttcactggatccctgatcgatcatctttacattgacatgcttatgtgccagtgctgagaagattcttcctgctgtacctctgtttcttcgcatacctcttccaacgaccgcgatcaatgccagatctgcttccagatcgatggcatccggtgctaccgcacggtgaagacctgagataatgttctgttccttttcttcgaattcactctgatgcacatacacagtcagtgtgtcaatgccggaaggcatatgttcaaaggacagcccgttatcctcaaatacctgaagaacttttctgccaaatccgatttcagagttcatcatatctttctcgatattaatagaagcaaatccttttcttcccgcaatacctgtgatcgtataggccggtttgtagcaggtgctttccacaataaccgtacctttatcctgcggacggttcgtgttacggatattgatcgggataccttcctgacgaagcgggaaaatagcatcttcgtgcagtacagtggctcccatataagccagttcccggagttctttgtatgtaattgtctcaatgacggccgggttatcc

SEQ ID NO: 2584 - DNA, 9225 bp, Unknown
  gut microbiota DNA sequence
taccggaaacatcggtccagttttcatacagatctgcatggatcgcttttgcaacgatggatccggttacatcagaacctccacgggaaaatgtcttcacacttccatcatggagagatccataaaatcccgggattactgcatgatcgattcctcccagtctttctgccagctttttataagtcatctcaccgtccagatttccgttatcttcaaagaaaatacattctgcaggatccacaaatgtgtaacccagataatttgccatcacgataccgttcaggaattctcctctggatgctgcatagtcacttcctgcctgcgcaatgaagtttttctcaatctctgcaaactgttcatccagtttcagatccagtcccagtccgtcaataatttcctggtatctcgcctggatttttttgatctttcctgcaatcttttcacctttttcagctgcccgataacattcatagagcatgtcggttactttgatatctccatcaaaacgctttcccggtgctgacggaaccacataacgtctggattcatctgaacggatgatatcacctacttttttaaactgttccgcactggcaagagagctgccgccaaacttcactacttttttcatgttttcctcctctgtgcataactgtacatatgcggtttttcatttttctcctattatagatttctcattttcatatgtcaataataatgtcttgctccagatagcacaaaaatcatgctctcgcatgatttttgcataaaaacgatatactgactggtttatttttccatctcaccctcacggtatttttcaatctgctcatagttgcttgcaagagcacccgttccgcttgcaccatttggtccgaaacgaaatacaaatttcagaaggattggcgttatgatagtcgtgatcacaactacaataaccacaggtcccaggaaggaagatcccatcaatccgagagccgatcctttatcagcaacgatcagtgcaacctcacctcgggagatcataccgacaccgatacgggcacactggtaattcttatatccacacacttttgcacccagtccgcagcccagcactttcgtcagtactgcgacgattaccagaacaaccgtaaatcccacaacttttccgttcatagccggaagtacaactttgataccgatacttgcaaaaaacagcggcgaaagaagcatataagaaatcgtatcgaatttggatgccagccactgtgttctctgtgtcttggatactaccagacctgccacgaaagcacctgtgatatctgccacgccgaagaatacttctgcgcaatatgacagcaacagacagaatacaaataccatgattgcatggcgatgcagtggtctgtttgtcagttcttcccattttttgtaaccataatagaatgccacacctgcaatcagcgcaaatgcaaagaaacctacgatttttaacagtaccataccgaggcttacggaagagtctgccatactggtaacaattgtcagtgcaataatacccagaatatcatcgataattgcagctcccaggatcgcattaccggaatgagtttttaattttcccatctctttcagcgtttccacactgatacttacagacgttgccgtcaggataacaccgataaaaatattctgtaaaaacgcactggctcccgcatcagaatcgataattccgggcttgttaaagaaatatgccacggcaaacccgcctgccagaggtaccagaacacccagcaatgcgatcacaaacgaggcttttccgctcttctttaactcgtcgatatccgtctccatacctgcacagaacatcagaaccacaactccgatctccgcagcatcatgaataaaagtggtctcatggagaatattaagacaggccggtcccatcaggagacctgccagcaatgcccctaccacctgtggcatattgtaacgacgtgttaccagtccaaggatcttcgtagtaagcaggatcaatgccagatccagtaaaaaattgtacgttgtttccatgttttttcctccctgtgttttgcggttcccatcttcaggtcagaaccgcactgttgcctactatagcatttttacaccggaaagacaatattttttaataaaattttaatatttatcttaccgctcaatggaggttttccagttctttcattcgttttctccggcgcagacgttcaccgcttttattatatacaaagaacgattccaccagcagtttattaaagggacccagtttgtccttggttgttttatcgtaccgggttccgccacaggtaatataggaaacactttttacatatttgatcagatccgattcacagcggatattatccggcaatttggtgtacgccattccgatgcattccagtctgtgggcatcgcttcccccaaatccgggtttatgatactttctggccagttttctggccttttcgttcacttcttctgattcgcaggcattgaaaacttccacaaagtcaaactgttccatcagacttttcagccgttcttcgtgaaacttctttctcgcctgggttttgatcagactgaggtatttttctccgtatggatgcgccggtccgacaattcctccgtatttgtgtaccaccatgatcagaatctgagccggcagaccgcgcagttcaagaagtttcagcttcactccctccggcatgatcaccagcatatgtccacagtcgatcgtatcatattccacaccctttaacaccacgaaatctgtatgattctttcctttgatggaatctctccattcccggtaaccgtcataagagttgtgatcggataccagcatcccgccgaatcctttttctttcagttttttgatatattcttcgatcatgacttttccatccatggaaccttccttggtatggcaatgcatatcgaacttcatataccctcaccccttttcgtacagttttcataacgacttgtctttttgcgctttcgcagatagtcattactattttctttacagatattataacctttttccgacacggttacaaattataattgtaaaatttataataactattcaatagtcactgtaccgcgaggtgttttggcatgaatatgccaaactcctgagacatacaagccaaaatgtatgcgatcaccacaagttcgcatggtttcttcatttccgcatcgggttaatatgccgtcctgcagcgatcaggagaagagcggaacagcccagctgtaccagaatcgacagttctaccatatgctccaccccaaaagaatggctgtaatctccaaaataatcacacagccgtaccagtccgtaggcgttggttgtctgctgtccgatcagtccatacagcgtgactgccggattaaaatacagaagataaaccagcccgccaagccggatgcctgtaaagccttcctggtacattccccgcatctgctgaatatagccggttccaaacaggatacccatcgttccgaacaccagaagtaccactgtcacataacttaaaatcaccgcaaccgtagttttacgtatgatcgccgaataaaagatagcgatacttcctataaatataccggtgatgacaagattcaggatcagctgaaacagatttaccagagtaattcctccatagatcagcaccagtcctattacaggaagtgttgaaaaggaaataaggaaaatcaggcagagagaagattccagttttcccagaataattttccagggactcagatgggtggtgagaagcagatccagggtctttctctcacgttcccccgcaatggcacctcctgccagtcccgggatcagtatacagatggcaaggaacaaaccatatcccatcaggacatagcactggatcggaaaacggtactgcaggatcgtcatataattttctcttccgctcaatcccatctgtgcgatcagggcaaacaatgccagaaccagattcacgccgagaataatccaggcacatttcatatttcttgtataacgtttcatttcattttccagaaccggattcttcctcatactgtcgttcctccctgtaccggatctgtaagatggaaaaatacagattccagattattgtgttctctgcgaaaagaagttaccagcaccttctgctccaccagttgtctcagaagctgcgcctcttcttccctgcttccggtaaaaagaatggaaatcatatttttatcgattgctattctggataccagcgggtgccggttcagcaggtgaacggcagtctccagattctgatatacctcgatcaggatcggattggaactgtcgatagaggtcatgatttcatcgatgggaccttccagtaccattttcccctgatggataactccgatattgctgcacatatctgccagatcagacagaatatgtgaactgatcagtaccgtatatccctcttcacacaaactccgcaaaacttctttaaagatcctccttgcacccggatccagtccggatgccggctcatccatcaccagaagctgtggccggtgaatcatggcacgggcaagacagagcctctgctgcatccctctggataattcatctaccatacggtcctcaatatgaaagagatgtacccgttccagtacctccgaagcccttaagcgcccctctttttcatcgattccataggcagccgaataaaattccagatattccatcaccgtcagattatcatagacaccgaaaaaatccggcacatagccgatcttgctttttaagacgcgtgtctccttttctgcccggataccatcgatccacacttttcctgaagtcggccgcagtaatccggatatgattcggatcgtggtcgtttttccggcaccgtttggtcctacaaatccatacagctgtccatgcccgatttccatattcagtccgtccaacgccgttacgtgaggataccttctggtcagactttcaatcttaagcatccggggtcaccacctttcctgtgatctgcagacagggaagtgtacagtttttatttgtaacatccatatcgtccgccacctgatagcgaacccgcaacgtcccctctgccgacagatatttttccagttccgtcccgtcaaacaatttttcccattttgaaatcgtctcatattctccactggaccagcaataaaaagcaacctgcccacgaaatggttcaaaatatttcggatcatcatattccggtttaaagaattttatctctgtaatttctcccagtccggaaagatcatagttaaggactgcatcctgtccgtacatcagattcgttcccgcggtcgcgcttccactttccacagaagccagcacttctgcgttgggacagaatatggttccctcttccttttgccagctgatatccaccggcatataaaactgtgagattccgtctacttcataaccggaattcatctcaaaagaagtatcactgttggaaatcgttccgaggaggcagacgccttccgtttcttttctctgtgcatcccatacctgttccatcacggcgttcaccgcataatccggatactctgcatctttcagatccagatattttctcagaatcttttccagacctccatttccataggaatggattttttcggaaaaagtaccttcttctcccggttccaaatctcccagaaatacgatacggttcgtgagtacaagaatcgcattctcgattctgtatcctgtagggttcttccatctgccttcgatatgctcattgtccccggatgcatggatctgtatttcttcttccggtgataccgcatgatcccggttcaaaaaaaatgcattgcctgcaaacaccggcagcctgctgaatgtcagtttgtagcagtcttctttttcgtagatttccactttatccgtgatatctgtattgacctcttctacactgtatccgctttctgaagacattgtcagatgataacttttatccagatagagctgatatgtactgttatatggtgcctgtacacccagctgcatcgtttctccccagatatgatcctgctgggtatacatccgtttcatggtaagtaccggagcagtcagtctggtgcttgtccccatcactgccataataccaaggaaaagaacggaaagcagtgtaactcctgaccagaaatattttctttttccctgtcttttcaggatcaggtacagtcccggtcctgccacacaggcataaaaaagaatcagtataaaatatttgatcagactggggcgttttcgtaccggaatctgactggtgtcatagccggtatatacaacatagccccatttttcactgagcctgtcaaaaaatgttggtcgtgattctccattcagaaaattctcaaatacttcaaaaaaatcctgcccttcttcaacagtaagcaggatacctccttcctgctgccagcgatggagtgtcacccactgttctccggaaatcgcagcctccggtccgatcagcagtgcatccagttgatccagatctttccagctgtccggaatctccgatgcatccatctgataaacagacacaaaaatatcacccatgccttcggtagtttccgcagaaatctgtatcccgtcaagctgttgcacgtcttccggctgtgctcctataactccgatcagtgcaatgtcctggtttgcagaaaagttcttactcagtgatgctgtctgtactgttcgggacccatctttcagatacgcctgtacggtaccattagcccatggaaaggtcagataaaacgtttcctgccgtgtttcccctgcagcgagtgctatatttttcttccatacgcacactttacttctggtatagtccatatcattgccgatcatcgtcagactctctcccagatcagattcctgattgccggcaaccggcacttccatctccagctgtccttcaaacgcttccccatgatttgtcagtgttgccgtaaccggcaggcaggcatcactgtttcccgccttgccgttaaatccccagtttaatgttatctcaatgtcgttctccggctcatcttctgcccataccaggcagggcagcagcaagatcagcagtaccagtactattccccggatatgttttctcatgtctgtctctcctttgtctgttgcaacggaagccatacagaaaataccgttccgtcaagatcacttttcacctgtacgtctccgccatgaagcactgcgatctgatgaacgatagccagtccaagaccggttcctcccgtattctgtgaacgcgactgttccacccggtaaaacttctgaaataacttttccaggtcttctttcgggatcacatacccatagttgatcacctgtaccagaacatgttcatgtaccacttttgctgccacacggatgatttttccgtcttttccatatttgaccgcattattcagaagattttcaaaaaggcgtgccagcagattaccgtccccctccagggggattccatgttccgcgcagctgaactgtgcttccagaccgttcttttcaaaacttggccacgcttcatccaacaactgctccagtagtttctgcagatccagctgttccagatgcaggctcatctctttatgttccatctttacaaatccaaacagttcattcgtcagttgttccagatgaatggctttccgataggcaatatccaaatactgctgccgcacctgttcatccagatccggtttatttcttacccaatccagataaccgatcaccgaagtcaagggggtccgaaggtcgtgcgccacactggttaccagatcgttcttggtccgttccgcttcccgttcccgttccatcagatctttgacatgtcgctccatctggttcatataccgggcgatctcaccgaattcatccagattctctaccgggatttcctgattcagatccccgtttgcaatatcccgcatcgcacgctccagcatccgcacataactcatgtatttgtggatcagcgtgtaaaaagtaagaagaaaggtcagtgctccgcagaccgcaaggaacagcaggcgataattcggatacagcccgtccggtcccagcatggcactgcgatatcccatgtagcgcagcgttcccgccaccttatagatcagaaatgccatgataacttccatgataccggtaaccgccagactgatgatcgtataccaggcaatccttccctcaaatgttcgaataaatctactgctcaattttatatcctaccccccagactgtagtgatgatcttgtcggttcgggtgtcgtctttcatctttccgcgaagccgacggatatgtaccatgacggtattgttcgcctcatagaccttctcgttccataccttttcaaaaatctcatcggtgctgaacacccgtcccggatgagaagccagcagatacaaaatgtcaaattcgattggagtcagcttgacactctctccatccacaaacacctgatgtgtctctttgataatcgttacatgattcagtcggatcgtgctgtcctcctcctccttcttctcattcgcctgattcagatcccggtaacgccgaagctgagatttcacccgcgccatcagttccagcggattaaacggtttcgtcacataatcatccgccccggtcgtaagtcccacaatcttatctaactcctgtgtcttggcacttaccataataatcggcacattgtgcttctcccgaatcctccggcacatctccaacccgtccatcttcggcatcataatatccaaaagcaccagatcaatcttctcccgctccataatcgcaagcccttccagcgcatccgaactcttcaccacctgatacccgtcactgatcagatacaactccaacagatccgcaatctcctgttcatcatccacaactaaaattctggtctctttcatctcccatatcctccatatcccattatgtatttctcagaatgttacccatccctgcctcacagaatcctctctgccaaacagaacagtcacttccaaatattttttcgtactctaccgggcaacccgcccacctgttcccctacagtgtaccaccattcccccaccaaagtccttaccaaaaacttaaaatctcacgagcccttctctaacagaaccataaaactccgtcc

SEQ ID NO: 2585 - DNA, 1072 bp, Unknown
  gut microbiota DNA sequence
cggcagagaaaagatcccgcggatgttgaagaaaaaatacggcgaaaccctggaagtgactgtcgtaagcggcaccgactaccccaaagacctgaccccatacgacctgatcatccagtgcggcgcctgcatgttcaaccgcaaatacgtcctccaccgcatccaacaggcaaaagaccagggcgtagccatgaccaactacggcgtagccatcgcccaactgaaaggcatcctggacaaaattgtctgctaaagataactccaaaagatacttttaaaaatcgatcaccggaaagttacattttcgatggtcgatttgtttatctatgcaaaacgatgaaaatagcaaatgtcagaaagagataataagaaaaaccagagataactcaaaacgggcgtccgtatctccatctccttccacttgtaaatataccccctttttgatacaataaataaaataaggctttttatgcccaacggatcaaataaggagaatgcatatgaaagtagtaatactggcaggcggtttcggtacccggatcagtgaggagagtgtactgaaaccaaaacctatggtggaaatcggggacaaaccgattctctggcatatcatgaaactttattcctactatggatacaatgaatttgtgatctgctgtggatacaagcagcatatgatcaaagaatggttcgcagattattacctgcacagctgtgacgtgacatttgactttacgcagggaaataaaatgacggtgcacaacaacatctctgaaccgtggaaagtaaccctggtagataccggactgaatacgatgaccggcggaagaatcaaacgggtaaaagaacatctgaacggtgaaccgttccttctgacatatggagacggtgtggcggatatcaacatcgatgaactgataaaattccatcaggagggcggccgcatggcaacgctgacctccgtacagccgatgggacgttttggtgcgctggatctgcgggaagacggagaaatcacaaacttcaaagagaaaaaacaggaagacagcggctggatcaatgccggatttat

SEQ ID NO: 2586 - DNA, 2850 bp, Unknown
  gut microbiota DNA sequence
atgatttgaaaagtgtttatccctctttccgcaccatataaggtaaacgtcaaaccactcgcctagccggatcagcgcatttatgagatactctaaaaagtacgaaaaaactaactagttttttagaggaggactaaagtatggaccaatcaactcatgatgtaagacgcaccaactggctgaacattatagaacaatgtcagcaaaggccggaaaatatgaccgtgaagcaatggcttgctgataatggtatcaaagaaaaatcttattattactggctccgaaaattccgcaaagaagcgtatgagcaaatgcagatgccaccagtcacttcatcttcggaaatcacgtttgctgagatctctgttccgttaagcaggcaggaagaaccgatacactcctttcaggaacaacctccggttgccatcatcaaaaatggtgctttatccattgcgatatctaaagatatttcggaagccctgcttgacaggatcttccaggtgatccgtcatgcttaacgatgcagcaggaatccgcagggttgtactcgcctgcggatatgttgatctgcggaaaggcattgacggactgtccatgatcatcggtgacagataccatcagaatccttttgaaaaaggaactctttttcttttctgcggaagaagatccgaccggatcaaaggtctgctttggatgggagatggattcctgcttctgtacaaacgcttagaagacggatccctgacctggcccaggacagaacaggaagctgcagaacttacagaggaacagttccagtatctgatgctcggactgaacccactggatccaaagatcaaagaggtccatccgaaaagagcactctgacttttgtgcaaaacagagattttttcagcgttttcatcaggtcaaaaatcagtcgttgtaacataggttttcactctttccagacgcactcagtgcatctgagaatgattgaaaataaattttttgaaccttgaaaatactatatttccttatgtttatggacgttatacggctttttggcacataggcataatgacgaaaacgtcattcttggaaattcgccattttccgttgtttctgttataatggatacagtgaaaaggagcgggacaatggatcataaacatacacttactgaactgaataactgcagccgcgaggaactgattaccatggttctttccatgcagggacagctggatatgctgaaccagaacatcgaaaaactgatcgaacaggtacgcctcgccaacagctatcgttttggcaaacatacggaaactttaaaatcgatcgacggacagctctccttttttgatgaagcagaagccgcatatgatgcatcagttccagaaccttctgcagatgagatcctgcccaccaagcggagtcagaagaaaaaaggaaaacgggatctggatctgaaagatttccctgtagagatccttccgccgtatcatgtttccaaagaagaactggatgccttctatggcgatggcaactggcgtcagattccaagtgagacctataagaggcttcgctacgagccggcatcatggaccgttgaggttcatacggtcgaagtatatgttgggactgacggtgaccatcaggacgaattcatccgcggagaaaggccaaaggatctgctccggaacagcattgtgaccccgtccctgctggcagctatcctgaacgtaaagtatgtaaactcatccgcacttcaccggatcgagcaggaattcgagcgcaatggtgtaaagatatcccggcagaccatgtccaactggatcatcaaatgtgctgacagatactttgcaccttttgttgagcggatgaaatcagaactgctgtcgctgcatgtcacacagtctgatgaaacgccgacgcaggtgatcgcagacagcgatcatcccaacagcaagtgttacatgtgggtgcaccgttccggtgaactgtataaggaacgccccatcgtgatctatgaataccagaaagggcgcgaccaccacaaacctctggatttttaccgggactataaaggaatccttgtaacggacagcctccagcagtaccacatacttgaaaggaaactcccagaggtaacaaacgcgaactgctgggcacatgcaaggcgcgattttgcagatgcagtaaaagcagccgataaaaaagacccacaggcggtcaaacagttggttgcatatcaggcactgcaaaagatcgcaggattctataatatcgatacggagctaaaagggctctcgtcggaagaacgtcttcaaaagcggcaggaggtgatccggccgatggttgaggaattctttgcgtgggtaaaacaacaggctgcggaatgtgctgtaccgccgaaatcaaaaacggcccagggactgaacttcctgatcaaccaggaaaaatatcttaaagttttcctggaagacggcgatgttcccattgacaactcggcttcggaacgggcaatccggaccttctgcatcggaaagaaaaactggatgttccacaacaccgcaaacggggcgaatgccagtgcactggtgtacagcatttcagaaactgcgaagctgaacaacctgcggccgtattactactttaagtatatcctcacagagttgccgaaacgctgcgataaacaaggaaatatagatcctgcggaattagatgatctgatgccttggtcatcagaacttccagacgaatgcaggaaaccacgccgctcataaaaaagcggcgtttcatttaatgtcaggcgcatggtttgacgtttaccatataaggacagctaggtgtgatttaatgacctct

SEQ ID NO: 2587 - DNA, 1993 bp, Unknown
  gut microbiota DNA sequence
cgctggaaaccgaccgcatcgataaaaccggggagcgcacgccggaaggagaagtgccgacgtatgaggaatatgatctgatcgtgacgaatccaccggttggagaactaccgatcgaagaccaggaacgctactggatcagtaccagaaaagcacagctgcagtacatgcagatgctgatgaaccatgtgaaaaagcagggtatggtgatcgcagtggtcaatgagggaaccctgtttatgtatgatgcagagcagaaggttcgccagtatctgttaaatgactaccagattcagggggtgatttccctgccggcgggagcatttttaccgtatacgggaagcaaggcttcggttctgatttttacaagagaagaagagatcgacagagagcagccggtatggttttatgagatccagaacctcggatacagcctggaccgccggcaggagcgtacaggtgtggatgatattccggcgatgctggcatcctgggagaatcggaaagaactggcagatcagtggaagcatcagttagaggaagccgctgcgcagaaccagtgggaaaatccggttccggcacactgggaagaaaaatcctgctggttcgcaagtctggatacgatcgcaaaaaatgacaataacctgtcagcaggaagatacaaaccatggaaagagcaggagacggttgtgacagaatccccggcgcagcttttgaaagaactggcagatctggaaaccgatacgatgaagaaagtacaggaactgatggagatggcgagggactatgagtaagaagaaaaatatgtacaaactggaatctctcgcccggctgatctccggaagaacaccagagcgggagcagaaggaatattatgcagagaccggaacgccatgggtcaagattgagaatctggatcagggctatatccgggaggcatcggaatacctgtcggaacagggaaaagaaaaggtcaatctggtaccggaaaacagtgtcttattttccattgtcggcacggtcggaaaagtgggaattgccggtcgggaacttgctacgaaccagcagatcgtatctctgatctttgacgagacccgggtgctgccactgtacggatattatgcactccggtatcatgcggaagaaatccgcaaactgtcgaatcagaccacgatggcgctgatcagcaggaaaacactgggacagtatcgaatctatgtgccggacagtctggaaaaacagcaggagattgtggataacctgcagcgatttgaagagatcaagttgaaaaaagaagagatgcgaagccggatggaacggtatgagcaggtattgtttcagagaatctttgcctctcagctgcgatatggagaaaaggcgaaacttcgaaactatctgaaagaaccggtgggaaccggcgttccgaaaaatgaagagccaaacggagaatttccatgtgtgcgcctggaggatttccggaagacctatctcaccggacttcacgcaggagaaaaagcagaggaaaatgcaggtgcggactgggcgattgatgacaaataccgcgtctgcccgggagatgtccttcttagaaacggaaaactgattctggtggatcaggcggaagatccgctgtatctggatcgcagtgtacttcgtatcgtgccggatcagggacagatcctgccggaagtcttatatgcatatctgaaccagccgtgtatggacgaagtactctacggagccagaaaagaaggagacagccggagacgtccgatccgtgccggtgaggtggaaaaactgatcctgccgcatctgtccatgaaaaaacaggaagactacagccgatgcctgaagaagatccgcgaaatcgagagaaatctggatcgggaaattgcactggcagaggcagcattttccggtatgggatggctgcttttgcggaaagaacctgaggaagaggcgaaggcggaaactgtttcgggagtggagacgg

SEQ ID NO: 2588 - DNA, 44184 bp, Unknown
  gut microbiota DNA sequence
tcatcatattccagggtacggtttctaactttgaggttttcaaagcggctgatacggtcttcggaaagatcaacagcacagtgaaaaacagaaaacagaacataaggaaaatgtgtgacctgtatttgaagtgtttcataagatgcccccatttttcagatttcagccaacagcggcaggatctgcaactgttggctggaatttcagtatagcatgataaaaaaaacagggcaagagactatcgggaagaatagagcagttgcgaacgatataatttggaatctttcagtaactcggtgttcagatcgtccataccgtagatttctgccagtgtggaagtactggaaaacaggttcgttcccagtccgaggcggtcgcctggaatcgttacacccatagcggcaagcgttgtcggatacatatccagggaagtaaattttcgatagacattggtgtaggaaacggacggatccggatttacaatggtgaaatacatccgtcggtcaaaatctttggtgttggttttttccagataaaccgagtccatcgtgcagtgatctccacacagaacgatggtagtgttatcgtaaaaatcctgttcccggatccaggagaggaacgatgtgatctgacggcttgagcaggcaaccacgtcactgtactgcaggctgaactcatcccggcacaggtcacagtaataaccattgacaaagtgagagtctgcggtcagcatggtaaaattaaacggttcccctttggaagccagatccgtcagttccgtctttgcatattcgatcagtttggaatcttcatatccccaccagacatagtagtcgctgtcgatatatccggcatcgacagcagaatagtagtcgaagactttatagtttccgtgaccgttaaaataagaagaacgtccggcaaagttaccgtcggaaccgatcataaatgtctggttatatccctgatcatgcaggatatcaccgatcgcgtaaacaccgggaagataattattctccgaactccaggtgctgttcagggtactgttgctgacaatattttcatttaacggaacaccgctggtctgtgcgacgagtcctcccatggtaaaggtggcaccgtttacggcatagggaccgtttaacttgctgtcatccccggaaaacgtgatgttatttaatgcaagatccgtaaattccgggatataattttcaggcatgttgccaccgacttctttgcttgcgtaactcagttccatggattccagaaagatgtagatcaggttccgtttggtttccgggaaggtcagatcgacatctcttgcatccacataataatcttcatagatggtagatttctggctggtgaactttaagtaatcaccgatttcaaagtcaatccagaaatttaccaggtttggagcaagtaaaacgagagcaaacacactccagaccagcccgaaacgacgatctttctgttttttgtgaagaagcaaaacaaaaagcagcgtgatcaggaaggatgtggcaaaaatcacgatgccggtgatcagcggctctttgatagaatcaataccggtaccttcgagcggtgtatgcagatgatacagaagctgtccccacggaactccctggaagttttcctgaagatagcgggcgacaaagatcagaacgctgataatagaaaaaaggaggggaagaaagatggtgcgcagtacaaagaacacggtttttttgcgggaacgcggggaatcattttcctgctcaggcgcggaaaacatccggctgagaaaaagaagaagtccgagcaatcctgcagagacataactggcgatccgtaagaaggaatcctccgtgatggttcggccctggatcgtcgaaacaacgaacagagcgataagaagcagggtgatcagacaaaaaatcacccgaaatactttggaatgcctgatattttttagcttcattaacaaatatcctttcatcgtatagtaaaatgcacagtataatagattataaaggaaaagctaaaaacatacaagaaatttacaaaaatattacaatttttttaaggtgaatctttcttttgaaagtcaacacttgaagtggatggggatatgggatagaatagtaaaataagaattttcagaagaggtattggaaaatgaagaaaaaaagatataagaagctgacagcgatcttggcagctgttcttttgctgtgcagcgggatcccggtaatggcagcagaggtaaataacgggacaacgtatccggtttcgacaaatgcaatcgcgaactggccacagggaccggatacatattccgaaacagcagtactgatggatgcggatacgggagcgattttgtataataaaggaatggatgagaaacgctacccggcaagtattaccaagatcatgacagcacttctggcactggaacacagcggtttggacgaagaagttacatttacagaggaatgtcttgccgatcagacttctgacagtggaaatctgggaatgaaggttggtgaaattctgacaatgcggcagtgtctgatggcactgatgatccgttcggccaacgatgtggcaacgcagattgcggttcatgtggcaggatcggtctctgcgtttgcagatatgatgaatcagcgtgcgcaggaacttggctgtgtgaatacacattttgtaaatgccagtggaatgccggatgaaaaccattatacgacagcacacgatatggcactgatctttcagcaggcgataaagaatcaggattttctggatattataggaacacagagtttcacgatcgaaccgaccaatatgaatccggaaagccgggtgctgaatacgcaccatgcgctgctgtccgcggctgcgccggaacattatgacggctgtttcggcggaaaaaccggagtgacggaagcatcgaaaaacacactggtgagcggggcaaccagagatggaatgacactgatcgccgttgcgatgcgcgcggatgccggacaggtgtgtcaggatcatatcagcatgtttgattatggatttaataatttccggaaagtggaagtgccgggaggtgcggtgacgattccaaaggatgtgcaggtttctgatctgactacaacagagagtgccgatggggaagcggttcgggaaacctattatttcgggcaggattattttgtaggtacgggaacaaagacagaagaggtcgcacaggacacagaagaaccggagacgctgacaccggaagtgacggtggaaccgcagaatgatccggaaaacgaaacagataccactggttcagcgaatctttcacaaatatataaaatcgtgatttatattctggcgggactgatcgggctgacggtacttgttacaatcatatccgcagtgagaaagagacacagaagaaagagaagaaggaaaggcagaaaataattgaaattagagagtgtaacagcaggaagaaataataatttgaatctgatccgctttatcgcggccattctggtgatttattcccactcatatccgatcggaaccgggacggatgccggggaaccgctgatgcgggtgtcaggtggacagatcggttttggaagtcttgcggtctgcgttttctttgtttttggaggattcctgatctgtaagagtatgcttcgcgtgagagacggaaaaacatattttaaagcaagatgtatccggatcttcccgccgttgatcttcgtggcagtgtgttcggcgtttcttttgggaccgttttatacgaacctgccgctcggtgagtattttacgagtgcaggaacgtaccggtatctgttgaacggatgtatggtgttacagcacaatctgccgggggtatttgaaaataatatctatgcaggtgtggtcaacggggcactgtggaccttaccggtggagttcttatgttacattatgtgttatgtgatgtaccgcctgcggcttttagagagaaaaaatctgaagtatacgatcgtgatttttgcagtgggatgtgtgggtgtgcagatcctttcagaacgggggattccgatggtcggctccatgatccgtccgacggtgatgtttttcattggtatgctgtattatctgtatcaggataaaataaaaatgtcctggaaagcagcgcttctggcagcagtgggactggtggtcagcaccggtgtgggagttctgggatatatgatctacgtgttcctgccgtatctgctgttttatctgggatatgcgacaaagaaaaagtttgcgggattcgggaaaaagagagagatctcctatggaatctatctggcaggatttccgattcagcagatgatctgtgcacagtttggtggacagatgatgccgttagtcaacgcggtactcgccattccgctggcgatccttgccggatggctgatctggctgtgtgtggaaaatccgttgaaaaaataaaagaagtggaatacatatcagaaaacggtatgtattcaacttctttttttcgtttattttggtattagcgtttccagacaccggagtggtcgagataacagccgtccacccaggtatccgaagccatgacgccggaggtcggatccagatagtaccaggagccgttcaggttgagccatccggtctgcatgacaccgttactgttcaggtaataccaggaaccgttctggcttatccagccggtcatcatccatccgtcggcatcaaagtagtaccagcggccgttgatatattcccagtcggaagtggtgtaagtgccgtttgcatggcgataccaccagcgggagcctttctggatccattccggggtgttggtagtctttcctttgacccaggctccggaactgtccacgtagtcataatcgatccaggtatccgccgccatcgcaccggaagaatacatgtagtagcatttgtccccgatccagtgccagccagggccggtcatagcaccatcggaagaaaagtgataccagttgttcagcatgtagtaccagccggtgaccatggaaccatcggaagaaaggtaataccagttatctttgtaggaaagccatccggtcttcatttttccatagctgtccagataatagtaagaggaacccagacgaagccatccggtcaccatatatccgtcggaaccgaaatagtaccaggaattatcgatcagcgcccaggtactggtcaggtaagaaccatccgggttggaataccagtagcccttactgtcgtgatgccagcggttattgactttggaggtatcttttgcaccactggcgccgtaataggttccgtttacccaggtggatactgccatggaaccgtcggaattgaaaaagtattccgaagcattgatgactcttgtaccggtagtcatggcgccggaatccggatccagatagtaataggtgccggaacggtacagccatccggtctgcatcgcgccggtggaaggatccaggaaataatagtgattcttatgaagcagccatccggtttctatgattccatcgcctcccaggtaataccataagcccttgcttaaaacaaactgatctctgagcggaaaggaggaattgttaaaatagtaataattgccttcggtatcctgtttccagccggatactgcggtcgggaatccgttcttataatagacgacaaccggtggtgcttcgatgtctccgatcgcaacgcgttctttatttgccggaatgttgttggagagagaatcgtccagctggatccgcagcgcaccgatgccgtctttggcataccaggcagtcgggtacagcggaatgttattggctcccatctcgagcagggtgtccaacgtactggtttccgtgcggaaggtacgggaggttacataggcaaacgtaccggtcatgaccgccattttcgggctgagggtgcggatataggaactggtgttggaaccgtaggaaccgtgatgtccgagtttcagaagatctacatgtccaagcttctgtgcaagtgcagtttccgcaccgatgtaattgttgatgtcaccggagaggaaagcggttgcaccggtctgcatggaagttacttttacgccaagactgaaataattggcatccggcagagcaccccaggtttgatagacaccgtaattcataatctcaatctgtaatccgtctttgccgccgagatagaagatcggtgaggctgtatacccctgttcattttcatggacaccactgcgggcggaagcactttcctgcccctcctgcaggttggcaggatcgagtggattgtcagcggctacctgatcgctctctgggatcgcatcggtagaaagtccgtcggtgagagcggaagtgaccgccggttcggattcgtcgatcaccgcatccgggaaatcggaagcggaaaagagtgcagttgtctgagcatccgctgtgactgcggattctgtctcatcggtgtccgtgcccgcaggcgtgcagataaaatcataaggagaatctgcggatacagtgaaaaccgcattgtctgcggatggtgtgatctgataacggagttcattcttatcatcatcgtatttcggaacaccggtaaaggtgtaggtccatgtaccgttttccgaagaaaattcaggggagacggagaaagtttttacatcttccgtatcgctctgacaggtaagctcgacggaaactgcttccgggggaagcgaagccaaagcatctgcatcttcttcggaagaatcctgccaggtgatcgttccctgaatggtaacggtctgcggatataccggggcattcggatcaaaatactggatcagaggggcaccggtatcttttgccgcagaaactacatggtcgtatacataaagattgtcaaacagatgcgtggggttactgatccattcatccgaataaggctcaatatagacacgctttggtttaaaggtacggatgatctcatccccggaaccgatatgatcgctgtgcgggtgggttgcaatatagaactcaaaattgctttcgtttacaccgcgggagcgcagataggaaattaccgtattttcctgaccggcagaagtaacgatgccgggacggtaaggatatctgctgtcggaaccatcgggataatcgctgtcttctccggagtccaccataccgaactttccgttacattcgagcaagatcgcatcgccgttggcatcgagggtcagaaaatgaatcgtgccgggatctcccgtggatgcagtggaaagcgtttcggcggataccgaaacagcggagaaaaagaaacacatggagcatatcagaagcagccatgcaagaatctgtttttttgaaactgtcataggacctcctttgtggatcgttaatatataatataattcagtatgtcagaacggcgaaaaaaaatcaagaagtatcttcacggaatgtccgcttgattataagaaacagaaatgatattataaggaagattcgaaaaaatgaaatcaacgaaattatcagataaaaaggaagaacggaatgaaaaaaacaaaatataagaactggtgtgtgttgttgttgctcatgatcgggctgggcagcatgattctgatgttttactattacaaggtcagggaggttgccaatcaggaacggtcgtatatcaatattgcggcatcgtccgaacagatcagggacagttcctttttctggggagagcatgagatcgtgcagcagatccgtccggaagaaaataagatcacaaagttctgtatcatgttccagaggaatatggaagtacctgccgagggcatccttcatgtggaactgtacgatgtgcagaatgatacggtggttcagcagtgggatcttcatgaaagcaagatccagggaatcgattatcagatctttccgctggcacagccgttaaagaatacggcaggaggaatctaccagatcagagtgagtgcctcggcggactgccatgcatttccggctgtgacgaattacaaatcctacagttataaagcgatggtcgacggagagcagctgttgggtacgatggtgtttaacgtgcagtcagataatgcatttttaaaaccgatttatgtggtcttttcggtgatcctccttctgggcgtactctgtctgggagcggtctatattctggggatccgcagaccggaggtgtatttcctgattctgggaatctttatgggaagtatgtatatcgtcctgtttccgccgaatgtggcaccggatgaacatgcccatatggctgcaacgtatgcggatgtggataagattctgatgcgggaggtcacggatgagaagggaaacgtgtatgtgcgtgcgaccgatgcggatatcacggaaaagatgcagctgacgctggataacatggcgtatgattacggacagcttttcaaagtgacagacacgacgatggtttcctataatcgggcaccgatcgcggttccgatgatcgcacatcttccgcagacggtcggtgtgctgatcggcaatctcttccatatgaatggaatgtggaccctctatatgggaaaaatcaccgcgctgctgttttatctgctctgtatctattttgcgattaagatccttccttggggaaagatgatcatggcggtgatcgcgctgtttccgatgagtctggaacttgcggcatcgtattcgtatgactgtgcggtcaatgcactgagttttctgtttatcgcctatacgatgtatctgatctttgaaaagaatgtggtaggatggaaggactgcctgttcctgctggtggtaggaagctggatggctccatgtaaagttgcctatatctttatctgcggatttgccttcgcgattccgtacagaaagttcaaaaacaaaaaggcggcactggtgtttaaggtcgcttttgtgtcgatccttctgatcgcgacggtcggaatccgaagcacgatgatccagggactgcttggttcttccgacagcagcagtacatcggaggtgggatggaccatcggacagatcctgagcgacccggtacacagcctcggggtgctgttcaacacctattttgagcagatggaatactatgtgggaacgatcgtaggaaaatctcttggatggttccagatcgagataccgtggcacattatcgttggttttatcctgtgtcttgcctacgctctgtatgcggatgccggaaaagtcatgtacctgaaaaaatggcagaaagcactcgccatcgtattatccgtgatcatgacaggcggaatcgtgctgagcatgtggctggactttacgccgtcctactggggcaatgtggccggtgtgcagggaagatactttttgccgtttttaccaatgctgttgtttacaatcaagagcaaacggacaaaatatcatgaaaatatagaaaataagatagcaatcggcatgtgtacgctgcagattctgacattttttgaagtctggctgaccattctggtgcaaagtgagtaaagaactggcaaatcaacggttagagttgaagaataaggacagcaatgttataatatgaagctggatagaacgagctaaaatacgcttcgcgaattttactcgttatcgcggcagtcatcaaggtctcgtgcaagcacggactttgactcgttgctcgcgtaaatcaaaacggcagtatccatttcggatactgctcgtttgtattgcatagcaatcatgacagaagatgactgaaaaacagaaaaaagagaggaaaaaaagatgggaaaaattacagtagaaacatgtgaaattgaaggactgaaagtgattacacctaccgtgttcggggatgaacgtggatattttatggaaacttataactacaacgattacaaggcagcaggcattgacatggaatttgtgcaggacaatcagtccagctccaaaaagggagttttaagaggtctgcatttccagatcaattatccgcaggataaactggtgcgcgtggtaagcggagaagtgtttgacgttgcagtagatctgcgtccgggttctgagacatacggaaaatggtttggcgttgtgctgtccgcagaaaataaaaaacagttctttattccgaagaactttgcacacggatttatcgtactgtctgagtccgcagaatttgcatacaaatgtacggatttctatcatccaaacgatgaaggcggactgaaatgggatgatccggagatcggtgtggaatggccgatgccggaaggaatgacaaaagaagaactgaccatctctgagaaagaccagaagtggggaagttttgcggagtacaaaaatcgataagagggaaatgaaatgggaagaaagaaaaagattctggccggtatctgcgttttgtttttactggttttaaatgtgctgatcgtaggtcacagaggaagcgtgggaggaaactatgaacttcatcttactgtgaccagcgacaaggaacaggagattcaggtttattacagtgtagccagagaactttcagaaaagatgagccaggtgcagtcgtataaccaggtgggagaaagtcaggaacttgttttctcagttccatttcagtgtaatatggtacgcctggatctgggcacacagccgggaacatttacgatccaggatgtgtaccttggatgcaaggatgtaaaagaacagattccggagatgaatgatccgaaactgatcgagggacagcagattgagagtctggagtccaatgaagaaacattaaaagtctggaccaatggaaacgatccgtatatctggctgacgcttgacaaagaccagctgtatccggttctggaaaaagattatacccagaaactgtggatcaagaatatcctgatgcttctgctgatcgacggcggagcagtggttgcgtttgttttccggaaaaaagtgctgacacttccgatcgagcttttgcagaaccggaagctgattatgaatctggcaaagaatgacttcaagaccaaatatgcaggttcctatctgggaatcgtatgggcatttgtacagccgatcgttacgatcctggtatactggttcgtattctctgtcggactgaaggcgggaaatgtatcggattatccgtttgttctttatctggtatccggtatcgttccgtggttcttcttccaggatgcgttaaacggcggaaccaacgccctgatggaatataattatctcgttaaaaaagtagtgtttaagatcagtgtactgccaatcgtaaagatgatctcggcactgtttgtacatgcatttttcgttgtattttcactggttctgtgcagcctgtacggatacacaccgtctctggaaacactgcagattctgtattattcgttctgtacgtttatgcttacgctgggactggtatatgcaaccagtgcgatcgttgtatttttcagagatctgacacagatcatcagcattttcttacaggtaggtgtctggctgacaccgatcatgtgggatgttaacatgttgtccaactatccgtggctgatcaaactgttcaaattaaatccgatgtactatatcgtcaccggataccgtgattccatgctgggtcacgtatggttctggaatcactggggatggaccgtatacttctggatcgtaacagtcgtattgtttgcgctgggttcctggatcttcaagagactgaaaccacattttgcagatgtactttaagagaaatcaaagagaggattacagatgtcagagattgcaatttcagtgaataacatcagtaagatgtataaactgtatgagaatccgatggatcggttgaaagaatcccttggattgacaagaaagaaacgatataaagaacactatgctttgaacaacgtaagttttcaggtgaaaaaaggggaaaccgtgggaattatcggaacaaatggttccggtaaatccacgatcttaaagatcatcaccggtgtgctgaatcccacacagggagaagtggtggtggatggaagaatctccgcactgctggagctgggagccggatttaacggtgagtattccggtatcgaaaacgtatatctgaatggtcagatgatcggattcagcaaagaagagatcgatgcgaaattgcaggatatcctggattttgcggatatcggagaatttatccatcagccggtaaaaacgtattcgagtggtatgtttgtccgactggcttttgccgtggcgatcaatatcgaaccggaaatcctgatcgtagatgaagcgctttccgtaggagatgtctttttccaggcaaaatgttaccggaagtttgaagaatttaaagaaatgggaaaaaccattctgtttgtaagccatgacctgagcagtatcggaaaatactgtgaccgggttgttctgctgaacaaaggagaaaagctggcggaaggcgatgcgaaagaaatggtcaacctgtatcgtcgcgttctggtgaatcagtatgacgaaccgggcgagaacaacgatacgaaggagacacaggagaagggaacagctgtacaggaagagaaaagtatgaaggaacagctgaacctgaatccgaaggtgctggagtacggaagcaagctggcagagatccaggattttgccatccgtgagaaatctggaatgatcaccaatgtgatcgaaaaaggggaagaattttccgtggatatgaagattcattttcatgagacgatccaagaaccgatttttgcttttacgatcaaagacctgaagggaacggagatcaccggaaccaatacgatgtatgaaaacacaccggtgggtacacagaaagcaggggagaccagacggattcgattcacgcagaagatgccgttagaggcgggagagtatatgctgtgtctgggatgtaccggctaccgtgacggtgattttactgtgttccaccggctgtatgatgtgtgtaatctgacggtcattaccgataaaaaagcggttggatactttgatctgttctcaaaggtcacgttaaagtaactgaggaggaaaagaatggcgatactgaatttggagtattatacgcaaaaagatctgtattcagatggtgatattgaagaacagatgttaaagatggcaaaagaaggaataacctgcgaggatctttctagtgagcaggtttcctttcctgtgatctatcatttttcagatctgcgtgcaaatatcctgaactggtatccgatcacaaaatcggacagtgtactggaaatcggtgcgggatgcggtgcgatcaccggtacgctctgtgaaaaggcaggtcaggtcacatctgtggaactctcaaaaagaagagcacagatcaattattaccgcaacgagaagaaagaaaatctgacgatcatggtgggaaatctcaatgacatggatctgggacagcagtatgactatgtggtagtcaacggagtgctggaatatgccatgagttttacagagggtgacacgccatatgaaacttttttaagaaagatgggttcctatctgaaagatacgggaaaactgctgatcgcgattgagaacaagctgggaatgaagtattttgccggtgcgccggaagatcatacggacattcccttctttggcatcaacgggtatccgggaaatcacagtgtcagaacattttccaaaacagaattgcaggaactggtgaaagaaagcggatttccttttcagaaattctattacccgtatccggattataagtttccgacggagatcttcacggatgcgtcactgactaccaatcattatgggaaaaattatccgatctatacggacaaaaccgtggatctgttttcagagactgccggtatcgaggcgatgaagaaagaacagatagcagaccgttttgtgaattcgtttcttctggttgcaggaaagcaggaactcaaagaaaaagaagaacttttatatgtcaaactgaatcagggacgcaggaaagaattccggacactgacacagctggtacgaagagatgacagcgtgtgggcagagaaaaaaccactgtgcccggaggcggaaagctttgtagcgggactggaaaaaaaaggagcgcagaaaccgggaaaaggatttcacaatcttccgtgccggtatgaaaacggcggaatcgtgtatcaggtactgagcgggaagacactcgaagaccggatctgtgatctggtggaaaaagaacagaccggtgagattctgagaaccctgaaacatgtatatgagcaggtgttcgcacagcggaaaagagaaccggagtatcagacggaggctttcagagaagtattcggagaacatccgggaaaggactactatgaatgtgtaagtccggcaaatattgatctgatctgtgccaatatctttgagtccggggaggactacgagatcatcgactatgaatggacctttgatttcccgattccggctgcttttatcatgtggagaatgatccatgaactgtattgccggattccgaaactgggtgcgttgtatacacaggatgacatgaatcacgaatttggcatagagccgtcggactgcgagatctttctggcgtggacgatgcattttacctatgaatatgcaggaagcgattctctggatatttaccggaaagacagaatccctgtggatctgtcagagactgtccggacatatcgggagaaaaaacagttccgcagcaaactgtattatgataccggtgcggggctgtcggaagagaacagcatcgagacgacggtggagctgaaccggggaagatttcaggttacgtttgatctgcacaatgtggaaaatatccgtggaatccggtggaatctgttaagcgatacgttttgtgaggtgaaagtggaagttctcgactgcggatgccacggggagctgatcccgtttggcatgcggattgacaaagcggcggatacggtagtatttctgaatctggcaggcggttattttatccatgtgacggaaccttccgaactggagaagattacgatttccggtcagatccgttttctgtcacagaaagagatcgcagaagagatccagctggagcaggaacgaagagaggcagtgcgccgggaagaggaacgaaaactgcagcagcggatgcagaaggaagaacggctggcagccaaaaaggcggaggaagcgagaaggcaggaagaacttcgggcagttctggaattccagcagcagccgaagcagagagcaaaacggctggtgaagaagatgcttggacgcccggttgccccgctggttacagaggatcagccggcagaacaaccggcatcaagctgtgtgggaagcatcgacagcttcagctatgaaaacagtgtgctgcagatcatcggctgggcgtttgaccgtgcgtatgcgatggaaaacacccatcttgcctttttacagaatggggaaatcgtggcggaagaaccgctgaccgtagtgtaccggagcgatgtggcagctgttttacagattccggaggcagaatcctgcggattttcctgtgtgctggtggtgcagtcaccggtggagacggaagtggcagttgcttacgataccgtagacggagaaaagacatatccgttatgtaagatcccggcagatccgacctacaatgagattcaggtgtataccctggagggacaggagagcatcggaaacattcggtattttaaggaacggtatctggaagaaacaccggtatttgatgcgaagatcccttcggatgaagtgatcgatattattattccgatttataacggcttacagtattttgacaagctgtttgcggggattgaaaagacaaagatgaagtatcgtctgatcctggtggacgatcagagtccggatccggcagtacgggaatatctggatcgatacgtggcggaacatgagggaacaattctgcttcgaaatgagaaaaatatgggattcctcccgtccgtaaaccgtgcccttgcaattgcagagcatcatgtagcactggtcaataccgatgtggaagtgccggagggatggttggagcgactgatgtggccgatctttaccaaagaaaaagtggcatcctccacaccgtttacaacttgcggaacgatctgcagttttccgaatttctgtgaggataatgtcatttttgaaggtatgccattatggcagatcgacgatgctttccgccagatccgtccgcagtatgcgaccatgccgaccggtatcggtttctgcatgggtatgaatctggaagcgatcagggaagtaggtcttctggatgaggagaactttgacaagggatacggagaagaaaatgactggtgccagcgtgcaatccaggcaggttataccaatgtacaggtggagaatctgtttgtctatcacaaacatggtggaagcttttcttccgaagaaaaattacggctgttaaagagtcatctggagagactggcgaagaaacatccgaattataacagcgatacggcagctttctgccggagagatccggcaagaacgatccggctgtatgtggaaacacagctgttaaatcagctgctggatgtaccggcgatcgttgcctttgatcataacctcggcggcggtgccacggaatatctgatcgagaagcgcaaactcgcgctgaaagaaggaaaacgtttcctgactgtccggtttgacatcgataatatgcgttattatctggaatatgaatacaaaaaatataaaatccagtattttgccaaagatctggatatgatcctggatgagatcccgagagtggatgagatctggatcaatgagctggtaacctaccaggagatctatcaggtactggatcagatccttgcactgaaagaaaaacatcaggcacatctgaagatgctgcttcacgactttttcttcatgtgtccggcagtaaatctgatgaatgatcagggaaaatactgtcagggcgcggatgcacagacctgtaaccagtgtatcccggcaaaccgaagcaatgcatgcctggactatgagtccggaaccgcatggagaacacactggagagagtttttatcccggtgtgacgagatcctggcattctccgatgatacggcacagttatttaaaaagacttatccgtatctgtgtcagttacatgtactgccgcacaaaccgcattatgtgacggcactggataaaaaggcgaagacgacaaagacactgaacattggtctgctcggtgtgctgtgttataaaaaaggtctggatgttgtcaaggagatggtcaaagagatcgaggcacagaatctgaatatccggatgaagctgatcggtgtatcggatgaagagatcgacagtccggtattttcctgtacaggaagatacaccagagatgaacttccgagattgacgatggaagaagatatcgatctgttctttatcccgtccatctggccggagaccttctcgtatacaacttccgagatcatgtccatgcatatgccggttgccgtattcccgatcggtgcgccggtggaacgtgtaaaatattacgaaaaaggtctggttctgaaagagacggatgcaaaatcggctctgaaagaattgcaggagtttgcagaacatacactgcactgtcaggagatgccggtgcgcgaaaagaagatcctgtttgtgggcgaggaaatctcgtttgcttcccgttaccgggtggaacatttccgggaacagctgcactatcagggttatggatctgatttttatcaggcagatgaggtcgcagaccttgactggagcgagtaccgtgcggtcgtatgttaccgctgcagccgggaagatgtggtacgcgcggtagtggaacaggcgaaaaaagttggattaaaagtatattatgacattgacgatctgatctttgattacgaaaaaatctcttatctgcatttcctgaccggaagtgagtataaagattttaaaaagacaacagagcagatccattcctgtatggaattgtgtgacggctactttacctccacccatacactggcgggagagatccggagcgaattttcgggaaaaccggtggtgatcaaccgaaattgtgcaagcatggagatgcagatcctgtcccatgatgcaatggagcaggtggaaaaagacaccgaacatatttccatcggttactttagtggatcgaagacccacgatcaggattttgaggtggcggaagaggcacttctggaagtgatgaaagaacatccggaagtacgcctgaagctggtcggtgtgctttcagacagaaaaatggaaaaattcggaaataaagtggaaaaacttccgtttatggactggaaacagttaccggctgtcatggcaggtatcgatatcaacctgatgcctctggaggacagtatcttccattgcagcaaatccgagaataaatggatggaagccgcactggtgaaagtgccgtctgtgatgagcagaaaccgggagatggaaggcgtgatcgaaaacggtgtggatggctggctttgtagcgacaaagaagagtggaaaaaagcactcaccacattgatcgaagtgaaaacagccagagtgcagatgggcgaaaaggctcatgaaaaagcgatgcgtcagtatgtaactcagaatacaggaaaagatgcaagagaggaattactatgcagcgagaagtattcgtagtagaaaaggaaagatttgaccttgcagatgatagaatctatcatctgcagggtacctggccaaaggaacataccgcagcagcggagctggacgggaaaccgctggaggtaaatctgaagcagcaggagcgcatcagtgccctggagcgttttcaggatctggatctggtggatgcagtccgcatccagatggaaattcagtttccggaaaagctggaacagtataagaagctggtggtttatgcggtacagggtggaaaaaaagatgtctggttttcgattccggtaaaacagctgatccgaagacagggcatgccgcagtattttattgagagttctgaagttgaccggaaactcggtatctgccgggtgcgtggatgggcagcttatacggaaccgttgaaagtatacctggagaattcccgtggaaacagaattccatgtgaaatccagcatctgaaacgtgtcgatgtgcagaatcagtatccggaggcagaggtagaagaaaaatgcgggttcttttttgaactgcattaccagcagctgaaagaattttatattgtttttgaggcgggttcggtacgggtgagaagacagatccatctgcagccggtacagcttgccgcggaaaagatgaatgaatactgcaaaaagggcagccgctatctgaaactgcacggaccggtggcacttgcggaaaaagtggtcggaaaagtgaaaaataaaaacaaagccgctgtgatctatcagaaatggcttccgaaacatctgccgagcaaagcagaactcgaacgccagcggcaggaacatttttcctgggaaccgaccttcagtgtggttgtaccgctctataaaacaccggaaaaatatctccgtgcactagtggaatccctgcaggcgcagacctacggcaaatgggaactctgcctgtctgacggaagcggtgcagattctccgatccgggaactgttaaaacagttacagaaggaagagggcagaatcagagtcatcgatcatcaggaacagttacagatctcagaaaatacgaatgctgcgatcgaggcggcaacgggtgagtttgtggtatttgccgatcacgacgacgaactgacggcacatgcgctgtatgagtgtgtgaaagcactgaatgagaaaccggagacagaggtgctgtattcggatgaagataagatgacgatggatggacacaagttcttccagccgcatttcaaaccggattataacgtagatctgctgtgtacggtcaattatatctgccatctgtttgtggcaaagaaaacactgatcgacgaggttggaatgttacgcagagaattcgacggagcgcaggattatgactttatcttccgctgtgtggaacatgcgggagaggaaaagatccatcatattccgaagatcctgtatcactggcgctgccatgaagattccacatcagagaatccggagagcaagctgtatgcgtttgatgcgggacagcgggcggtgcaggcgcactacgaccggatcggtgtgaaagtggaagtgagcaagggagagttcctgggactctaccggacaaaattcctgcgggattatgatccgctgatttccatcattatcccgaacaaagatcatatcgatgatctgaaacggtgtatcgattcgatcgaggagaagtccacgtataaaaactacgagtatattatcgtagagaacaacagtgaagagaaagaaacctttgcgtattaccagcagcttgaggcagtcaattcgaaagtacatgtggtgtattataaagggcactttaactactctgcgatcaacaatttcggtgtgcagtatgcaaaaggagagtatttcctgctgttaaataacgatacggaaattatcaatgaggactgtctggaggagctgcttggctactgtaccagagaagatgtgggtgctgtgggtgcgcggctgtattatgaagatgatacgattcagcacgccggtgtggtcatcggtttcggtggaatcgccggacactgttttgtacagcagaagcgtggatttaccggatactgtcaccggatcatctgtgcacaggattacagtgcggtaacggcggcgtgtatgatggtaaaacggaaagcgtttgaggaagtcggtggtttgagcgaagaactgcaggtggcatttaacgatattgatttctgtatgaaacttcgacaggcaggatatctgatcgtgtataatccatatgcggaactgtaccattacgaatccaaatccagaggacttgaagatacaccggaaaaagtggcaagattcaatcaggagatcgccactttcgagaaacgctggccggagattttaaagaacggcgatccgttctacaatccgaacctgaccctggacagccaggatttctcactgaaacggttataaggagcaaaagaaaagcgggtgcatggtggaaatgtacctgcttttgtaactattcagcaggtagtatcccgcgaggtgttttggcatgaatatgccaaaatcccgagacatacaagccaaaatgccatcaccgaaggtgattttaaatgcattttggcaggtaactgtgaaggtactgaacagttacctgcttttttgaaaaaacaaaacaggtggaaaaatgaatataaaaaatttatgggacaaatacagagacattcttccctatggtgtcttcggtgtcctgacaacgattgtcaatattggaacctactggttctttgcccatccggtgggaggttcggtgatggtcagtacggttctggcatggatcgcatcggtactgtttgcctatctgaccaaccggaaatgggtttttcacagtgaggcgcggacaggaaaagaagtggggaaagagatcgtttctttcttctcctgccggctggctaccggggtactggactgggtgtgcatgtttgtctttgtggatctgtgtggatggaatgatgtgctgatcaagtgtgtggcaaatgtgcttgtgatcgtgctgaattatgtgacaagtaaactggttattttcaggcataaagggtgaatgaatgaaaaaagcaggaaatgtaggaaaaaaagaatatgcggtatggatctttgtgtttgcggtttttgtgttttgccttgcctgggcgctggcggcaccgtttgatgcatcaccggatgagagtatgcgttaccagatcgtggagtttattgcaaagcacggaagtctgccggacggcagagatccggaaatccgcaatgccaactggggcatctcctatgcgtttaacccgatccttccgtacatggcgggggcagtcctggtaaaaatcgtacagctgtttacagcaagtttccgggcaactgtgatcgctgcgcgtatggtgaatgttcttttgggaggcggaatggcatggtttacctggaaaatcggggaactgatgtttcggcggaaagaagcgggaagattttttgcggttctggtatgttttcttccgggcacgtgctttctgttctcgtatatcaatacggatgggctggcactgtttaccacagcttggatcctgtacggctggtgcagggcgtgtaaggaaggatggagtctttcggtctgtatccaaatgggaattgcgatgggactgtgcatgctgtcgtattacaatgcctatggatatctgctgatgagtgcggtattttttgtcggctgtatgatgaaatgccaggaacagaaatgggactggaaacagatgatgaagaaaggctgtctgatgctgggaatcgtctttctggtggcaggatggtggtttattcgcagcgggatcctgtatgacggagattttctgggaatgaaaacttcctcgatctatgcggaaaaatacgcgatcgatgagttaaaaccttcgaaccgggtgcttccggtcaatatggacatgagtgttctggatatgatgctctgggtgccgggaagctggcagcacaactggctggttacggtactggtaagttttgtcggaacgttcgggcatctggatatcttcatgccgtatctgtggagtaaactgtatctgcttgtgtttactgtgggaatcctcggaaacctctggaaactgcgctgggactttgatgtggcaaccgaatttatcagaaaagagaaaaaagccgatggggacggagtgacggtcacagaggtttggagaaaaaataaaaaatggaatgtgcgaaactggatgcatatctgtatggcggtcgcgatggtgatacctgccggtctgctggtatattatgcgtatgccagtgattttcaggcacaggggcggtatatgatgccgatggtatttccgtttttgtattttgtgacacttggctatgagaactggctggagaagctgacaggaaaagaaaagatcaaaatgtggatcagtagaggcggacaggcgatagccgtgctctccgcattgttgacatactttctggtatatcgggctgcttactgatgtacgctcgaagtaactactgaaaaacggaggttacagaacattatttttggttctgtaacctccgttttttgctattggttgaagcaaaaatcagtcctgggactgactgcaccgaaacagtgaaaattcatcattctgccagatacaggtaaagctttccggcagtgtgttctccggaagtgttcgggtatataagacaagatagtcgataccggacgattgcatctgctgttcaatctgtgctgcatcccagtgacagtcctcgtacagtggcgtatagagctgtgtctgcaggctgctgtactccgcggcttttttgtttacttcaaacgtaccgctggaatagcggttgatgaatgtggcgatatcgccgcagtattcccggattccataggaaatttcttccggaagaaataatgttttggaagaatctgtgccgacatccgcatggatggcatcggcaatctgtacgctccgggaatccagcttgtatggattttcacgaagctcccaggttccgttttcaaaaacagaactgccacaggagaaaataagcgtggcggcaaccgatacggcaaggacccgttcccggttactgacacatttttctgccaggaggatcatcgcgatcaccatagtcaggggaatgtgaagtaaccagaagattctccagtataccgctgttccggtgaccagctgcgcaacgggagtgatggcagcgggattggcaaaggtaagaaacaggatcagtgtcggatagacaatgacctgtcggatccgtttcatggaaaaaagcaggacaatgagcagagcggctataaagccgatcagaaagatcccccggctgttcagaaaacgtgtaaacagctgatcaaaataagagagggtatccacgccctcggtcacctgctcctgtaccgaaacggtatccgcacttccggtgtagatcagcaccagtttcgtcagtacccatgggagaacgcccagaacgggtaggcaaagcatggcggaagaacgaaacttccgttccgaaatactttttcccgcccagaggcagaaatacaggatcgggtagagatatacggcaactgttgttgtgccaaaaccggctaagaggatcagccagaggaacacaacctcacgaaatgatatcttttcggaaagttccaggaatgccagaatcataatcggaaggaagatggctacgaaaaatgattttccctgccagatccgctgtaacaggaacgatccgcttccatagatcgtagatccgccatacaggttgatgatgctgtaaagaaggcagaactccaggtggagcgaacggctgacttttcgggcgattgcgcggatgaccgcatagtggcatacgatggcaaagaccggccagaccgtatgagccagaaaggcgatatttacaccgaaaacgttgtggatcagtgcataaaggatctcaaaactcaccagtgcgtactgattggaagcagaaaaaccggcaagaccggaagatggttccacggttccgacggagccggtgaaagcaaaggtatttgcctgtgccagataatagctgtcatcaatatccgtatgctggaacaaaacaacgtaactgatctgccagacaatcattacaaggaagagcagaaacagtagaagatgataccggtcagctgtgaaggtccgtaactgtccggtaatccgttttttgttttttctgagatacttcagagtgaccggaacagcaaaacaaaagcagatgccgtagaaaacggtcagtgaaaggagcagataccggatattccatcccaacagcataaacggagtggcaaacagataaaaggacgcaaagaaaacaatgagtcccgtgacgaacaggtgacgatccgaggacttcccggaaaggtttcgaaacgtaattcccagtacaaggcagatgcaccatagcagcaggggaatggcaacaatagcgatcataagccctccccggacccggaaagatccgtatccgccggatataccggcatctggttgcgataaagaacttcatttccatcgtcatccggtatgatcatggtggtaaaaaattcctctgtcacctgatccagttctttcctggacggacaggagatatagtacagcgccacataaggattcggtccgtgggcgatgacagattctccttcatgataaaaaatccatggctttttcactgccggatgagatgccagtttctgcggaacggaaagatcacgaatcggtaacagacgcccctgaaaatacaggactgcgccgtggcagaccggctttcgtggatcgtgctgagccagcatctgttccagcgcaggaacatcatacagataatttaacagcagatcttcgatggagaagccgtataccatatcggtgagttcatgttcgtatccgaagaaacgggcggcaatctcacagacctggataccgctttctggtttccagaaaaactgcatggataaagcgccttctttctgaccggttcggtcggcgtagcgctgtaaaagatcggctgccggagaaaccacctgctcgtagaggcaggatggatagacatttctggtgctgatcgggatctcacccggtccgatgtcggttttttcgcggtctgcgatgctgatcacatggacgtttcctttatgtacccaggtcatcatattgaattcgtacccgtcgttgtactcttccacaagaatctccggaagatcggtaaaggaagcggtttctgtgatcgcctgtttcagttcttcgaggttgtgtaccacatagatgccgcgggatccgtatttatccagtggttttgtcaccagcggaaaatgcaggtgagagatcagctccggagcaaatccagtggttgggatcttcgcaaaaccgggagagggaagaccgagttcttcgagcagtccccgggtggcggatttgtcgcgataccagggaagctgttccgggttcagatagcagggaagaccggctttcgcggaaatcttcaccatacattccagcagaagatcggaaaacgaggtgaggatgccatccacctgtttttctttgcagagagcggcgatccggtccgtatcggtgaccgggatcacataagattcgtcggcaaaggcacgtgccggaccgtccgggtagccgtcgcagacgatggtatagataccccgggctctggctttctgcaccagctgttcaaattccccgagggttccaagaatcagtaagcgtttgttcataataatcctttcttctaaggttccagtgcatggatcacatcggcgatccgctgcatctcttcttttccgtaacgctggtcacaggggagcgggagaatatctgccgcccactgatattcgtaagagtcgggcgcacagtcccggatcacgttggaccagttggttggaacaaagattttttctttcgccagggcttttcgcagcgcaatcccgtttttatgataatacggataggcgaaaggtccgtccggtatcacgcgggtaaacggtgactcggaggggagcagttctttcagaaaagcgtaattttcatttcgtttctgacggatctgttcgtagtcgatcgcttttaacaggttctgcgtcaggcgggacattgtgcggatctccatctggtgataggtcgctgcgttgtctaacattttctgataatacgttccggcatctttttcgaagcggccgagaatatgtcccatacgttttgcggagacgtcctgctccttttcggcagtgagcgtggcatctgtggaaagataggcgccgtcactcagcccgaaaaatttccggcaggaatacagagtatccacaccgggaagcggacgctggtaaaaagcgtgggtgtgatccacgatgatatttttatagtgctttttataatacagaatcttttcatccgtcagctgtccgtaataattgaccagatagaggtactccccggtatgcagggaaaggtcaggggggagaaccggtgcaagatctttatccagcgaatagaagatcacatgggttccctgtctttcacaggcatcgatcacggagtcacagaggaaaaacggaagatagagtgtctcaatcttacgggattccagcagccagcagagggctgtacggccaagattcacttttacaagatcaggataatattctttcccgtggaaaacttccagttctagatatccaccaatttcctgtttcatacaatcctcctgtcagacatcttttcttcggatgacataatgcggcattttcttggattcgttcagaatattcatcagataaatccccatgattccgatggaaagcagagtgataccgaagaatgccagcagtacgagcatcagggaagtccagccttccacggagacaccgtagaggaaataccggatcaggaagaaaattccgagtcccacactgaccagaaaactgcagataccgaaatcacgaaccagaagcagcgggagggctgagtgggaagtgatatcgtagagcagatctttgaccaggcggcggaaagaataaccgctttttccgtaggctctcgcatcatgatgcaccggtacattgatgatccggttggaacttaacaccagaaggttgccgatctgtggaagataggtgtttgtctgcaacatggcttccacgaggaaccggcggatcagacggaaactggtgatctgcagatcagggtcttttccgagcatcttggaggtagcccagacagagactttggttccgagccggcggatcggtccgtgctttcttccctcgtaacttgcgatgatgacatccacatcgtcccgttctttgatggtgttgatcagtttcgggatctcttccggcggatgctgaagatcgtcatccatggtgatgatgaaatcgccctccgcatgggaaaatccacacaggagagccggatgctgtccgaagtttctcgccatctggatgatctttacgcgggaatccttctgccgcagttcctccatgatctggtaggaacggtctttggaaccgtcatccacaaggatcagttcaaacggttcctgcacggtttcgcggaagactttctcgagacgtgtataaagttccgttaaggtatgttccgaattatacaccggaacaacaacagaatataaactcatagtatcttgtgtttcctttcttaaagggttgttttctgtgcttcatcatatcattttcaattccttatttcaaggttttccggggaaacggctcaccttgacaagggattttacaacagatataatggtgcaagatcaaagcacgcaaaaggcggggaggaacagttttgcagtacagagaatacaatacggaaatattgaatcgaatcaaggatgtggaaaaacagattttatgcaaatatatcgaaatctgtgaaaaatatcatctgcgctatttcgtggcgttcggaacgctgctcggaacggtgcggcataagggatttattccctgggacgatgatattgatgtgggaatgccgagagaagattatgaaaaattccttcagatcgcacagaaagaatgcggggaagagtattttcttcagactgtcgatacggatccggagtatcatctgtattttgcaaagctgcgtatgaatcacacccgttttgtggaaaacagtctgcaaaaggcgggaagcgttaccggattctatattgatatctttccttatgatgagatctcggatgatgaggcagagatggaaaaacagctgaaccgggcggtgcgctgggggatgatcctgagtatctataaggttaaagagccgcagatcggtcagtacggaccggcaaaagattttgtgatgcgctccatctggcatattctgcacggggggatgcatctttgcgggatatctgcaaagacggtctggaaaaagtgcaaccaggcatttatgcagaaaccgaagaagggaagttcccggatgacaacctttgccgcagatgcaaaaaaatggatcattgagaaaaaagagatcgaacagctggtggatgtgccgtttgaggatatcaccgtgaagattccaggcggatacgatgccattcttaccagatgttacggagattatatgaaacttccggatgaaaaagacagggtaaaccatatgcctgtagagatccagtttccgggagaagaggtaatgacatttggaaaatgaaaagaaagcacctatcagagtatcggtgatcgttccggtctataacgcggaaagctatcttcgcacatgcctggattcgatcttacagcagacacttgagaatattgaaatccttgcggtagatgacggaagcaaagatcactcagcggagatactgagggaatatgaaaaaaactatccggatacgatccatgcgatctatcaggaaaaccaggggcagtcagcggcgcgaaaccatgcactggcgatggcgtccggagagttcgtggcgtttgtggacagcgacgattacataggaaaagattttctgaagaaaatgtatgacaccgccatagaacagaagtcggacatggtgatgtgcaattataccaaggtgacggagcagggcgagatcattcagaagtatgagatcaattatcaggaaaacgggatccggatcccgtcgtatctttgctgtaaccgtctggttcgaagacaactgtttgacacctggaagatccgcttccgggaaggcgtgatctgcgaagatattccgctgatcttaaaactggaagccgttgccgcaaacattcagaccatcggggacggagaatattattaccgtgcgaatccccagtcgacaacctcgacgatcaaaaaccggaaactggagatgcggcagctgcctttcggagagctgcgggatgccatcacattttgtacagataaagagcatccgatggatccgttaaaactggaattttttatctgccggatcatgacaagcctgttgtttgacacgggaagaggatgccgcaaagaggtgaaagacggaatgtgccgggaagtacaggagattatggagaactgtttcccgaaatgctataaaaatccttatataaaagtgggatattttcaccaacttccggcggtacaaaagatcggaccgtggatctgtgtgtgtgcactccgggtgcacggactgaaacttctggcgaaactgataggctgaacaaaaaggaaaaaatatggaagaaaaaaaagtatcaatacaaaagagcattatctggaactcggcgggaagtatggtatatctgatcacgcagtggctgatcagtgtactggtagtccggctctccggtgtggaaacggcgggagtcctgacccttgccatgtcggtcaataacgtattttacagcatcgccatgcaggggatccgcaattatcaggtatcggacatgaaagaaaaatacacttccggtatctatgtgagcagccgtctgatcatctgtatcctctcgttcctggcgtgtgggggttatgcactgatcgccggatacagctacggatcgagtctgtgtatcgttgcctactgcctgtttaagatggcggaggcgttctacgatgtctatgccggaatctgtcagaaaaaatggcggatggactggatcggaaaatcctggctggtgaaaggacttctttcttttgcgggatttgtggtggtactggcagtgacgcagagtctgctggcagctattcttgccatggcgctggtctcctggctggtgatctttttctatgatattccacgggcaaagaagctggataccataaagattcatctgaaagagaaaaaaaatataacgttgatggcggaatgttttccgctgttatgttaccagaccatggcatccgttattccgacgatcccgcgtctggtgatggaaaaacttctgggaggtgcggcactcggtatctacggatcggtttccgcaccgacgatgatcgtccagatgggagcgtcttatgtatttaacccgtttatcacgctgtttgccgaacagtacagcagtggaaatatccgggatttctggaaaacttttcgcaaatgcatggcagcgatcgcactgatcagcgttgtcgcccttggtggcggaaagatcctcggacactgggggctggaacttctgtacggggatgaggtggcagcgcatgaagatctgttgcttcctctcatcggctgtacgattctgaccgccatcgtgtggtttttatgtgcgctgcttacggtagtaagagagatcaaaggactggtgatctgcaatgtgatcatacttccggtcagctatttcggcgcctatccgctgatccgccagtttggaatgcagggaggaagtatttccctggcggtgagttatctgatcgagatcgtcgcactctggatctggctgttacggaaagtcagacagagggagaaacaacatatggaaaaataagaaaaagtgcctgttttcggcacttttttgatcgtaagaaaagtattcttgaagcgaaagtataagaatggtataataagatgatatggtatcgtctgtaaagaggatatacaaaaagaacaaaaggaaaaaacgatggaaaaagtaaagaattacatacagcttcacctgaatattctgctgttttcgctgaccagtgtattttccaagatggcgtccgttcagtataataagcacgggctgggaagtatctggctttatgtgtttctggcactgatgatcggaaactgcgggatctatgccattgcatggcagcaggtgataaagaagttctccctgtccacagcgtatgcaaacaagagtgtgtacctgttatggtcgcagatctgggcagtggtgatctttcatgaaaatctgtcggcgcagaatattatcggaatcctggtagtactcgccggcgtatgggtggtgcagcgctatgaatagaatgtttatgttactgatgctggcaggcacattttttactgccatctcccaggtactcttaaaacagagtgccaataaaaaatacagcaatccgctgctggaatatctgaactggcgggtgatcgtggcgtacgggatctttttcggcgtattgcttctgaacacctggtgttatacgaaagtggatatgcgtttcggtccggtgatcgatactgcggcgtatgtatttgtactgatcttttcaagattgattctgaacgagaagatcacaaaaggaaaacttgtcggaaatctgctgatcatagcaggaattttgatttatacgatgtgagataccagaggcagaagtacggaacaatccggtatcaaagaaaaacaataaacaggagtgagaagagtgaaaatcagttttaaccgcccaccgtttgtgggaaaagaaacagagtatattaaagaagccgtagaaaaaaacggtatgatctgcggagacggtccgtttacaaagaaatgttccgagtggatgaaggaaaggtttcagacgaaaaacgtattgctgacaacttcctgtacgcatgcactggagatggcggcatttctggcggatatccagccaggagatgaagtgatcatgccgtcgtatacgtttgtatccaccgcggatgctttcgttttgcggggcgctacctgtgtgtttgtggatatccgcccggatacgatgaatatcgatgagacaaaaatcgaggaagcgatcacagagaagacgaaagcaatcgtgccggtgcattatgccggtgtcagctgtgcgatggatgagatcatggcaatcgcgaaaaaatacaatctgaaagtggtggaagatgccgcgcagggagtgaatgctttttataagggaaaagcactgggaacgatcggtgatttcggatgctacagtttccatgagaccaagaattattccatgggagagggtggtgcgattctctttcaggatgacaaatatctggaaccggcggaaattttacgggaaaagggaacgaaccgcagccagtatttccgtggacagatcgacaaatatacctgggtgggctatggttcttcttacctgccaagcgatatgaatgccgcctatctgtgggcgcagctggaagtggcagataagatcaatgacaagagactgtctatctggaacttctatcacgaagaactgaaagaactggaagacagaggagtgctggaacgcccgtatatcccggaatatgcaacacacaatgcccatatgtattacattaaagtaaaagatctgaaggtgcggacaaaacttctggcatatttgaaacagcgcgggatcctgagcgtctttcattatgtaccgcttcacacggcaactgcaggaaagaaatttggaagattccacggcgaggatgtctacacgacaaaagagagcgaacggctgtgccgtctgccgatgtattacagcctgtctctggaagaagcggcggaagtggtaaaagcactgaaggaatttccggagtatgagacgatagaaggaagataaaaggcagataaacggcaacagaaaggagtatcgatgagttcaggaaactggatgcgttatctgaaaaagataaaaccgtatacgatcaaaaaggggtttcgttatctgaaacattacggaccgaaggagttctgggtgcgcctgtgcgagcggatggaaccggaagaagtgccttacggaccatggtttgaaagccataaaccaacggaaaaagaactggaagcacagagaaagaaacagtggaaaaaacagccgctgatcagtgtggttgttccggcatataaaacgcctgaaaaattcctgcgggaaatgatcaaatctctggaggcgcagacctacacaaactgggaactgtgtatcgccaatgcaagtccggaagacacagcgatggcggaagtgctccgggagtacaccgggaaagatgtcagagtaaaagtggaagatctgaaagaaaatctcggaatcgcggaaaatacgaatgccgcgatggagatggcagtcggggaatttaccgggctgctcgatcatgacgatctgctggcaccgcaggcactctaccggatcgtggaggcgttgaatcaaagttcagaagagccggatgttttttattcggatgaggataaggtgacaacggatctgagcgaacattttcagccgcatttcaaaccggattttaatatcgatctgttaagatccaataattatattacacatttctttgtggtgagaacgaatctgatccgtcaggttggcgggttccgcagagagtatgacggtgcgcaggattatgatttcatcttccggtgtacggaggcggcgaaacacatctgccacatcccggaagtgctgtatcactggcggacgcatcaggcatctacggcggacaatccggcaagcaagatgtatgcgtttgacgcgggaaaacgtgccatcgaagcgcatctgaaacgacagggtgtggagggaaccgtgagccatacgaaagaccttggtttctatcaggtggaatatccggtacagggaaatccgctggtgtccatcctgattccgaacaaagatcagaaagatacgttgaaacagtgtctggactccgtattttctaagactgcatatgccaattatgaagtgatcatcatagagaataacagccaggagaaagaaacctgggaatactatgaagaactgaagcagcgggacaacgtaaagatcgtgacctgggaatccggatttaactattcggcgatcaataatttcggagaaaaatcgtcctccggagagtatctgctgtttttaaataatgatgtggaagtgatcaatccgcattggatggaagaactgctgggaaactgccagcgaaaagaagtggggatcgtgggagcaaaattgtattacccggacgatacgatccagcatgcgggaacgatcatcggaatcggcgggatcgccggtcatgcctttttaaatatgccgcgttcgcgaagcggttacctgcacaaggcatctttgcagatggatttgagtgcggtgacagcggcatgcatgatgatgaaacggtctgtatttgaaagtctgggtggatttgaagaaaaacttgcggtggcttttaacgatgtggatctgtgtttgcgctgtgtgaaagccggctatctggtggtttacaatccgaaagtggaactgtatcattacgaatccaaatccagaggatcggaggacagcgaagaaaaggtgcgccgattccagcaggagatcgaatttatgcggacccgatggatcgatctgctaaaacagggagatccctattacaataaaaaccttactctgagcaaatggaattattccctgcgggcgtaaggaaggagatacgatgaaaaagataaccgttgtgattcccaactttaacgggatgcagtatgtggaacgttgtctggacagtctggagagacagacattttccgattttgatgtgatttttgtggacaatggttccgtggatggaagcagagaactgaccgaaaaaaaatacccatgggtgaaggtgatcgcgctggcggaaaacaccgggttctgtaaggcggtaaatctcggaatcgaggcgacacagacaccgtatgtggtgctgttaaacaatgataccgaggcggaaccggattttctgaaagagctgtatcttggaattgaaagaaaaaagaacgctttttccggggcagcgcggatgctgcagtttcatgaccggggaaagatggatgacgccgggaattattataactgccttggctgggcatttgctctgggaaaaggaaaaccggaagaaaattatctgaaagagcggaaaatatttgcctcctgcgggggagcggcgatttaccggacggaactggtaaagaaactcggcggatttgacgaggagcattttgcttatctcgaagacatcgatctcggataccgggcgcagatcgccgggtacaaaaactggtatctgccgaaagcaggggtgtaccatgtgggaagcggaacttccggctcccgctacaatcaattcaagatccgatattcttcgagaaataatatctatatgctttataaaaacatgccccttttgcagattcttctaaacctgccgtttctgatcctgggatttggcacgaaactggtattctttgccacgaaaaagtacggacgggaatatgccgcgggaatcaagaatggattttccctgtgcaagaaagaaaaaaaagtaccgttttcctggaaacatctgccaaattacgcaaagatccagttgcaattatggatcaatgtgatccggagatttggataggggaggaatacgggaacgtaagttttgttgacaggaaaatgcttcccgactataatatgtaagaaaagtgtaagttaattcataaaatgtttggttgagctttttggggttccgtattatagtaatatggtaaacagaaagggataccgaaaacgattaaaaggtgaaaaatattgattaaagataatcagaagtactttaatcgtatgcacgtagtgatagatgccgttgtgatcatcatttcctatctggcggcatggttattaaaattcgtgggtccgttttccggcgatgcggtcaggagcctgtcttttgagtggtatatgacagcactgtttggaattgtccctgtttatctgattctgtattatgcatttaatttgtatacacccaaacgggtacagggacgcaggctggaattttccaacattgtaaaagcgaatacagtgggactcctgttgttgatcggcggcatctatgtgttgctcaaagagatcaacttttcccgtgacatgttgttttacttttattttatcaacatgtgtctggaagaactggttcgtatggcgatccgctatctgttgcgggatatccgcaagagaggactgaatcagaagcatatcttactggttggttacagcaaggcagcggaaggatatatcgaccggatcctggaaaatccgcagtggggttatcagattcggggaatcctcgatgacaatgtggaagcgggaactacgtaccgcggaattaaagtacttggaagaattgctaatctgatggtgatcttaccggaaaaccgtctggatgagatcgcgatcactttgggactgagtgagtattaccggctgcaggaaattgtggcaatgtgtgaaaagtcaggagttcatacgaagtttattcctgattataacaatatcattccgacaaaaccgtatacggaagatttactgggacttccggtcatcaatatccggtatgtgccactgaccaatacgttcaacgcggtggtgaaacggctgatggatatcttcggatcgctggttgcaatcatcctgttttctccggtgatgctgtttgccgtgatcatgatcaaactgacgtctccgggaccgctgatctataaacaggagagggtgggacttcacaatcatacgtttatgatgtacaagttccgttcgatggaagtacagtcaaaggaaagtgaaaagaaggcatggaccgtgaaaaacgatccaagagtgaccggaatcggaaaactgatgcgaaggacgagtatcgatgaactgccacagctgttcaacatcctgaaaggggatatgagtctggtgggaccaagaccggagcgtccgtttttcgtggaaaaattcagggaagagattccgagatatatggtgaaacatcaggtgcgtccgggacttaccggctgggcacaggtgaacggatacaggggcaatacctcgatccggaaacgaatcgaatacgacctgtattacatcgaaaactggtcgatcggactggatataaagattattttgctgacatttttaaaaggctttatcaacaagaatgcgtattaggcaaaaggtccgcaagataggaaacgaaaaggaatcataaggagtagatacatggcgaagaagaaaaacctgacggacagacagaaaagagtccgacgcagacgtcggagaagcacgttaagcagagtgatgttcgcactggaaattatcgttctggtagtcctgatgggcggactgtttgtatatgcgaaacttggaaagctgaatcacgagacgatcaatgaagaagaacttgatgtgaatgagagcgtgacggaaaaccaggtcatgaaaggatataccacgatcgcactggtaggaatcgacagccgggatgacaagctgaagagtgactggaacagtgatacgatgatcatagcaagcatcaataacgacaccaagaaagtaaaactggtgtcggtataccgggatacctatctgtgtctgggagaagatgaagatgaaaataattcctatggacttgccaattcggcgtattgtaccggcggtgccaagaaaatgatcaacatgctgaacaaaaatctggatatgaacatttccgattttgttaccgtgaattttcaggcagtggcagagacggtggaactgcttggtggaattgatgtggagatgaaaaaagaagaggttgttcatctgaacaattattgtgtggaaacctcggaagtgacagggatggattacaccccgctggaggaaatcgagggtgtgcatcatctgaacggtgtacaggcagtagcttatgcacgaatccgaaaaacatccggaaacgatttccgccgtgcggcaagacagagggaagtgatctacagaattgtagaaaaagcgaagaattcaagtattgccacgttaaatacggtactggataaaattttccctatgatctatacctcattaacggaaaaagagattttatcgatgggaatgaatatgctgtcatatgatattgaagatcagaccggttttccgtttgatcatctgtatggcgatacggtgaaagaggcgatggatggtgtggactgcgtactgccgatcaccctggagtcgaatgtaatcaaacttcatgaattcctgtacccggaagacagttatgtaccgtcaaacgaggtgaagacatacagtcaggaaattatcgataagagtggatttggtgaagaatccagactggaacactcggaagacggatctctggcagcttatcgggaaacagatacagaatccgcggatacgacagaaaatactgcggatacacaggaagagagtacagcagatacaaccggtgacacacagggatatgatgagtcttccctggcacagtaaaccttaggggatacaaaagagggaggggaagtctatggctaagaagaaaccactgaccaaaaaacaaaagagaatcttacagagaagaagacgcagaagaatcctgttcggaatagagatttttattctgctgattctgattggcggagtatttatctatgcaaaactgggcaagatgaattttaccgatcttgatttcagtaagattggtgtgaataccggtgtcagtgacaataacgtgatgaagggatatacgacgatcggactgatcggtctggatggtcgtgacggagaactgaaatcgggcgcccgcagtgatacgatgatcatagcaagtatcaacaatgacaccaaaaaggtgaaactggtgtcggtatatcgtgatacctacctgcggatcggggaagattctgagggaaacggtcagtatgataaagcgaacgccgcctataaaaaaggtggtccggaacagtttctgagtatgctgaataccaatctggatctgaatgtgacagattttgtgagcgtagacttccaggcagttgcggaagccgtggaactgcttggcggaattgatgtggaactgaaagaagaagaagtggtccatctgaacaattactgtgtggagacctcaaaagttaccggcatggattatacaccgctggaggaaaaagcaggtgtccatcatctgaacggtgtacaggcggtatcttacgcacgaatccgttatacatccggaaatgatttccgccgtgcggcaagacagcgagaggtaatctacaagattgtagagaaagcaaagaactcggatattgccaccctgagcaagattctggataaggtatttccaaaggtatatacatcctttacaaaagcagaaatcctgcagatgggaatgagcatgatgtcatatgacatcgaagatcagaccggtttcccgtttgatcatctgtatggagagcgggtaaaagatgcgatgggtggtctggatgtggtactcccggttacgctggaatcgaatgcaatcaaactgcatgagttcctgtatccggaagacagctatactccttctgatgaggtgaaagcatacagtcagagaatcgtggataagagcggtttcggagacgagtcccgactggatcattcggaagacggatctcttgctgcttatcgtgcaagtggtacggagtaagagaaaaaataaaataataaagaactgtcgtgtaagtcatacggcagttcttttcgcatgtataaaaaaggaatggagcagagcatggaaaagaaaacggtagatgtgatcatcccggcataccgtccgggggaagggtggaagctactgctgcggggactggaaggacagacctggccggtacaccgcctgatcgtgatgaatacaggagaggaaaactgggaagcggcttatgagaaaacgacgattccgatggaagtacatcatctgaccagagaggaattcgatcatgggaagacaagagatcaggcggcacgaatgagtcaggcagattatctgctgtttatgacgcaggatgcactgccggaagaccgatatctgatcgaaacactggtggaggcgatcgagcaggataaaaagatcggcgcagcgtatgcgagacagctgccacgagaggactgccggttgatggaacagtatacgagacagtttaattatccggagaaaagtcgtgcgaaatggctggcggatctgccggaactcggtatcaagacgtatttttgttccaatgtgtgtgcgatgtataagcgagagctgtatttgcagctgggtggttttgtgaagaaaacgatttttaatgaggatatgatctttgccggcgggctgatccagaagggatatggagtggcttatgcggcagaggcaaaggtggtacattcccataattattcggcaatccagcagtttcaccggaactttgatctggcagtttcacaggcggatcacccggaagtttttgacgggatccgatcggaaggagaggggatccgtctggtgaaaaagacggcgggctggctctgtcgccagggaaaaccgtggctggtgatccagctggtatggcaaagcggctggaagtatctgggctatcttctggggaaaaaataccgaaagcttccacgctgggtgatcgatcgctgcacgatgaatccgaaatattgggaataagcgggaaagttcacaatttcaacacaattttcggatatgataaacagatacacaagacgcgaaaaagaatagaaatacagataaaggacagggagaaaaacgatgagtgatgaatggaaagtgccgggaacggaaccggaagaaaatcagcagacagtcgttgaggaaacggagactgctgaagtgacagatggaaaagagaatgaggaagctgcagcagaggaaatagcagaaacgacagaatctacagagcaggatgtaacaccggaacaggcagaggtgacagaaacggcggaagaagtgagaccggacgcagatacacaggctggggagaccggagaagtgaaaacacggtatccatgggaagcggtgcttggaaaagaagaaagaaaagaagctgatcaggagcaggtagaacagtctgcgcctgagacaccggtacagccacaggaacaggcagcaccgcagagtgatgcacagacgacagatccacaggcagcaggttcctatcactgggtgaatccggagtatcagaaacgccagaacggaacggacggcgaggaacgtaccagccagaacacgtatgagaatcagaattaccgggaagatgtcagtggaaccgcagatgcgcagaaccggacagagacaacagccaatgaaccgaataacggaggctggggacagccggtaggtggaaaccagacaacaaaagagacagagagtaaccattcttccggacaggcaaccgggggctatcagaatggcaactggggctgtgcgggaaacggtcagaacagccagaatacgcagaatggcggagcatatcagaacggaaattcctggacgagccgggaacagagtacgcagaacggtccggtgaccggtcagagaaagtatggaaattatacgtattaccagccacagcaggatccgaatcaaccacaggatcacagaaaaccgggcggaacaggaaaaaaagtattagtaacgcttggtctggcggtactttttggtgtagttgcaggcggtatcatcatcggatccagtatgatcgtgcataaagaaattaaaaatgagcagaaaacagagtatcagcttccgaccacggaactgccgcagcaggagaatgctgacggggacagtaacagtgcagcaggaagcggaagtgatgcaacggaggaagtaagcgcaggcacaacgggagaatacaccgttgcacaggtggcaaaaagttgtatgccgtctgttgtatctattacgaatgcgtctgtaaaaacggtacaggatttctttggcggcgtgcagcagtacccgagtgagagttccggttccggtatcattgtaggacagaatgacagtgaaatcctggtagcaacgaataatcatgtagtagctgatgcagatactattacggtcgcttttgatgatgatgcggtgtatgaagctcaggtcaagggaacggattccgacaacgatctggcggtagtcgctgtgaaaatttcggatatgagtgaagatactctgaaatccattaaagtagtaagcatcggcaattccgatgagctggaaatcggggaacaggtagttgccattggtaatgcactgggatatggacagtccgtaacttccggatggatcagtgcggtggatcgtgaagtaaccgacgaagacggaaagacaaccggaaaactgatccagaccgatgcagcgatcaatcctggaaacagcggtggcgcactgctgaacatgcagggagaactgatcggtatcaactctgcgaaagcggcagctaccgaggtagaaggaatgggttatgcgattccggtatctgtggcacagccgattctggacgaactgatgaaccgtgagacaagatataagacggatgaggagcatgcgggttatatcggtgtgacctgtctgaatgtggattctacttccgcacagacttacggtattccgctgggtgcgtttgtggattccgtagaagaaggcggaccggcgcagacagccggtatccagaaaggggatgtcattgtcaagtttgacggtatgacagtttccggaagttctgatctggttggaaaactggagtattatcaggctggtgagactgtggatgttgtgatcagccgggcacagaacggggaatatcaggagcagacggtttcggttactcttggaaagaagagtgagatgaagcaggcggatccccagcagggtaagtaagtgaataagtagtatcatagacggacgcggcaggggttcccgtcagagtccggcaacgtgggcagagcaactttaagctaagtcctaagaagaactaaatgtcagttcgcggagagccgatcactgtcaagttcttctaaggactggatcttaaagcttgctctaaacgcccacaaagtgttgtcggaccctggcggggacccctgccgctgtgcgttgacggtgggagaaagttgaaatatggtgggaatggcaggaaataaaaggaatgaagggatagaacttattcagagggggagaac

SEQ ID NO: 2589 - DNA, 2625 bp, Unknown
  gut microbiota DNA sequence
atccagggatcgagataatatcccagcaggaaaaacggcagcaggaaaaacaacggatggtaggaaaatgcggcggcaaagtccaggcgcagagcggcgagaagcgcgcgggtcattccacagccggggcaggagatgccgaaaaagaagcggaacggacagccggtaaaccaggtcagcagatggtaggaaaggatgaccgcgcataacgtttttgttttggataaaaatatttttttccggttgggatctttgaaaatgatttccagatgcatagataaaatatcctttactgttcagattttgcgactgaaatcagcctgtctgtaattatagatgtaaaataagaaacggacaagaaaaaattaagagaagcttcattttctgagggggttgtgccattgtgagagattttcattgatggtataataagtgcatcaaataacagaacatgacagaggagacgaacgtatatgagaataaaaagaagaaatggtctggtcagtgcactgctagggctcgtgacctgcggtctgtatcatatctttttctggtatcagtatggggaagataccaactgggtttgcagagatgaccggaaaatgacgcagaattatatcgtggcatggatcctttcctggatcacctgtggcatctacggactgtactggacgtatcagctggcatcccggctgaatcaggcaggtgaccgctacaacgtgcatatcgaatcaccggtgatctttacgatcgtgatgcatattccgtttttatcgtacttttatgcctgtgatgtgatgaacaatttcgcagacgcctatgaaaagaccgcaccacagcagaccgaaagccagcgggattattactactataccgggaataccacagcccagacaccgccgccggtatggccgacttccggttccaatccgaatggcacatcggtgaatccaaacggttttgatttcaaatccacaatggaagatgtgggaaataatctgaaagataaggcaaaagagctttttggagagaatcatccgtcaaacagcagtcagaatcagcagccggtcagaacggcaggtacctgcccgaactgtggagaagaacttgaacccggagcagagtactgtaaaaaatgcggatatccggtggaaaaataaagagaatatacaatgcaacaaaaatccaggcaacggtgaaagccggctgcctggatttttatgtataagctttatttattcttttccgtcaaagcagtaagtacaaactttgcatggttcgagtccgatggaagccaccatatcgtcgagacgatgatagcgaagagaagtaaagttcagctgtttgccgatttcatcaagcatttcgtgatagttgtgagaatccggattagcgtaatcttccagaatcgcttccgtcaccgtaccttcccgtttctggatcacacggcgggtgatcagatccatctcggatttggaacgggagaagttcaggtatttacatccgtataataacggcggacatgccggacggatatgtacttctttcgcaccgctctcgtacaggaactgggttgtctgaccaagctgtgtaccacgcacgatagagtcgtcgatcagcaccatgctcttgtctttgatcagttcacgaaccgggatcagtttcatgtgagcaatctgctctctctgacgctgatgtgccggcataaaagaacgcggccaggtcggggtatatttgataaatgggcgggcaaacggaataccggaacggttggcataaccgatggcatgtgcggtacctgagtccggaacacctgcaacaatatccgcagatacattatcacgctttgcaagcatatcgccgcagttataacgcatctgttctacgttgattccttcataggaagaggtaggataaccatagtaaacccataagaaggagcagattttcatttcattttttgccggagaaacagtttccacaccatccggtgtaaagaagacaatctcagatggtcccagttctttgtagtcgtggtaaccgagattaaaataagcaaagttctcaaaagaagcgcagatcgcatcctctttctttccgaggatcagtggagtacggcctaatcggtctctggccgcatagataccttcaggagtcataaccagcatggtcatagatccttcaataacatcctgcgcgtagcgaatgccttcgattagagaagatttctgattgatgagagatgccaccatctctgtagcgttaatatctccgccgctcatttcgagaaaatgtgtgcagccgttggcgaaagaacgttttaccagttcgtccatattattaatcttaccaacagttgtgatcgcaaaacttcccagatgagactgaactaacagcggttgtggttctgtatcagagatacagccgataccgagagtaccctctaattcctgcacgtcccgttcgaattttgtacggaagggagcgttctggatattgtgaatcgcccggttgaatccgccttctttgccgtagactgccatgccaccccggcgtgtaccaagatgagaatgatagtccgttccaaaaaataaatcagacacacaattgctttttgatgcaact

SEQ ID NO: 2590 - DNA, 666 bp, Unknown
  gut microbiota DNA sequence
aaaagcaagttttgtgcaaataaaagcgaattttgtgcaaatcaaaaaagaaaaaaacatggtaatctaaagacaacaaaaaataactgaaggaacagacagttaaatagcaaaataaaagaaaaggggtagataattatgaaaaaaccggtattggtaattatggcagcaggtatgggaagccgttacggcggattaaaacagatcgacccggtcgatccggaaggtcacatcattatggacttctccctgtatgatgcaaaaaaagcaggatttgaagaggttatcttcattattaaaaaagaaaacgaaaaagactttaaagagaccatcggagacagaatcagcaagatcatgaaagtttcctatgtattccaggatctgaacaatcttccggaaggttacagtgtaccggaaggcagagtaaaaccatggggaaccggccacgcagtattaagctgcctgggaacactggatgcaccgtttgccgttatcaacgcagacgattattatggaagccatgcattccagatgatctatgatttcctgaccacacatgaggatgatgaaaaatatcattatctgatggttggatacgttctggaaaatacactgaccgagaacggacatgtagcccgtggcgtgtgcgagaccgatgcagacggt

SEQ ID NO: 2591 - DNA, 847 bp, Unknown
  gut microbiota DNA sequence
ttattttatggcataaaaaaacagcctgaaccttttccatgtccatagccgctctcctgccatttggttttctatttttcttaatttccgtattttcacggacagctttcttcctgacacagagctgtcacctctgtgtgcggttctttcataaatttcccgcatttttatggcggttcatttcctgcatcctctgccttgcccattggctgtgctcctcgtttacctttctcggtttccgaagattgatgaggtgtttttcacaggaataggttttactcacttcggtctgctctaccacctggtaatgctccggataagctgcagccagtgcatccagttttcgcatcatctgcgggctggctgtataaatactggcttcctgttcatcattattaaaattgataatcgtttcctgctcatactttgtcagtttcatctgcttttttctcctttccggctcccgcctgttttgctttatttgtatgctgttccatccacaaagccagcttctgctttgtgacaagtttccgccctcccacctgcaaggttggaaaatccggacggtttaatagctgatacgctcctgcctttgaaatagaaagggccgatgccagcagttttgcatccagcacgtccggcagcgtttcaaataattctttccccacaaaaatcaccccctgtccggaaatgggtaaaagaaagcagctatcgtaaggatagccgccgatgggatggatggattagaatgtttccagatatttttgatattcttccgagataaaatcctcataacagtctgcaatatggcggattcttttcagcaccgcaccgtgtgtcttatagc

SEQ ID NO: 2592 - DNA, 2927 bp, Unknown
  gut microbiota DNA sequence
taaagaacagttcacattcccgtgcaaaaagcagatgttccggcatatagtgaaacaaagatctgaaacgggcaaagacgatgaagaaaagaattaccacatgggtattacttctgatgctgataacggctgaaatctgtcctgtgacaatccagggtgctgtacagccggcgccggagatcagtgcgccgggagcggtacttatggaaccatctacaggaactgttttatacgaaaaaaacggagaagaacagcgaagtccggccagcattaccaaaatcatgactctgcttctgatttttgaagcactggaagacggacagatcacgttggaggaagaggcggtaaccagtgcctatgcaaaaagcatggggggatctcaggtttttctggaagagggagaaaaacagacagtggagaccctgatcaaatgtatcgtagttgcatcgggaaatgatgcatccgttgtaatggcagaacatcttgcgggaagtgaggaagaatttgtgaaaagaatgaatgaaaaagccggagagcttggcatgatacatacacagtatgtggactgttgcggacttacagattccgaggaacattataccacggcttctgatgttgcaattgtctcaagagaactgattacccgctttccccgtatccttgagtattcctctatctggatggaaaatattatccacagaacggcacagggagagaaagaattctgcctgaccaataccaacaagctgattcgcagttatgaagggtgcgttggtctgaaaaccggaagtaccagtgtggcaaaatactgtgtatcagcagttgcacagaggggagagatgacgttgcttgcggtagtcatgggtgcgccggatgccaaggtgcgatttaaagatgcagcagccttgcttgattatggatttggaaagtgtaatctttatctggatgaaaacaggaaaaatccggatccggtaccgataaaaggaggcgtgaaagcggaggtggcatgccgatatacaggagaattccggtatctggatacagaagggaaaaatctttcgcagatagaaaagaagattgtgtatatgaagaatctgcaagcaccggtaaagaaaggagatatcgttggcgaagcacagtatttgctggatggaaaagtggttggcaaaacggatatagtggctgcaaaatctgtgaaaaaggccggtctgtgggattatatcaaacacatcagaaagagaatgataaagggcgatgcttattcgacagacagataactgtttgatacaaaaactgacgggaatgaaacagaaaactgctttcccgtcagttctgaaaatgtaacagtatcggttcctgatttacattacgatctgcgcagaacgtatcggaatcatcacatctcgaaaattactgcctgataacctggcatatgaaggatatctccgttgagatccagtgtttccagattgttcatcagcacttttttgtaagttccaggaagaacaacgtcctgagcatcgtgctgataattggcaactaccagcagagcactgtcagtaccttttctgtaataagccatcagattggtctgttcttctttgtatgggacaacttcgccgtatacaaccacatctttgtattccggattcttgcggagggcgatcagctctttgtaccagtgatatatggaatccgggcggttcgcctgttcagcggcattgatatcggtataattcggattcactttcagccatggggttcctgtggtaaatcctgcgttagcagttgcatcccactggaatggagtacgggcattgtcacggctgtaaggaacaaccgctttgaaagcagcttccggagtcagtccggcatccagtgctacctgatactcatcgagggtactgcagtcatcgatctcatcgatggagttgaaagcaacgtttgtcatacccagttcctgaccctggtagatgaaaggcagtccgcggagcatgaagttgacagccgcaagcattttcttgctggtatcatttacatcgccttccgggatatagtggctgacaccacgaggttcgtcatgattttcaatgatattggagataaatccgatatcgcccagtcttgcctgggtgccgaaagcagcttttttgtattcgtcaccccatacaaccggtttgcatttgtgccagccatcatcggatttgccggcgatggtttcggcaaaatcaaacatggaagagaagtgaccgttgtttccgataaaggtttccagagcgtccggacggtcggtaaatacttcacctacggtaaatgcgtgatgtttttcaaaggtttccactttcatctcatgcaggaaatcatcgatacctacggcgtcatggagcatgttttcgatgcttgccagtccgtcatcacggtctgcagggtagctggtgtagatattcggttttttaatgttcatgatcgcatcgatacggaaaccggctacaccgcgatccagccaccagttgatcatcttgtatacttctttacgaagttttggattttcccagttcagatccggctgttttttgtggaatacatgcatgtaatatttgtcggtatgtcccggcagaagatcccatacaggaccgccgaagtaagaacgccagttgtttggaagtttataatctttggtatcggcgatgtagaaatattttccgtactcaccgtccggatcttcacaggcttttttgaaccattcgtgttcatcggaacagtggttgacaaccaggtccataacgatgtacatgtcacgggcttttgcttcttttaacagttcgtccatgtcttccatggttccaaatctcgggtcgatatcgtaatagtcggaaatatcgtatccctgatctgccagcggggagcagtagatcggggagagccag

SEQ ID NO: 2593 - DNA, 2271 bp, Unknown
  gut microbiota DNA sequence
ccaccttcctcttcgtcgctgacaattacaccttttctcatggtaattacgcgctttctgaatgaattgacgatttctctgttatgggttactaccagaacggtagttcctctctcgttgatctcttcgagcagtttcataatctccagtgaattcttcggatccagattaccggtaggctcatctgccagaagaatattcggacggtttaccagtgcacgggccagtgccacacgctgctgttccccaccggataactctctcggaaatgatttgtacttttctgccagtcctaccagtgtgagaatctccggcacacgctttttgatcacacggttcggccgctcgatcacgcgctgtgcgaatgccacattctcatatacgtttctgtctttcaacagccggaaatcctgaaatacaacgcctaccccacgacggtatttcggaacctttctgcgtttcatcttgccaagatcctgatcattgacaatgatcgttccggaagtcggttccagttcctttaacagtaatttgatcagcgtggatttcccggatccgctgtttccaactataaatacaaattcccctttatcaatgtgcagtgatacgtcgtttaaggccggctgacctttggcgtaagatttgcttacattttccaacgtaatcatatactcctcctgtttctattcatctcatcaatagtctaaggtttccatatacttcatatatcgtacgaccataagagcaatcttgaaagtgatcgcatcttcgaatactctcagatcaagaccggtgctcttctggagcttatccagccgatataccagtgtgtttctgtgaatgtacagctgacgggatgtctctgatacattcaggctgttctcaaagaacttattgatggttgtgatggtctcctcgtcgaaatcatccggcgatttattctcgaagatctccttgataaacatcttgcacagcggaataggaagctgatagatcagtcggccgattcccagtgagctgtaggcaatgacctctttttcgtcaaagaagatttttccgacatccagtgccatccttgcttctttataagaacgggagacttccttaagttcttttacaatggttccgtatgcgatatgcaccagttcatccttctcgcgtaccgcctgaagaatcgcctctgcgatcttctgcatctctgcatagccgtcgcccggattcacttccttcaccacgataatactcttctcatcgacagcggtgataaagtcacccttttttccctggaaaatatttttcacattttcaagagccgtgtagtcttttccctgagcggtttccaggataaacaccacgcgctttgcctccacttcaatgtgcagctttttggctctgttatagatatccaccagaagcaggttatccagtaacagattcttgataaagttgtctttatcaaaacgctctttataggccaccagcagattctgaatctgaaatgctgccatctgaccaatcatataaatatcttcactgcctccgctgacaaccagtacatactccagccggttttcatcgtatactttgaaaaactggtttccctgtactacctgactgtccgcaggagatgcggcaaatcctaaaatatcactgctgcttatttccggattctgtgcggtgaacgccaagattttcccctctgtatcggcaacacagaaatcacttctggaaatatttttcaaaccatccagtgtgttttgcagtatctgatttgaaatcataatcataccctctttcagtacatagtttatttagaatctgctatccacccctgataagcaaagtctcttaaatcatattctaatataaaatgcacaaaaaataaagagaaaaacatgaaaaagtaacaatcagagcagattttcacattttgttcacactttatattcctgaaatccctctccaagaacctctctcgcatccgtaacgatcatgaatgctctcgggtctacctctgcaactgcctctttcagctgtacgatctgtttctttccaacgacggaaaagagcatcagacgttctgtccctgcatacatcccctgtgcatgcacaccggtcactccgcggtccagatcctcaaggattcttcgcgatacttcttcctgatgatccgtgataatatagactgccttcgcataattcagaccttcctgcagaccgtccgttacttttcccacgatataggcacaggatcgcagactcaccttctgg
